United States Patent Application Publication US 2024/0327476 A1 - sequence listing, part 115

SEQ ID NO: 219421 - DNA, 1710 bp, synthetic construct
  misc_feature 1..1710: note = Description of Artificial Sequence: Synthetic coding sequence
  source 1..1710: mol_type = other DNA
atggagacttggatgaataactttcacaccctgctgacactggacaacaagctgctgcagacagatgatgaagaggaagccggattgctcgaactgctgaagagccagatatgcgacaatgctgctctttatgcacagaaatacgatgaagagtttcagaggtacctgccgagattcgtgaccgccatttggaatctgttagtaaccactgggcaagaagtcaagtatgatctattagtgagtaacgccatccagttcttggcctccgtgtgcgagcggcctcactataaaaacctgttcgaagaccagaatacactgacaagcatttgcgagaagagtatcgtcgtgcacacttacgccgctcacgctctcgagcgactgtttaccatgagaggccctaataatgcgactctatttaccgccgctgagatagcacctttcgtggagatcctcctgacgaatttgttcaaagccctgaccttacctggctcaagcgagaacgaatacataatgaaagccattatgcggtcgttctctctcctgcaggaagcaataatcccatacatccctacactgatcacccagttaactcagaagctactcgctgtgtcaaaaaatcccagtaagccgcattttaaccattatatgttcgaggctatctgcttgtcaattcgaatcacttgtaaggcaaacccggctgcagtggttaactttgaagaggccctcttcctcgtttttactgagatcctgcagaacgacgtccaagagttcattccttacgtgttccaagtcatgagcctcttactggagacacataagaacgacattccaagctcttacatggcactgttcccccacctgctgcagcctgtcttgtgggagcggacagggaacatcccagcattagtgagactactacaagctttcctggagcggggtagcaacacaattgcctccgcagctgccgataaaatccccggattactgggtgtgttccaaaagctgattgcttctaaggccaacgaccaccagggtttctacctacttaactccattattgagcatatgccacccgagagcgttgaccagtacaggaagcagatcttcattttactgtttcagcgtttgcagaactcgaagaccacgaagttcattaaatcctttctggttttcataaatctctattgtatcaagtacggggctctcgcactgcaagagatcttcgatggcattcagcccaagatgtttgggatggttctcgagaagatcataatccctgaaatccaaaaagttagcggaaacgtggagaagaagatttgcgccgtcggaataacaaagctgctcacggaatgtcccccaatgatggataccgagtatacaaagctttggacaccgttgctgcagtcactcatcggtcttttcgaactgccggaggatgatacaattcccgacgaagagcacttcatcgacattgaggacaccccagggtatcagacagcattttcgcaactagctttcgcaggcaaaaaggaacacgacccagttggacagatggtcaacaaccccaagatccacctcgcccagtcattgcacaagttgtctactgcctgtccaggacgcgtgcccagcatggtttcaacgtctctgaatgcagaggccctacagtacctccagggctatctgcaagccgcaagtgtgactttgctctag

SEQ ID NO: 219422 - DNA, 2265 bp, synthetic construct
  misc_feature 1..2265: note = Description of Artificial Sequence: Synthetic coding sequence
  source 1..2265: mol_type = other DNA
atgctcagtaatctgaacttccaggatctacccgaattttttgaagacaatatggagacgtggatgaataactttcatacgctgctcaccttggacaacaaactcctccaaaccgacgacgaagaggaggcgggtctgctggagctcctgaaatcgcagatctgcgacaatgccgctttatatgcccaaaaatacgatgaggagtttcaacgatatctgcccagatttgtgactgccatttggaacctgttggttaccactgggcaggaagtgaaatacgatcttcttgtatctaatgccattcagttcctagcatcagtgtgtgagcggccacattataagaatctttttgaagatcaaaacaccctgacatccatttgtgaaaaggtgatcgttcctaacatggaatttagagctgccgatgaggaggctttcgaggacaacagcgaggagtacattagacgagatctagaagggtccgatattgacacacggagaagggctgcctgcgatctcgtgcgtggcctgtgcaaattctttgagggccctgtgaccggtatcttctctgggtatgttaactccatgctgcaggaatacgccaagaatccctctgtaaactggaaacacaaagatgctgccatctatctggttacgtccctcgcttcaaaggcacagacacagaagcatgggatcacgcaagcaaacgagctggtcaacctcacagaatttttcgtgaaccacatactgcctgacttgaagtctgcaaacgtgaatgaatttcctgtgcttaaggccgacggcattaagtacattatgatctttagaaatcaggtgccgaaagagcatttgctagtatccattccactactgataaatcatctgcaggccgaaagtattgtagttcacacctacgccgcacatgctctggagcggttattcaccatgcgcggacccaacaatgctacactgtttaccgctgctgaaatcgctcccttcgtcgaaatccttctgaccaacctgtttaaggctctgacacttccgggatcctccgaaaacgagtatatcatgaaagccatcatgcgcagctttagccttctccaggaggccatcattccttacatcccaaccctaatcacacaactcacccagaaactgcttgccgtctccaaaaatccctctaaacctcatttcaaccactacatgtttgaggcgatttgcctttctatacgcatcacatgcaaggccaatccggctgccgtggtaaacttcgaggaagctctgttcctggttttcaccgaaattctgcagaacgatgtccaggagttcattccttatgtgtttcaggtcatgagtctgctgttggaaacgcacaaaaatgacatccccagcagttacatggcactctttccccatctgctccagccagtattgtgggaacgaacaggcaatataccagcattagtgcgcctgctgcaggcatttctcgagcgagggagcaacacaatcgcctccgcagcggctgataaaataccaggcctgctgggcgtcttccagaagctcatagccagcaaagctaacgatcaccagggcttctaccttttaaatagcatcattgagcacatgcctccagaaagcgtggatcagtacagaaagcagatattcattctcctcttccagagactgcagaacagcaagaccaccaaattcattaaaagcttcttggtttttatcaatctgtattgcatcaagtacggtgccctggccctgcaagaaatcttcgatgggatccaacctaagatgttcggaatggtgttagaaaagatcattatccccgaaatccaaaaagttagcggcaatgtggaaaagaaaatttgtgcagtgggcatcacaaaactgctcacggagtgcccgccaatgatggacaccgagtataccaaattgtggacgcctctcctgcagtctctcattgggctgttcgagctgccagaggatgacaccattcccgatgaagaacacttcatcgatattgaggacactcccggttatcagacagcgttttcgcaactggcttttgctggaaagaaagaacatgatccagtcggacagatggttaacaatcccaagatacacttagcccagagtctccataagctgtccacagcttgccccggacgggtccctagcatggtgtcgacttcacttaatgctgaagctctgcaatacctgcaggggtatctgcaagccgcatcagtgacactgctgtag

SEQ ID NO: 219423 - DNA, 888 bp, synthetic construct
  misc_feature 1..888: note = Description of Artificial Sequence: Synthetic coding sequence
  source 1..888: mol_type = other DNA
atgcagccagagggggcagaaaagggcaagtcattcaagcagcggctggtccttaaatcaagtctagccaaggagacccttagcgaattcttaggcaccttcatcctaatagtgctcgggtgtggatgtgttgcgcaagccattctgtcacgcggtcgttttggaggagtcataactatcaacgtgggtttttcgatggccgtggccatggcaatttacgtcgctggtggcgtgtccggcggacatatcaatccagctgtgtccttggcaatgtgtctgttcggccgtatgaaatggtttaagctgcccttttacgtgggcgctcagtttcttggggcttttgttggagccgcaacggtgtttgggatttattacgacggtctgatgagcttcgccggaggcaagctgctcattgtcggagaaaatgccactgctcacattttcgccacgtatccagccccatatctatcactggcgaacgctttcgccgatcaggtcgtcgccaccatgatcctgcttatcattgtctttgctatattcgactcacggaacttgggcgctcccagaggactggaaccaattgccatagggctgctgataatcgtgatcgcttcctctctgggcttgaacagcggctgtgcaatgaacccagcacgagatctgtccccccgtttgttcacggccctcgccggatgggggtttgaggtattcagggccggtaacaacttctggtggattccagtcgtggggcctctggtcggagctgtgatcggtggtctaatttatgtgctcgtgatagaaatccaccatccagagccagattctgtcttcaagaccgaacagtccgaggacaagcccgagaagtacgaactgtctgtaatcatgtag

SEQ ID NO: 219424 - DNA, 1353 bp, synthetic construct
  misc_feature 1..1353: note = Description of Artificial Sequence: Synthetic coding sequence
  source 1..1353: mol_type = other DNA
atgtcagcaatccaggccgcatggccttctggcacagaatgcatcgctaaatacaatttccatggtaccgccgagcaggatctccctttttgcaaaggcgacgtcctgacgatcgtagccgtgactaaggaccccaattggtacaaggccaaaaacaaagtgggccgtgaaggcatcattccagccaattacgtacagaaaagggaaggggtgaaagcaggaactaagctttccctgatgccatggttccacggcaagatcactcgggagcaggcagagcgactgctgtaccctcccgagacaggcctattcctcgttagggaaagtacgaattacccgggtgactacactctctgtgtgagctgcgacgggaaagtggagcactataggattatgtaccatgcttctaagctaagcatcgacgaggaagtatactttgaaaacctcatgcagttagtcgaacattatacttcagacgccgacggcttatgcactcgcttgatcaaacccaaggttatggaaggaacagtcgccgctcaagacgagttctatcgtagcgggtgggctctgaacatgaaggaactgaagctactccagacgatcgggaagggcgaattcggcgatgtcatgcttggggactaccggggtaacaaagtggcggtgaagtgtattaaaaacgatgccactgctcaagctttccttgcagaggcttcagtaatgacacaactgaggcactccaaccttgttcagctgctcggggttatcgtcgaagaaaaaggcggtctatatattgtgaccgagtacatggcgaaaggcagcttggtcgactaccttagatcccggggtcggagtgtcttgggcggtgactgtctgctgaagttttctctcgacgtgtgtgaggccatggagtacctggaaggcaacaatttcgtgcatagggatctggccgctcggaatgttctggtgtctgaagacaatgtggccaaggtcagcgactttgggctcaccaaagaagccagtagcactcaggataccggcaagcttccagtgaagtggacagctccggaggcgttacgggaaaaaaagttctccactaagagcgatgtgtggtcattcggaattcttctttgggagatctatagcttcggacgcgtaccttaccccaggataccactgaaggatgtcgttccgagagtcgaaaagggatacaagatggatgccccagatggatgtcctcctgctgtatatgaagtgatgaagaattgttggcacctcgacgcggctatgcgaccgagcttcttacagctgcgggagcaactcgaacacatcaagacccacgagctgcatctttag

SEQ ID NO: 219425 - DNA, 1353 bp, synthetic construct
  misc_feature 1..1353: note = Description of Artificial Sequence: Synthetic coding sequence
  source 1..1353: mol_type = other DNA
atgtccgctattcaagccgcttggcccagcggcactgagtgtatagccaagtataactttcacggtaccgcagagcaggacctccctttctgtaagggggacgtcttaaccattgtggctgtgactaaagatcccaattggtacaaggcaaagaacaaggtcggccgagagggaattatccctgcgaattacgtccagaagcgagagggggttaaggccggaactaagctgagcctcatgccctggttccacggaaagatcacacgtgaacaggctgagcgcttgctctacccccctgaaaccggcctgttcctggtgcgagaatctactaactacccaggtgattataccttgtgcgtaagctgcgatggtaaagtcgagcattaccgcatcatgtatcatgcgagcaagctgagcatcgacgaagaagtgtatttcgagaacctgatgcagctagtggaacattatacttcagatgccgacggcctgtgtacccgactaattaaaccaaaagtgatggaaggcactgtggcggctcaggacgagttctaccgctctggttgggctttgaacatgaaagagctcaagctgctccagaccatcggcaagggagagtttggagatgtgatgctgggcgattaccggggaaacaaagtcgctgtgaagtgcataaaaaacgacgcaaccgcacaagccttccttgccgaagccagcgtgatgacccagcttcggcactccaatctggtgcagctgttgggagtgatagtggaggagaagggaggactgtatattgtcacagaatatatggccaagggaagcctggtggactatcttcgttcaagaggcagaagtgtcttaggcggtgactgtctgctgaagttcagcctcgatgtgtgtgaagcaatggagtatctcgaaggaaacaactttgtgcacagggatttggcggcaaggaacgtgttggtgtctgaggacaatgtggcaaaagtcagcgatttcgggctcaccaaagaggccagttccacccaggatacaggcaagctcccagtgaaatggaccgcgccagaagccttaagggagaagaaattctccactaagtcagacgtctggtcttttggcatccttctttgggagatctatagcttcgggagggtgccttaccccagaatcccactgaaagatgtggtgcccagggtggagaaagggtacaaaatggacgccccagacggatgccctccagcagtttatgaggttatgaaaaattgctggcaccttgatgccgcaatgaggccgagctttcttcagcttagggaacagctcgaacacattaagacccatgagctacatctgtag

SEQ ID NO: 219426 - DNA, 1200 bp, synthetic construct
  misc_feature 1..1200: note = Description of Artificial Sequence: Synthetic coding sequence
  source 1..1200: mol_type = other DNA
atgtcagccattcaggccgcatggcccagcggaactgagtgtatcgcaaagtataacttccatggcaccgcggaacaggaccttcctttttgtaagggcgacgttttgacaatagttgccgtaacaaaagaccccaattggtataaagccaagaataaagtgggtagagagggcatcattccagccaactatgtccaaaagagggaaggcgtaaaggctgggaccaagctgtccctgatgccttggttccatgggaagctttctatcgacgaggaggtgtacttcgaaaacttaatgcaactcgtcgagcattacacttcagacgccgatggcctctgtacccggctgattaagccaaaagtcatggaggggacggtggcagctcaggacgagttttatcggtcagggtgggcactgaatatgaaggaactcaagttgttgcaaactatagggaaaggcgagttcggtgacgttatgttaggcgattatcgtggaaataaagtggctgtgaaatgcataaagaacgacgccaccgcccaggctttcctggctgaggccagtgtgatgacacagctaaggcattccaacctagtccaactgctaggcgtaatcgtggaggagaaaggcggactgtacatcgtcacagagtacatggctaagggttccctggtggactacttaagatcccggggtaggagcgtgttaggaggcgactgcctgctaaaattttccctggatgtgtgcgaggccatggagtatctcgaaggaaacaatttcgtccatcgggatttggctgccaggaacgtgctcgtgtcggaagataatgttgctaaggtgtccgattttgggctgaccaaggaggcaagctcaacacaggacactggaaagctacctgtgaaatggactgcccctgaggctctcagagaaaagaaattctcaactaagtccgacgtgtggagttttggaatccttctgtgggaaatttacagcttcgggagggtgccttacccgagaatcccgttgaaagacgttgtgccccgagtggagaagggatataagatggatgcacccgatggctgtccgcctgcagtgtacgaagtgatgaagaactgttggcaccttgacgcggcaatgcggccatcatttctgcagcttcgggagcagttggagcatattaagacacacgaactgcatttatag

SEQ ID NO: 219427 - DNA, 783 bp, synthetic construct
  misc_feature 1..783: note = Description of Artificial Sequence: Synthetic coding sequence
  source 1..783: mol_type = other DNA
atggtggcggctccatgggcaacacaggaacaggaagaaggcagggggatccagcccggagacaggggagaccagaaaagcgctgcctcacaaaagcccaggtctagggggatcctccattcactcttttgctgcgtctgccgcgatgatggggaggctctacccgcacatagtggcgcacctctgttagttgaagaaaatggcgcaatccccaagacgcctgtacagtatttacttcctgaggccaaagcacaggattccgacaagatttgtgtagtcatagaccttgacgaaacattagtccacagtagctttaagcctgttaataacgctgacttcataatcccagttgaaatagacggtgtggtccatcaggtgtatgtgctgaaacgtcctcacgtcgacgagttcctgcaacggatgggagagctgttcgagtgtgtgttatttacagcaagcctggctaagtacgctgatcccgtggctgacttgcttgacaagtggggcgcattccgagcgaggttgtttcgcgagtcctgtgtgttccataggggcaattacgttaaggatctgagtcggctaggtcgcgatctccgtcgtgtgttgattttagacaactcacccgcttcatatgtcttccatcccgataacgccgtgccagttgcctcttggttcgataacatgtcggataccgaactccacgatctgttgcccttttttgagcaattatccagggtggacgacgtctacagtgttctccggcagccacgccctggctcatag

SEQ ID NO: 219428 - DNA, 2604 bp, synthetic construct
  misc_feature 1..2604: note = Description of Artificial Sequence: Synthetic coding sequence
  source 1..2604: mol_type = other DNA
atggaagtgccggcagctgggagagtccctgctgaaggagccccaactgcagccgtggccgaggtgaggtgtcccggtcccgctccgctgcgccttctggagtggagagtcgccgcaggggcagccgtccggatcggctctgtacttgcagtttttgaggcggctgcatccgcacagtccagtggggcttcccagtcccgtgtggccagcgggggttgtgtgcggccagcccgtcccgaaagaagattgcggtcggagcgtgctggcgtggtgcgagagctctgtgcccagcccggacaagtggtggccccaggcgcagtgcttgtcaggctagagggctgcagtcatccagtcgtgatgaaggggctgtgcgccgaatgtggccaggatttgacacagctgcagagcaaaaacgggaagcagcaggtgcccttgtcaaccgctaccgtgagcatggtccattccgtgccagagctcatggtaagctcagagcaggctgagcaactcgggagagaggatcagcaacgtcttcaccggaatcgcaaactggtgctcatggtcgacctggaccagacgttgatccacacgactgaacagcattgtcagcagatgtccaataaaggaatattccacttccaactgggcagaggggagcctatgttgcatactagattacgccctcattgcaaagatttcctggaaaagatagccaagttgtacgagctgcatgtattcacattcggcagcagactgtacgcccataccattgcgggattcttggatcctgagaagaaattattcagtcacaggattctctcaagagatgaatgcatcgatcctttttccaaaacaggtaatctgcgaaacttgttcccatgtggggatagtatggtgtgcattattgatgacagggaggatgtttggaagttcgcgcctaatctaattaccgttaaaaaatatgtttactttcagggcaccggcgacatgaatgcaccaccgggtagcagggagtcacaaacccgtaaaaaggtaaaccactccagggggaccgaagtgtcagagcccagccctcccgtccgggatcccgaaggagtcactcaggccccaggagttgaaccatctaacggcctggaaaagcctgcgagagagctgaacggcagcgaggcggcaactccacgcgactctcctcgaccaggaaaacccgatgagcgggacatctggcccccagcgcaagctccaacaagctcccaggagcttgccggagcccctgagccccagggttcttgcgcacagggcggaagggtggctccgggacaacggcctgctcaaggggctacgggtaccgacctcgactttgatctgagcagcgacagcgagagctcatccgagtcagagggaacaaagtcgtcctctagtgctagtgacggggagagtgagggtaagcgaggcagacagaagccgaaggccgcaccagagggcgcaggtgcgttggcacagggcagcagtcttgagcctggaaggccggctgcgccatccctgcccggtgaggccgaacctggtgcgcacgcaccagacaaagaacctgaactggggggtcaagaggaaggcgagcgtgacggtttatgcggcctgggcaatggatgtgctgatagaaaggaggccgagaccgaaagccagaatagcgaactgagtggcgtaactgcaggggagagtctggatcagtccatggaggaggaagaagaggaggatacagacgaggatgatcaccttatttatttagaagagatcctcgtgagagtccatacagattattacgccaaatatgatcgctacttaaacaaggaaattgaagaagctcccgatattaggaagattgtgccggaactgaagtccaaggtccttgctgacgtggctattatcttctcaggactgcaccccaccaattttccaatcgagaaaacaagggagcattaccatgccaccgcactgggtgcgaagatactcaccagactggtgctgtcccctgatgcgcctgatagagccactcatctgattgcagccagagcaggaacggaaaaagttctgcaggcgcaagagtgtggtcatctgcacgttgtcaaccccgattggttgtggtcgtgtctggagagatgggataaggttgaagagcagttgttcccactgcgcgacgaccatactaaagcacagagagagaattctccagctgcattccctgatagagagggagtccctcctacagccctgtttcacccaatgcccgtcctgcccaaagcccagcccggtccagaggttcgaatctacgattccaataccgggaagttgatccggacaggtgcaaggggtcccccagcaccttcttccagtcttcctatcaggcaggagccctctagcttcaggtggactacttccttggagaaagccgctacgaccgctaccgccagaagaggagggctccggagcagacgtcgttctccgtccccgggaagccaagggcctgcaggctcaggtcgaagtggccatctgaggcccgctcggggagccaggcaaggcgctgggggtcccgaggccaccaggggaagctag

SEQ ID NO: 219429 - DNA, 2886 bp, synthetic construct
  misc_feature 1..2886: note = Description of Artificial Sequence: Synthetic coding sequence
  source 1..2886: mol_type = other DNA
atggaagtgcccgcagctggtcgcgtgcccgcagagggcgctccaacagccgctgttgcagaggtcagatgccctggtcccgctccactgcgactactggagtggcgcgtcgctgctggagcagctgttcggataggctccgtgctggcagtctttgaagcagcagccagcgcgcagagcagtggagccagccagagccgtgttgccagtgggggttgtgtgagaccagccaggcccgagcgccgtttgcgcagtgaacgcgcaggggtggtacgcgaactgtgtgctcagcctggtcaggtggttgccccaggagccgtgttggtgaggctggagggatgtagccaccctgtcgtgatgaaaggcctgtgcgccgaatgtggccaagaccttacccagctgcaaagtaaaaacggaaaacagcaggtacccctttcaaccgccaccgtttctatggtacacagcgtgccggagctgatggtttcatccgaacaggcagagcagctgggcagagaggaccaacaaaggctgcatagaaatcgtaaattggtactcatggttgatttggaccagactctgattcatacaacagaacaacactgccagcagatgtccaacaagggaattttccattttcagctcggtagaggcgagccaatgctccacacaaggttgcgccctcactgcaaggacttcctcgagaagattgctaaactgtatgaacttcacgtgtttactttcggctctaggttgtacgcgcacaccatcgctgggtttctcgacccggagaagaagctgttttctcacaggattctgtctcgggatgagtgtatagacccattctccaagacaggcaacttgcggaatctattcccttgcggcgattccatggtgtgcataattgatgatcgcgaggacgtgtggaagtttgctccaaatctaatcacagtgaagaaatacgtgtactttcagggcacaggtgatatgaacgccccacctgggtcacgagagtcacagacccgaaagaaggtgaaccattcacgcggaaccgaggtgtccgaacccagccccccagttcgcgatccagaaggcgtgactcaggctccaggggttgaaccctcaaacggactggaaaaacctgcccgagagctgaacggcagcgaagccgctacccctagggacagccccagacccggtaagccagatgagcgggatatatggccacccgcacaagcgcctacttcaagccaggaacttgccggtgctcccgagccacaaggcagctgtgcccaagggggacgagtggctccaggacagcgtccagcccagggggcaacgggaactgaccttgattttgacttgtcttctgattccgaatcttcaagcgagtccgaaggaaccaagagctcctcctcggcctcagatggggagagcgaaggcaagcgcggacggcagaagcccaaagctgcccctgaaggcgctggagccctggcacagggctccagtcttgagcccggtcgtcccgcagccccttccttgcctggtgaggcggagccaggagcacacgccccagacaaagagcctgaattaggcggtcaggaggagggcgagcgggacgggttgtgcggcctgggcaatggttgtgccgacaggaaagaagccgagacggagtcgcagaacagtgagctgtcaggcgtaactgccggagagtcccttgaccagagcatggaggaagaggaggaggaggatacagacgaagacgatcatctgatttatctcgaagaaattcttgtcagagtgcataccgactactatgcaaagtatgaccggtaccttaacaaagagatcgaggaagcacccgatatccgaaagattgtacctgaactgaaaagtaaggttctggctgatgtcgctataatctttagtggactgcacccgacaaacttccctattgaaaagacaagagagcactatcatgcaaccgccctgggagcaaaaatccttacacgcctagtgctgtcaccagatgcccctgatagagctacacatctgatcgcggctcgggcaggaacagagaaggtactgcaggcacaggagtgtggacaccttcatgtggtgaatcctgattggctgtggagctgtcttgagcggtgggataaggtagaggaacagttgttcccactcagagatgatcatacaaaggctcagagggagaacagtcctgccgcatttccagaccgcgagggggtgcctcctacagcattgtttcatccaatgccggtactacccaaagcgcaaccaggaccggaggtccggatctatgattcaaatacaggcaagctcattaggaccggcgctagaggcccaccagcaccatctagctcactgccaattagacaggagccaagcagcttccgggcagttccacccccacagccacagatgttcggagaggaactgcctgatgctcaggacggcgagcaaccaggccctagtcggaggaagagacaaccctccatgagcgagactatgcctctttataccctctgcaaggaggatctggaatcaatggataaggaggtggatgatatcctgggtgaaggcagcgatgactctgatagcgaaaaaaggcgccctgaagaacaagaggaagagccccagccacgtaaacctgggactaggagagagcgcaccctgggcgctcccgcttctagtgaacgctctgctgccggtggccgaggccctcgaggccataaacgaaaactgaacgaggaggatgctgcttccgaaagttcaagagagagctcaaatgaggacgaaggaagcagcagtgaggccgatgagatggctaaggccttggaggccgagttgaatgacctgatgtag

SEQ ID NO: 219430 - DNA, 786 bp, synthetic construct
  misc_feature 1..786: note = Description of Artificial Sequence: Synthetic coding sequence
  source 1..786: mol_type = other DNA
atggacagtagtgccgtaattacccaaatctccaaagaggaagcgaggggacctttgaggggaaaaggagatcagaagagtgcagcctctcagaaaccaagatcccgcggtattttacacagtcttttttgctgtgtgtgtagggatgacggggaagccctccctgcccacagcggagccccactgctagtcgaagagaatggggctatccccaagcagacccctgttcaatatctcctgcctgaagcgaaagcacaggatagtgacaagatctgtgtggtaatcgatttagacgagactctggtgcactcgtcgtttaagccagtcaacaatgccgattttataatcccagttgagatcgatggcgtggtccatcaggtgtatgtgctcaagcgcccacacgtggacgaattccttcagagaatgggcgaactcttcgagtgtgtcctttttactgccagtttagcaaagtacgccgaccccgtggccgatcttcttgacaagtggggagcctttcgcgctcggctatttagagagtcttgtgtttttcatagaggcaactacgtaaaagatctgagccgattgggccgtgacctcaggagggtgctcattctggacaactctccagcctcctacgtgttccatccggataatgcagtgcccgtggcttcttggttcgacaatatgtctgatacagagctgcacgatttattgcctttcttcgagcagctaagcagggtcgacgatgtttacagcgtgctacgacagccaagacctggaagctag

SEQ ID NO: 219431 - DNA, 2928 bp, synthetic construct
  misc_feature 1..2928: note = Description of Artificial Sequence: Synthetic coding sequence
  source 1..2928: mol_type = other DNA
atggaggattacgagcaagagttgtgtggcgttgaggatgatttccataaccaatttgcagccgagctggaagtactggctgagctcgagggcgctagtacacccagtccatccggggtaccattgttcacagcgggtagacctcccaggaccttcgaggaggcactcgcaagaggagacgctgcgtcctcacccgcacctgcggcatcagtaggttcctcccaggggggagcacggaagcgccaagtggatgcagatctccagcccgctgggtccttgcctcacgcgcctcgcattaagcgccctagactgcaggtggtgaagcggctgaatttcaggtctgaggaaatggaagagccccctcccccagattcttctcctaccgatatcacacctcctccctcccctgaagatcttgctgagctgtgggggcatggggtcagcgaggccgctgctgatgtggggctcacacgggcttctcccgctgccaggaatccggtactgcgacgaccaccaattcttgaagattacgtgcatgttactagcacagagggagtgcgagcatatctcgttctccgcgcagatcccatggcccctggagtgcagggttccctgcttcatgtgccctggagaggtggtgggcaattggatctgctgggcgtcagcttggcctccttgaagaaacaggtagacggggagcggcgagagaggctgttacaggaggctcagaaactgagcgacaccctacacagcctgcgctccggggaggaggaagccgcacagccactgggcgctcctgaggaagagcctaccgacggacaagacgcatcatcacactgtttatgggtcgatgagtttgcacccagacactatacggagcttctttctgacgattttaccaacaggtgtctgctgaagtggctgaagttgtgggatctagttgtctttggacacgaaaggccttccagaaaacctcgcccatcagtcgaaccagccagggtctccaaggaagcgaccgctcctggcaagtggaaatctcacgaacaggtgctggaagagatgctagaggcaggcctggaccccagccaacggccaaagcagaaagtagcactgctatgcggcccacctggactcgggaagaccacattggcccacgtgattgcaaggcacgctgggtacagcgtggtcgaaatgaacgcctcagacgatcgcagccccgaagtgttccgcacccggattgaggccgcaacacagatggaaagcgtactgggcgcaggtggcaaaccaaactgcctggtgattgatgaaattgacggcgcaccggtcgcagcaatcaacgtcctgctgagcatactgaatcggaaagggcctcaggaggtcggacctcagggtccagccgtgccatccgggggaggacgtaggcgccgagccgaaggcggtctcttaatgagacccataatctgcatctgtaacgaccagtttgccccttctctgcgacagctgaagcagcaggcctttttgttacactttccaccaaccctgccttcgagattggtgcaaaggctgcaagaagtgtccctgaggcaaggtatgcgcgcagacccaggcgtcctggccgctctctgtgaaaaaacggataatgacatccgagcgtgtattaataccctgcagttcttatattcacggggtcagagagagctgtcagtccgtgacgttcaggccactagggtcggcctgaaagatcagaggcgaggcttgtttagtgtttggcaggaggtgtttcagctgccgagagcacagcgccgacgggtaggccaggaccctgcactccccgctgataccttgctgttgggagatggagacgccggatctctaacttccgcctctcaacgcttctatagagtgctgcacgcggcagcttctgccggagagcatgaaaaggtcgttcaggggttgtttgataactttcttcgattgcggctgcgtgacagcagtctcggagccgtgtgcgttgctctggattggttggcctttgacgatctgttggcaggcgcagctcaccattctcagtccttccagctactgcgctaccctcctttcctgcccgtggcttttcacgttctgtttgcatcatcgcacactcccagaatcacctttccatctagtcagcaggaggcgcagaacaggatgtcacagatgcgtaacctgatccagacactggttagtggcatcgctcctgctactcgcagtcgcgctactccgcaagccctcctcctcgatgccctctgtctgctgctggatattcttgcgcctaagctgaggccggtgagcacccagctgtatagcacacgagagaaacagcaattagcgagcctcgttgggaccatgctggcatactcactgacctataggcaagagcggactcctgacggacagtacatctatagactggagcccaacgttgaggagctgtgccgattcccagagcttccagcacgtaaacctctgacatatcagactaagcaactcattgcccgagaaatcgaggtggaaaagatgcggagagccgaagccagtgcaagggtggaaaactctccgcaggtcgatggatccccaccaggccttgagggcttgctaggcggaatcggagaaaagggagtccaccgtccggctccacgcaaccacgagcaacgtctcgagcacatcatgcgtagggccgctcgagaagaacagccagagaaagatttctttgggagggtggtcgttagaagcacagcagtgcctagcgcgggtgatacagcacctgaacaggattcagtggaaagacggatggggaccgccgtgggcaggtctgaagtgtggtttcggtttaacgagggtgtgtcgaacgcagttcggaggtctttatacattcgcgacctgctctag

SEQ ID NO: 219432 - DNA, 3555 bp, synthetic construct
  misc_feature 1..3555: note = Description of Artificial Sequence: Synthetic coding sequence
  source 1..3555: mol_type = other DNA
atgcacgtgaatgcaagtgccagacgctgggggagggggggtgctgcagcattgcctggtcctgctgcttcaccccgaagaccagctccccgtacaggcccagtgggtaggcctacgctggctccatcaccttcgcgcgctcacgcacacgccaaaaccaacctgctgcctggccgtgctgtacaggctcccgatgctgtgccgggagccggatcatcaagggccccagccagatggaggccgagagacccagggtcctctgcacctgacgcctggcagaggttcagaccggcacccctgcgcgcacagccgaggccaccacccaggcctgcaccaggtccaccgccaccgagaaagggcggatgcgggggtcagtggcgggctccccaggatcggaccagggggcttagatcccggaacagccctaggccacctctggcccaacccagactgagacacgctaaccagtggcgcgctcccccaggcacaccggctgctgactggagacgccctgcacgcagcggacgtgcagtgagagatgggggaggcggagctggaggctctgagagagagctggggctagcggacgggatggaggattacgaacaagagctgtgtggcgtggaagacgatttccataatcaattcgccgcagaacttgaggtgcttgccgagttggaaggagcgagcactccctccccaagtggcgtgcctcttttcacagcaggcagacccccacgtaccttcgaggaagctctcgctaggggagatgctgcaagttcccccgctcccgcagctagcgttggctccagtcaggggggtgcaaggaagcgacaggtagatgcagaccttcaacctgccggatcgctgccacatgccccaaggatcaagaggcctcgtctgcaagtggtgaagcggctaaactttcgaagcgaagagatggaggagccacccccacctgattcaagcccaactgatatcacccccccaccatctcccgaagacctggcagagctgtgggggcacggcttcagcgaagctgccgctgacgtgggcctcactcgggcttctcctgccgcaaggaatcctgtcctccgccgtccacctattctggaggattatgttcatgtgacatccaccgagggggtgagagcctatctcgtccttcgagctgatcctatggctccaggagttcagggatccttacttcacgtaccgtggcgagggggtggacaactagatctgctgggcgtgtcactggcatctcttaagaaacaggtggacggcgagaggcgagagaggctgcttcaggaggctcagaaattatctgacactctgcatagatccggcgaggaggaggcagctcaacctctgggggctccagaggaggagcctacggatggccaggatgcctcttcacactgtctgtgggtggacgaattcgcacccagacattatactgagctgctgtctgatgatttcactaaccgatgcctgcttaaatggctgaaactgtgggacctggtagtgtttgggcacgagaggccttcccgcaaaccaaggccgagcgtcgagccggcacgcgtgagtaaagaggcaaccgctcctgggaagtggaaaagccatgaacaggtgttagaggagatgctcgaagccggacttgacccaagccagcgtcccaagcagaaagtggctcttctctgtggtcctcctggcctcgggaagactaccctcgcccacgttatagcaaggcacgctggatacagcgttgtggaaatgaacgcttctgacgacagaagtcctgaggtgttcaggacccggattgaggcagccactcagatggagtctgtgctgggcgcaggaggaaagcccaactgcctcgtgatcgacgaaattgatggagcccctgtggcagctataaacgttcttctgtctatactaaacagaaagggacctcaagaggtcggaccgcaagggcctgcggtgccgagcggcggagggcgtagacggagagctgaggggggtctgctcatgcgccctatcatctgcatttgcaacgaccaattcgctccctctctgaggcagctaaagcagcaggcctttctgctgcatttcccaccaacgcttccaagcaggctggtccaacgcctgcaagagggaatgagggcagacccaggagttctcgctgcattgtgcgaaaagactgacaacgatattagggcttgtatcaacaccttgcaatttctgtactccaggggacaacgcgaactgtcagtgcgagatgtccaggcgacacgtgtcgggctgaaggatcaacgaagagggttgttctctgtgtggcaggaggtgtttcagctgcccagagcacagcgctcctcacagcatgtatccgtgctcacatgccacggaaccccgggagatgcaggacttgtggtgctacaggacatgggcgacgccggtctggggctctgggatgttctgctcttggcgtggacccgcagaggcaccttcccaggcagattctaccgggtgctgcacgctgccgcttcagctggggaacacgagaaagtggtgcagggcctgtttgacaattttctgcgacttagactacgggattcttcgctgggcgcagtgtgcgttgccctagactggctcgctttcgatgacctgctagctggagccgcacaccacagtcagagcttccagctgctcagatacccacctttcttgccggtggcattccacgttttattcgcaagctcacacacaccccgaatcacgtttccaagctcacaacaggaagcccagaatcgcatgagccagatgcgcaatcttatccaaaccctcgtgtctggaattgctccagccacgcgttccagggcgaccccacaggcactcctgctggatgcgctatgcctcctgctggatattctggccccaaagctgcgtcctgtgagcacgcaactgtactccacccgggaaaaacagcagcttgcctctttagtgggcacgatgctggcatatagtctgacgtatcgccaagagcgtacgcccgatggtcaatatatctatagattggaaccaaatgtcgaggagttatgccgctttcccgagctgccagcacggaaacccctgacttatcagaccaaacaactcatcgcgagggagatagaggtggagaagatgagacgggcagaagcctccgcccgtgtcgagaattcaccccaggtcgacggctcccctcctggattagaggggttgctgggaggtatcggagaaaaaggcgtgcatagaccagctccccgaaatcacgagcagagactggagcatattatgcgaagagcagcccgagaggaacagcccgagaaggattttttcggcagagtggttgtacgatcaactgctgtcccttccgccggagatactgcgcctgagcaagacagcgtggagcgccgtatgggcaccgcagtgggcaggtcagaggtttggtttagatttaatgagggagtgagtaatgccgtccgcagatccctctacatacgggacctgctgtag

SEQ ID NO: 219433 - DNA, 3012 bp, synthetic construct
  misc_feature 1..3012: note = Description of Artificial Sequence: Synthetic coding sequence
  source 1..3012: mol_type = other DNA
atggaggattatgagcaggagctgtgtggggttgaagatgacttccataaccaattcgcagcagagctcgaggtgctcgcagaactggaaggggcttctactccatccccaagtggtgtaccactcttcaccgctgggcgtccacctcgaacgtttgaggaagcgctggcgaggggtgacgcagccagttctcctgcccctgctgccagcgtcggaagctcccagggaggcgcacgaaagagacaggtcgacgccgacctgcagccagcgggtagtcttcctcatgggagactggctgcccttccacaggggctgagatctggacgggaagctgaggaagcatctgggtcgcttcacgtgtcccctcctgcacccagaataaagcgcccaagactccaagtagtgaagaggttgaatttccgctccgaagagatggaagagccaccccctcccgacagctctcctacggatattacacctcctccttcacccgaggacctggcagaactgtggggccacggcgttagcgaggcagcagccgatgtgggcctaacccgagcgagtcctgcagccagaaaccccgtgttgcgcagacccccaattctcgaggattacgtacatgtaaccagcactgagggtgtccgagcttaccttgttctgagagctgaccctatggcccctggggtgcagggatctctcctccatgttccttggaggggcggaggtcagctagaccttttgggagtctcccttgcttcccttaagaaacaagttgacggcgagaggcgtgagagactacttcaggaagcacagaagctctccgatactctccatagcctaaggtcaggcgaagaagaagctgcgcagcctctcggtgcccctgaggaggaaccaactgacgggcaggacgcctccagtcactgtctgtgggtggatgaattcgccccaagacactatactgaattgctttctgatgactttactaataggtgcctgctcaagtggcttaaactgtgggaccttgtagtgtttgggcacgaacgtccgtctcggaaaccgaggccttccgtggagccagcacgggtatccaaagaagctactgccccaggcaagtggaaatcccacgaacaagtgctcgaagaaatgctcgaggcgggtctggatcctagccagagacccaagcagaaggttgccttgctctgcggccctccgggtctcggcaagacaaccctcgcacatgtcattgctcgccacgccggatactccgtggtcgaaatgaacgcctcggacgacaggtctcccgaggtgtttcgaactagaattgaggccgctacccagatggaatcagtcctgggcgcaggaggcaaacctaactgtctggtgattgatgagatcgacggtgcccctgtagccgctatcaatgtcctgttaagtattctcaatcgcaaaggtcctcaggaggtgggccctcagggccctgccgtgccatctggaggtgggagaagacgcagggccgaaggaggattgttgatgagacccatcatttgtatttgcaatgatcaattcgccccatcactgcggcaattgaaacagcaggcattccttttacactttccaccgacgttaccaagcagactggtccaacgcttacaggaggttagtctgcgccaggggatgagggccgatcccggagttcttgcagcactctgtgaaaagacagataacgatattagagcttgtataaacaccctccagtttctatattcgagggggcaacgagagctttcagttcgagacgtccaagccacacgcgtgggccttaaggaccagaggagaggactgttctcagtgtggcaggaggtgttccagctgccacgggcacagagaaggagggtgggccaggaccctgccctgcccgcagacactctgttactgggggatggcgacgccggaagcttgaccagcgcttcccagcgtttttatcgagtactccacgctgctgccagcgccggagagcatgagaaagtagtgcagggcctgtttgataattttctccgcttaaggcttagagattcgtccttgggcgcagtatgcgttgccctggactggctggccttcgatgatctgttggccggagctgctcaccacagccagagttttcagttactgcgctacccgccatttcttcccgtcgcctttcacgttctattcgcttctagccacacccctcggattacttttccgagctctcagcaggaggctcagaacagaatgtctcagatgagaaatctcatacagacattggtctcaggaatcgctccagctaccagatcgagagcaaccccccaggccctcctactcgatgcactctgcctgctcctagatatactggcacccaaattgcgacctgtgtcaacacagctgtactcaactcgtgaaaagcagcagctggcatccctggtgggcaccatgctagcatacagtcttacatatcgacaagaacggactccagatggccagtatatctaccgactcgagccgaacgtggaagagctttgccggttccccgaactccccgctcgaaagcctcttacataccagactaaacagctgatagctcgagagatagaagtagagaagatgagaagagcggaggccagcgcacgggtggagaattccccccaggtcgatggtagcccccctgggttggaaggtcttctgggaggaattggtgagaagggagtacaccgcccagcacctcgaaaccacgagcagaggctggagcacattatgaggcgtgctgcgcgtgaagagcagcccgaaaaggacttctttggacgggtggttgtcagatcgactgctgtgccaagtgcgggagataccgccccagagcaagactccgtggagcggaggatgggcacggcagtcgggagaagcgaagtgtggtttcgtttcaatgaaggagtatctaacgccgtccggagatcgctgtatattagggatctcctgtag

SEQ ID NO: 219434 - DNA, 1575 bp, synthetic construct
  misc_feature 1..1575: note = Description of Artificial Sequence: Synthetic coding sequence
  source 1..1575: mol_type = other DNA
atgaaagagcctcggatttttcctcgggagaggcccactccttggactagagctccactgccccctcgcggtagattagacgggagtctgggccctcaaggtggtcccgtcctgaatacggggcatccgctaggcgtcaatagcgatccttttctgatggcagccggatccctcgggggtaacttgaccccgttccctcgtaacccgagccccttccccgcaagtagcggatccttggcctccaaccccgctcccttcccagccggagcacgggatccctcaatggcatctttcccgaggggcatgaaccctactggtaccggggcagtctccttcccgagacccggagggcttcttggacctggccctggacccggacccactctaaatcccaggaccggagccttaccaggccctggacccctatccaaccccagactgggagggctgccgggtcccggaccaatgagcaaccctagggcaggagggctgctgggagcaggccctgaccccagagggggaggcccaatgggccctggaagtgggcctaaccttagagccggagttctgctgaccagcggcaacgggccacccaatccacgtccagtgggattaggcccaggcccaaatcccaacctgaggtccgggtttctcggcactaaccccgctcctcggtccggtgtattccctggtccaggtctggggccaaatcccaggccctcgggcctggggcctgggccaaatctggatgcgagagctgggggactcttagggactgggtccggcctcaatctgcgcatggctggaccacaagggctcgacctggccccaattttgagggccgcagggctgctgggcgctaacagtgcctcctttagccaagcatccggtaatatgggcacgtcccctagctcgatggcccgtgtccctgggccaatgggcccaaacagcggtccaagctcccggggaattggcttgccagggccaaacccgtcccccatgagtcgcgctccagggccaattggtcccaattcggcccacttttctcgtcctgtggggcctatgggtgtgaatgcaaaccctttcccacgcggagcgggatcaagcgcctttagccaatcttccggcactctggcatccaatcctgccacatttcaacggtctgctggacttcagggatccaaccctacaatcttccccagggctagtgggcctctgggcccaaacccagccaatttccccagggcgacaggactccaaggacccagccccaccacttttcccaggagcacaggccctctcgggcctgggcaggtgacttttccccgacccgctgccggtcacctgggtccatccccggcaggcccagtcggcatcaacccggctcccttcacacgaccaactgggactctcggcctgaaccctgcaagcttcccaaggatgaatggtccagctggaaaatcgtttgttcccttccctcgagtcggatcgctcccaggcaccaatcccgctgccttccccagacctggcggtcccatggccgctatgtatccaaatggaatgctgccaccctag

SEQ ID NO: 219435 - DNA, 366 bp, synthetic construct
  misc_feature 1..366: note = Description of Artificial Sequence: Synthetic coding sequence
  source 1..366: mol_type = other DNA
atggtgcagatcgtgatttcttcagctcgggcagggggactagcagagtgggttctcatggaattacagggagaaatcgaggcgcgttactcaactggcctggccggtaatttattgggcgatttgcactatacaaccgagggtattcctgtgctgattgttggccaccacatcctttacggtaaaattatccacctcgagaagccattcgctgtactggttaaacacacacccggtgatcaagattgtgatgaattgggcagagaaacgggcacaagatacctggtgacagccctcatcaaggataagattctgtttaaaactaggccaaagcccattatcacgtcagtgccgaagaaggtctag

SEQ ID NO: 219436 - DNA, 366 bp, synthetic construct
  misc_feature 1..366: note = Description of Artificial Sequence: Synthetic coding sequence
  source 1..366: mol_type = other DNA
atggtccagatagttatctcatctgcacgggctggcggacttgccgaatgggttctcatggaactccagggcgagatcgaagcacggtactctacaggcctggcaggaaacctcctgggcgatctccactacaccactgaaggtattccggtcctcatcgtgggacaccacatcctgtatgggaaaattattcacctggagaaaccctttgctgttttagtcaagcatacgcctggcgaccaagactgcgacgagctaggaagagagaccggtacccgctacctggttaccgcccttatcaaggacaaaatcctgtttaagacccgccctaagccaataatcaccagcgtgcccaagaaggtctag

SEQ ID NO: 219437 - DNA, 1776 bp, synthetic construct
  misc_feature 1..1776: note = Description of Artificial Sequence: Synthetic coding sequence
  source 1..1776: mol_type = other DNA
atgaagtatatactagttactggaggcgtgatctcaggcatcgggaaggggattatcgccagtagcgtgggaactatactgaaaagttgtggattacatgtcacaagcattaagatcgacccttacatcaatattgatgcaggcacattttccccatacgagcatggcgaagtatttgtgctcgatgacggcggagaagtggatctggacctggggaattatgaaagatttcttgatataaggctcaccaaggacaacaatctgaccaccgggaagatctaccagtacgtcataaataaggaaaggaaaggggactacctcggcaaaacagtccaagtggtcccccacattactgacgctattcaggagtgggttatgagacaagcccttattcccgtcgacgaagatggcctggaaccccaagtttgcgtaatcgagctgggaggcactgtgggcgacatagagagcatgcccttcattgaggcattcagacagtttcagttcaaagttaagcgcgagaatttttgtaatatccatgtgtcactggtgccacagccctcatccaccggtgaacagaaaactaagcccacgcagaactccgtgcgagagcttcggggtctgggtctgtcccctgacctcgtggtgtgccggtgttccaatcccttggatacctcagttaaggagaagatctccatgttttgccatgtggagcctgaacaggtgatctgcgtccatgatgtaagttcgatctacagagtcccgctgttgcttgaggaacagggggtggtagactactttctcagaaggctggacctcccgatcgagaggcagccgagaaagatgctgatgaaatggaaagagatggcagacaggtacgaccgcttgctggaaacctgcagtatagcgctggtaggaaagtacactaagtttagcgacagctacgcctccgtcatcaaggccctggaacactcagctctggccataaatcataagctggagataaagtacattgactccgctgatttggaaccgatcaccagccaagaagaacctgtgcgttaccacgaagcctggcaaaaattgtgttcagcccatggagtgctcgtgcctgggggattcggcgttcggggaacagagggcaagattcaggctatagcctgggccagaaaccagaaaaagccattcttgggcgtgtgccttgggatgcagttggccgtagtcgagttctcacgcaacgtcctgggctggcaggatgctaactccaccgaattcgatccgacgacctcccaccccgtggttgtggatatgcctgaacacaacccgggacaaatgggagggacaatgcgactagggaagaggagaaccctgttccagacgaaaaatagcgttatgcgaaaattgtatggcgacgccgattatctcgaggagcggcaccgacatagattcgaggtgaatccggtgtggaagaagtgcctggaagaacaaggcctcaagttcgttggccaagacgtcgaaggcgagcgaatggagattgtggagttggaagaccaccccttcttcgtgggtgtccagtaccatccggaattccttagtcgaccaatcaagccgtctcctccttactttggcctgttgcttgccagcgtgggtagactaagccattatctgcaaaaaggatgccgactgagcccacgcgatacctactcggaccgtagcggttctagtagccccgactccgagattacagaactgaagtttccctcgattaatcatgactag

SEQ ID NO: 219438 - DNA, 1776 bp, synthetic construct
  misc_feature 1..1776: note = Description of Artificial Sequence: Synthetic coding sequence
  source 1..1776: mol_type = other DNA
atgaaatacattctcgtgacaggcggtgtgatttcgggcatcggcaaagggatcattgcctctagcgttggcactattttgaagtcctgtggactgcacgtgacatctatcaagattgatccatatataaatatcgatgccggtaccttcagcccttacgagcacggcgaggtcttcgtgctggacgacggtggcgaagtggatctcgacctcggcaattacgaacgtttcttagacatacggcttacgaaagataacaatctgacaactggcaaaatctatcaatacgttataaacaaggaacgtaagggagattatttggggaaaactgtacaggtcgttcctcacatcaccgatgccatccaggagtgggtcatgaggcaggcattaatccccgtggacgaagacggactggagccacaggtgtgcgttattgaacttggcggaacagttggggatatagaatctatgccattcatagaagcctttaggcaattccaatttaaggtgaagcgagaaaacttttgcaatatacacgtctccctggtaccgcagccctcgtctaccggtgagcagaagactaaaccaactcaaaattctgtacgtgaattgcggggactcgggctctcacccgacctcgtagtgtgtcgatgcagcaaccccctggatacttccgtcaaagagaaaatctccatgttctgtcacgtggagcctgagcaggtaatatgtgttcatgatgtatcctctatctaccgcgtaccccttctactcgaggaacaaggcgttgtcgactacttccttaggaggttggacctgcctattgagcgccagcctcgcaagatgctgatgaagtggaaggagatggccgatcggtatgaccgactgctggagacgtgttctattgcactcgtaggcaagtacacgaaattcagcgactcgtacgcaagcgtgattaaagcgcttgaacactctgcgttagcgattaatcataaacttgaaataaagtacatagactccgccgacctggaaccaattacttctcaagaagagcctgtgcgctatcacgaggcttggcaaaagttgtgttccgcacatggagtgttggttcctggtggcttcggcgtgcgcggtacggaggggaagatacaagctatcgcctgggccagaaaccagaagaaaccctttctgggtgtttgtcttggcatgcagctggccgtggtagaattttctagaaatgtgcttggatggcaagacgctaactctactgagtttgaccccactacatcccatcccgtggtagtagacatgcccgaacacaacccaggacagatgggcggaacaatgcggctgggcaaacggaggaccctgttccagacaaaaaacagtgtaatgaggaagttgtacggggatgctgactatctggaagaacgccaccgtcataggtttgaggtcaacccggtttggaagaagtgtcttgaggagcagggcctcaagtttgttgggcaggatgtggagggagagcgtatggagatcgtagagctcgaggaccacccgtttttcgtgggggtgcagtatcaccctgaattcctctcaagaccgattaagccttcccccccttatttcggcctcctgctggcaagcgttggacgcttatctcactatcttcaaaagggctgccggctgtcccctagggacacttactccgaccggtctgggtccagctcccccgactccgaaatcacagagcttaaatttccatcaatcaatcacgattag

SEQ ID NO: 219439 - DNA, 1083 bp, synthetic construct
  misc_feature 1..1083: note = Description of Artificial Sequence: Synthetic coding sequence
  source 1..1083: mol_type = other DNA
atgttttgtcatgtggaacccgaacaggtgatctgcgttcatgacgtctcttctatatatcgggtcccattactcctggaggagcagggtgtggtagactacttcctacggcgactggacctgcccatcgagcggcagccacgcaagatgttgatgaagtggaaagagatggcagatcggtacgatagactgctagagacatgtagcattgcccttgtcggcaaatataccaagttcagcgatagttatgccagcgttatcaaggcacttgaacactccgctttggcaattaatcacaaactggagattaagtacattgactcagccgatctcgaacctattacttcgcaagaggagcctgtgcgctaccatgaggcgtggcagaagctctgcagcgctcacggggttctcgtccctgggggtttcggtgtacgaggcactgagggcaagattcaggcgattgcttgggcccgaaatcagaagaaacctttcctgggggtgtgcctggggatgcagcttgcagtagtggaatttagtagaaacgtgctgggctggcaagacgcaaacagcaccgagttcgaccctactacttcccacccggtcgttgtagacatgcccgagcacaatccgggacagatgggaggaacgatgcgcctaggcaagagaagaactctttttcagacaaaaaactccgtaatgcgcaagctgtatggcgacgccgattaccttgaagagcgccacagacatagattcgaagttaaccccgtctggaagaagtgcctggaggagcaaggcttaaagttcgtgggtcaggacgtggagggcgagcgcatggaaatcgtggaattggaggaccaccccttcttcgtgggcgtacaataccaccctgagttcctttcgcggccaattaagccatctcctccctacttcggccttttactcgccagcgtggggcgtctgtcgcattatctccagaagggatgtagactttctccacgggatacttatagtgatcgaagtggctcttcctcccctgacagcgaaatcaccgagctcaagtttccttctatcaatcatgactag

SEQ ID NO: 219440 - DNA, 945 bp, synthetic construct
  misc_feature 1..945: note = Description of Artificial Sequence: Synthetic coding sequence
  source 1..945: mol_type = other DNA
atgccaaaatcgaagagcaagatgaagtacattctcgtcacagggggagtaatcagcgggattggaaagggtattatcgcttcttccgtcggtaccatactgaaatcttgtggcctccatgtaacctctattaaaatcgatccatacatcaacatcgatgccggaacgttttcaccctacgaacacggcgaggtatttgttctggacgatgggggagaggtcgacttggaccttgggaattatgagcgttttttagacataaggcttactaaagataacaacctcaccacgggtaagatttaccagtatgtcatcaacaaagagaggaaaggggactatcttggaaagaccgtgcaggttgtcccacacattacagacgctattcaggaatgggtcatgcggcaggcattgatcccagtcgatgaggatggcctcgaaccccaggtctgcgtgattgagctcggcggtactgtcggtgacatcgagtccatgccatttatcgaggcgttccgacaatttcagttcaaagtaaaacgggaaaatttctgtaacatacacgtatccctggtcccgcagcccagcagtaccggggaacagaagacaaaacctacccagaatagtgtgagagagctgaggggcctgggcttgtcccctgatcttgtggtgtgtagatgcagtaaccctctggatacaagcgtgaaggagaagatctctatgttttgtcatgttgaaccggagcaggtaatttgcgtccacgacgtctctagtatctacagagtcccccttctcctcgaagagcagggggtagtggactactttcttaggagactcgaccttccaattgaaaggcagccaagaaaaatgttaatgaagtggaaagagatggccgataggtttgcgtgtaacgaagagcttggagttctggccagtttcacattgctgtag

SEQ ID NO: 219441 - DNA, 1761 bp, synthetic construct
  misc_feature 1..1761: note = Description of Artificial Sequence: Synthetic coding sequence
  source 1..1761: mol_type = other DNA
atgaaatatatcttggtgacaggcggtgttattagcggcataggaaagggcataattgccagctcaatcggaacaatcttaaaatcctgtggcctgagggttacagccatcaagattgacccctacatcaacattgatgctgggactttttcaccctatgaacacggggaagtatttgtactgaatgacggcggagaggtcgatctggacctcgggaattacgagcggtttctcgacatcaacttatacaaggataacaatatcactaccgggaaaatctatcagcatgttattaataaggagaggcgaggcgattacctcgggaagactgtccaagtcgtgcctcatattaccgatgccgtgcaggaatgggtgatgaatcaggctaaggtgccagtggatggcaacaaggaagaaccacagatttgtgttatagaactgggtggaactatcggtgacatcgaggggatgccttttgtggaagcgttccggcagtttcagtttaaggctaaaagagaaaatttttgcaatatacacgtcagccttgtgcctcagctgtcagctaccggggaacagaaaaccaagcccacacagaacagcgtgagagcattacgagggctcggcctgtccccagatctgattgtgtgcagatcatctaccccgatcgaaatggccgtgaaggagaagattagcatgttctgtcatgtgaatcctgaacaggtgatctgcattcacgatgttagtagcacatatagagttcctgtattactcgaggagcagagcatcgtgaagtattttaaggagcgtttacatctacccatcggagactccgcaagcaatctgttattcaagtggaggaatatggccgacagatatgaaagattgcagaaaatttgctccattgcgctcgtaggcaagtataccaagttaagggactgctacgcatccgtgttcaaagcattagaacacagtgcccttgcaattaatcacaagttaaacctcatgtacatcgacagcattgatcttgagaagattactgaaacagaggacccagtcaagtttcacgaggcctggcagaaactatgtaaggccgacggcattctggtgccagggggatttggcatcagaggcaccttgggcaaactgcaggcgatctcctgggcacgcacaaagaaaattccatttctcggagtgtgcctgggcatgcagctcgccgtgattgagttcgctcgtaattgcctgaatctgaaggacgcagactcaacagaatttagacccaatgcccctgtgccgctggtcattgatatgccagagcacaaccctggcaacctcggaggaactatgcggctgggcatccgacgcaccgtgttcaagacagagaatagcatcctaaggaaactgtacggggacgtcccatttatcgaagagcggcaccgacacaggtttgaggttaaccccaatcttatcaaacagtttgaacagaatgacctgagttttgtgggacaagacgtggatggggacaggatggagatcatcgagctcgctaaccacccctacttcgtgggggtgcagttccacccagaattctcctctcgacctatgaagccatctccgccttacttgggtctactgctcgctgcaaccggtaatctcaacgcatacttacaacaaggttgcaagctatcctccagcgataggtattccgatgcgagtgatgactcattcagcgaaccgagaattgccgaactcgagatctcttag

SEQ ID NO: 219442 - DNA, 531 bp, synthetic construct
  misc_feature 1..531: note = Description of Artificial Sequence: Synthetic coding sequence
  source 1..531: mol_type = other DNA
atgtacattgattccattgatttagagaaaattaccgagacagaggaccctgtgaagttccatgaagcttggcagaagctctgcaaagctgacggaatcctggtacctggaggcttcggaattaggggtacgctgggcaagctgcaggcgatctcatgggcaagaaccaagaagattccctttctgggagtctgtctgggtatgcaactggccgttatcgagtttgcccgtaactgcctgaatctaaaggatgccgattccacagagtttagaccgaatgccccagtgccccttgtgatcgacatgccagaacacaacccgggtaatttaggcggtacgatgagactcggcataaggcggaccgtttttaagaccgaaaatagcattctgatttccctgtcactggggctggcgagtgtggagcacacagagtgtcctagcgccttcgacctgagagacagtctgtttattggacttttttgcgagctgccaatgttgctggagatgaatctagactgggatttagactag

SEQ ID NO: 219443 - DNA, 1761 bp, synthetic construct
  misc_feature 1..1761: note = Description of Artificial Sequence: Synthetic coding sequence
  source 1..1761: mol_type = other DNA
atgaaatatatactggttaccgggggagttatttctggtatcgggaaagggataattgcaagtagtattggcacgatcctcaaatcttgcggactgcgggtcactgccataaagatagacccgtacattaatattgatgctggcacattctcaccatatgagcatggtgaagtgtttgtcttgaatgacggtggggaggtagacctggatctgggtaattacgagcgcttcctggacataaatctatacaaggacaataacatcacaaccggaaaaatttaccagcatgtcatcaacaaggagcgccgaggggactacctgggtaagacagtgcaagtggttcctcacatcactgatgccgtgcaggagtgggtgatgaatcaggccaaagtgccggtcgacggaaacaaagaggagccgcagatttgcgtcatcgagctgggaggaaccataggcgatatcgaggggatgccgttcgtggaagcttttcggcagtttcagttcaaggccaaacgcgagaatttctgtaacattcatgtgtccctagtcccccagctgtctgcaacaggtgaacaaaagaccaagcctacacagaatagcgtgcgcgcattgaggggactggggcttagtcctgatcttatagtttgtaggtccagcaccccaatcgaaatggccgtcaaggaaaaaatctccatgttttgccacgttaacccggaacaagttatctgtatccacgacgtctcgtcaacgtaccgggtgcctgtgctcctagaggagcagagcattgttaaatatttcaaggaacgactgcaccttcccattggggactccgcctctaacctgctcttcaaatggcggaatatggcagatcggtacgagcgacttcagaaaatttgttctatcgcgctggtgggcaagtacacaaagttgagagactgttacgcaagcgtgtttaaagccctggaacactcagcgttggctatcaaccacaaattaaatctgatgtacatcgacagtatcgatttagagaaaatcactgaaacagaagaccctgtgaaatttcacgaggcttggcagaaactgtgtaaagccgatggaatactggttcccggtgggtttggcatcagagggactctcggcaagctccaggcaatctcatgggctcgcaccaaaaaaataccctttctcggggtgtgcctgggaatgcaattggctgttattgagtttgccagaaactgcctaaaccttaaagacgcggactcgacagagtttaggccaaacgctccagtgccattggtcatagacatgccagaacataacccaggcaaccttggcggaacaatgcgcctggggataaggcgaacggtgttcaaaaccgagaactccatactccgaaagttgtacggtgacgtgccatttattgaggaacggcaccgacacaggtttgaggtgaaccctaatctgatcaagcagtttgaacagaacgatttatcgttcgtgggccaggatgttgatggagaccgtatggagatcatcgaactggccaatcacccatatttcgttggagtccaatttcaccctgagttttcaagtaggccgatgaagccctctcctccctacctgggactcctgctggctgcgaccggaaatctgaacgcctatctgcagcaagggtgcaaattgtcctccagcgaccggtactccgatgcatccgacgattccttttccgagcctcgaattgccgaattagagatcagctag

SEQ ID NO: 219444 - DNA, 1761 bp, synthetic construct
  misc_feature 1..1761: note = Description of Artificial Sequence: Synthetic coding sequence
  source 1..1761: mol_type = other DNA
atgaagtatatcttggtaactggcggagtgatatctggaattggtaagggcatcatagccagttcgatagggactattctgaaatcatgcggccttcgtgtgactgccattaaaattgatccatacatcaacatcgacgcaggaaccttcagtccctacgaacatggcgaggtgttcgtgctcaacgatggcggagaagtggacctcgacctaggaaattatgagaggtttctggatattaacctgtataaggacaacaacatcacaacagggaagatctaccagcacgtcattaataaggagcgtaggggggactacttgggtaagaccgtccaggtcgttccccatattactgacgcggtgcaggagtgggtgatgaatcaggctaaggttccggtcgatgggaacaaggaagaacctcagatatgcgtaattgagcttggcggaacaatcggtgatattgaaggaatgccttttgtggaagcatttcgacaattccagtttaaggccaagcgtgagaatttttgtaatatccacgtgtccttggttccacaactctctgcgacaggtgagcaaaaaaccaagccaactcagaattctgtacgagcgttgagagggctgggtttaagccccgacctgatcgtgtgtaggtcgtctaccccaatcgaaatggcagtcaaggagaaaatatctatgttttgccatgtcaacccagaacaagtgatctgcattcatgacgtctcgtcaacttatcgcgtgcctgtgttactcgaagaacagtctatcgtgaaatatttcaaagagagactccacctgcccattggggactctgccagcaacctgcttttcaagtggagaaatatggctgacaggtacgagcggctgcagaagatttgctccatcgcactagtagggaagtacaccaaactaagagactgttacgcatcagttttcaaagctctggagcactcagcgctcgcaatcaaccacaaactcaacctgatgtacatagactcgatagatcttgaaaaaattacagagaccgaagatcctgttaagtttcatgaggcctggcagaagctgtgtaaagcagacggcatcttggtgcctggcggattcggcatccgaggaactctgggcaagttgcaggcgatcagctgggcacggaccaagaagatcccttttctgggcgtgtgtctcggtatgcagctggctgtaatcgagtttgccaggaattgcctgaacctgaaagacgccgatagtaccgagttccgacccaacgcccctgttcctttggtaatcgacatgcctgagcataatcccggtaaccttggtgggacgatgcgactggggataagaaggactgtgttcaagactgaaaacagtattctccgcaagttgtacggggatgtgcccttcatcgaggagcgccaccgccatcgttttgaagtgaaccctaacttgataaagcagttcgagcagaacgatttgtcatttgtgggacaagacgtggacggcgaccggatggaaataatcgaacttgcaaatcatccgtatttcgtgggcgtccaattccaccccgagttctcgagcagacctatgaagccgagcccgccataccttggacttttgctcgccgctacaggaaacctgaacgcatatttgcagcagggatgtaagctgtcttcatctgatagatattccgacgcctctgatgactcatttagcgagccaagaatagcagagctggaaatctcctag

SEQ ID NO: 219445 - DNA, 399 bp, synthetic construct
  misc_feature 1..399: note = Description of Artificial Sequence: Synthetic coding sequence
  source 1..399: mol_type = other DNA
tgaggtaaacttcaggcaatttcgtgggccaggactaaaaagattccctttctgggcgtgtgcttggggatgcagctcgctgtgatcgaattcgctaggaattgcctgaatctgaaggacgcagattccaccgaattcaggcccaatgcacctgtccctttggtaattgatatgccagaacataatcccggtaacctgggcggtactatgcgccttgggatccgtaggactgtatttaaaactgaaaattcaatccttatatccttgtcactgggcttagccagtgtggagcacacagaatgtcctagcgcattcgatttgagggattctttatttatcggcctgttttgcgagctgccaatgctgctggagatgaatcttgactgggacttagactag

SEQ ID NO: 219446 - DNA, 3654 bp, synthetic construct
  misc_feature 1..3654: note = Description of Artificial Sequence: Synthetic coding sequence
  source 1..3654: mol_type = other DNA
atggccgcaggcagggctcaggtgccctcaagcgaacaggcttggctggaagacgcccaggtcttcattcaaaagacactgtgtcctgcggtcaaggagcctaatgtgcagttaacacccctagtaattgactgtgtgaagacagtttggctgtcccagggtagaaaccagggaagcacccttccgttgtcctactccttcgtatcagtgcaggatctgaagacgcaccagagattgccttgctgttcccatctgtcttggtcttccagcgcctaccaggcttgggctcaggaggctgggcctaacgggaaccccctacccagggagcagctgcttcttctgggcacactgaccgatcttagtgcagacctcgaacaagagtgtcggaacggatctttatatgtgcgagacaacaccggagtgctaagctgcgaattgatcgacctggatctctcatggctcgggcatctcttcttattcccacgatggtcctacctgcctcctgctagatggaattcatctggagagggccacctcgaactgtgggacgctccagtgcccgttttccctctgactatttcacctggcccagtgacacccattccagttctctacccggagagtgcttcgtgcctgctgcggctgcgaaataagctgaggggtgttcagaggaatctggccggatcgttggttagactgtcagcactcgtaaaaagcaagcagaaagcatacttcattctgagccttgggcgttctcacccagcggtgacacacgtgtccatcatcgtgcaggtccccgcacagctggtgtggcatagggctctgagaccgggaaccgcatatgtgttaactgaattgcgcgtttctaaaataagaggacagcgccagcacgtgtggatgacctctcagagcagtcgtctgctgcttctcaaaccagagtgcgtgcaggaactagaactggagctggagggtcctctgctggaagcagatccgaagccactccccatgccttccaattcagaggacaaaaaagatccggagagcctcgtgcgttattcacgcttactgagctactccggcgctgtgaccggagtgttaaatgagcctgcaggtctgtatgagcttgacggtcaattggggttatgtttggcttaccagcagttccggggactgcgcagggtgatgcgcccaggggtgtgtctgcagctgcaggatgtccatttgcttcaatccgttgggggtggaaccaggaggccagtcttggccccatgtctgagaggggcagtgctcctccagagctttagccggcagaagcccggtgcacacagctctcgccaagcctacggagcttccttatacgagcagctcgtgtgggagcgtcagctcggtctgcctctgtatctttgggcaaccaaagccctggaggaattagcttgcaagctctgtccgcatgtacttagacaccaccaattcttgcagcattcttcaccgggaagcccatctcttggcttgcagcttctggcccctactctggatctcttggcccctccaggatcaccagttaggaacgcccacaacgaaatattggaagagcctcatcattgcccactccagaagtacacccggctgcaaaccccgagcagcttccccactctggcaaccctcaaggaagagggacagaggaaggcgtgggcgtctttcgatcctaaggcacttctccctctgcctgaagcgtcctatctaccctcctgccagcttaatcgacgcctcgcttggtcctggctctgcctgctcccaagcgctttctgccctgcacaagtgctcctcggtgtcctggtcgcatcctcccataaaggctgtctgcagttgagagaccaaagtggctccctaccctgtttactgttggcaaagcattcccaaccactttccgacccgaggctaatcgggtgcctggtgagggctgagcgcttccagcttatcgtcgaaagagacgtcaggtcgtccttcccttcatggaaggagttgtccatgcccggattcatccagaaacagcaggcccgagtgtacgtacagttctttctagctgacgccttaatccttcccgtgcctagaccctgcctgcactctgccactccatccacaccccagacagaccctaccggcccagaaggaccacacctcgggcaatcaaggctttttcttttatgtcataaggaagcattaatgaaacgcaacttttgtgtccccccaggggcaagtcccgaagtgcctaagccagcactgtctttctacgttcttggcagctggctgggcggaactcaaagaaaggaaggcacaggctggggcctgcccgagccacaggggaacgacgacaacgaccagaaggtccacctgattttcttcgggtcatccgtgaggtggtttgagtttttacaccccggacaggtgtaccggttaattgcccctggcccagctacgcctatgcttttcgaaaaggacggaagttcgtgcatctcaagaaggccattggagttagcaggctgcgccagttgtctcactgtccaggataattggaccttagaactcgagagctcacaagatatacaggacgtactggatgctaataaaagcctgcctgaatcctcgctgacagaccttctctccgataatttcacagatagtctggtgagcttttctgccgagatcctatcccgcacattgtgcgaacctctggttgcaagtctgtggatgaagttaggcaatacaggcgctatgagaagatgcgtcaaactcactgtggctctcgagaccgccgaatgcgaatttccgccacacctggatgtctacatcgaagatccacacctgcctccctccctggggctgctacctggagctagagtccatttctcacaactcgagaaaagagtgtctaggagtcataatgtttattgctgttttcggtcatccacctacgtccaagtcctgtctttccccccagaaacaacaattagcattccactaccacatatttacttagccgagttgctgcagggtggacaatccccttttcaggcaaccgccagctgtcacattgtgtccgtttttagcctgcaattgttttgggtgtgcgcatattgcaccagcatatgtagacaggggaaatgtacacggctcggaagcacctgcccgacccaaaccgccataagccaggcgattatccgactcctggtcgaggatgggaccgccgaggctgtggtgacatgccggaaccatcacgtggccgctgctttggggctgtgccccagggaatgggccagcctgctagacttcgtgcaggtcccgggtcgcgtggttctccagtttgctgggccaggcgctcaattggagtcttctgcacgggtagacgagcctatgaccatgtttctgtggactctttgtactagtccctccgtgctgcgacctattgtgctgtcctttgagctggagcgaaaaccatctaagatagttcccttggaaccacctcgtctgcagcgttttcagtgcggagagctgccgttcctcactcatgtgaatccaaggctaagactatcctgcttgtctatccgggagagtgagtactcctcctctttagggatcctggctagttcttgctag

SEQ ID NO: 219447 - DNA, 3096 bp, synthetic construct
  misc_feature 1..3096: note = Description of Artificial Sequence: Synthetic coding sequence
  source 1..3096: mol_type = other DNA
atggcagccggtcgagcccaggtgccttcctcagagcaggcatggctggaagacgcacaggtcttcattcaaaagactctgtgtccagctgtgaaggagcccaacgtccagctcacacctctagtgatagactgtgtgaagaccgtctggctgtcgcaagggaggaatcagggttctaccctgcccctctcgtatagttttgtgtccgtgcaagacctgaagacccaccaacgactgccctgttgtagccacctgtcttggtcttcgtctgcatatcaggcatgggcccaagaggccggacctaatggcaatcccctgcccagggagcaactgctgttgttgggcaccctgactgatctatcagctgacctcgagcaggaatgtcgaaacggctcactttacgttcgcgataacactggagtgctgtcgtgtgaactaattgacctggacctatcatggctgggacatctatttttattcccaaggtggagctatctcccgccagcccgttggaactcttccggtgagggtcacttagagctctgggatgcccctgtacccgtgtttccacttaccatttcaccagggcctgtgactcctatcccggtgctctaccctgaatctgcgtcctgccttctcagactgagatcccatcccgctgtgacccacgttagcatcatcgtacaagtgcccgctcaactagtgtggcaccgcgcactgcgcccaggaactgcctatgtgctcacagaactacgtgtgtctaagatcagaggccaaagacaacatgtttggatgacatcgcagagcagccgcctcctgttactcaagccagaatgtgtgcaggaactggaattagagctcgaggggccactgctggaggccgatccgaaacccttacctatgccaagcaacagcgaagataaaaaagaccctgagagtctggtacggtactccaggctgctttcgtacagcggggcagtcaccggcgtgttgaatgaacccgcaggcctgtatgaactggacgggcagttgggtctatgtctcgcataccaacaattcaggggactcagaagagtcatgaggccaggggtgtgcctgcagcttcaggatgttcacctcttgcagagtgttgggggaggcacacgtaggccagtgctcgccccttgtcttcggggagcagtgctgctgcagtccttttccaggcagaagcccggtgctcattccagtcgtcaggcctacggtgctagcctgtacgagcagctggtgtgggagagacaacttggtctcccactctacctgtgggccactaaggctttggaagagttggcctgcaagttgtgtccccatgtcctccgtcaccaccagtttctgcagcacagcagtcctggtagtccaagccttggtttgcaacttttggccccaacgttggaccttctagctccccctgggtctcctgtgagaaatgcacacaatgagattctcgaggaacctcatcactgccctctgcaaaaatacactagactgcagactccaagctccttccccacccttgctactctgaaagaggagggacagcggaaggcctgggcctcattcgatcccaaagcgctcctgccattacccgaagcctcatacttgccaagctgccagctcaaccggagacttgcctggtcttggttgtgcctgctgcctagtgctttctgccctgctcaggtattgctgggtgtcttagtagcatcttctcataagggttgcctccagttgcgcgatcaaagtggatcactgccctgtctgctgctggctaagcattctcagcccctttcggatccgcgtctgatcgggtgccttgttcgtgccgagcgctttcagctgatcgtggagcgtgatgtgagatcaagtttccccagctggaaagagcttagcatgccgggatttatccaaaaacagcaggccagggtgtatgtacagttcttcctggcggacgctctgattttacctgtacctagaccctgccttcactctgccacgccaagtactcctcagacggatcccacaggccctgaggggccacatttaggccagagcaggctgtttcttttgtgccataaagaagccctcatgaaacgcaacttttgcgtccctccaggagcgtcaccagaggtgcccaaaccagccttgtccttctacgtgctgggttcttggctgggaggcacccaacggaaggagggcacggggtggggcctgcctgagcctcaggggaatgacgacaatgatcagaaggtccacctgatcttcttcggtagttcagtacgatggttcgaattcctccatccaggacaggtttatcggttgattgccccaggacccgcaacccctatgctgttcgaaaaggacgggtcaagttgtatttcacgtcgaccgctcgaactcgcagggtgcgcttcttgtttgacggtccaggataattggaccctggaattggagtcaagccaggacatccaggacgtgctggatgccaacaaatctctgccggaatcaagcctgacagatttgctatcagataatttcacagattccttggtgtctttcagcgcagagatactatcacgaactctttgcgaaccgctggtggcttccctttggatgaagctgggcaatacgggggctatgcgcaggtgcgtgaaactgacagttgctttggaaacagccgagtgcgaatttcctccccaccttgacgtatatatcgaggatcctcacctccctccaagcctcggtctattaccgggagccagagtccacttcagccagctcgaaaagcgcgtgagccgctcccataacgtgtactgttgcttcaggagcagtacgtatgtccaggtgcttagcttcccccctgagactactataagtatcccactgccccatatctacctcgctgagctcctgcaaggaggccaatctccattccaggcaaccgcctcctgccatatcgtatctgtgtttagcctccaactgttctgggtgtgcgcctactgcactagtatctgtcggcaggctcccggtggcggttgggattgcagaagccggggtgacctgtag

SEQ ID NO: 219448 - DNA, 843 bp, synthetic construct
  misc_feature 1..843: note = Description of Artificial Sequence: Synthetic coding sequence
  source 1..843: mol_type = other DNA
atgcaggccaagtactcaagtaccagggatatgttggacgacgacggcgacactacgatgtctctgcactctcagggttccgcaaccacacgccatcctgagcctcggaggacagagcaccgcgctccctcatccacctggcgccctgtcgctctgaccttgttgactctgtgcttggtactgcttattggactagcagccctgggcttgttattttttcagtactaccagctttcaaatacagggcaggacacgattagtcagatggaggaacgactcggaaacacctcccaagaactgcagtcccttcaggtgcaaaacataaagttagcaggtagcctgcagcatgtggccgagaagctctgccgcgaactgtacaataaggcaggggctcaccgatgctccccttgtacagagcaatggaaatggcacggtgataactgctaccagttttacaaagatagtaagtcgtgggaagactgtaaatacttctgtcttagcgaaaactccactatgttgaaaattaataaacaggaagaccttgagttcgcggcatcacagtcctattcagagttcttttattcctactggacgggcttactgagacccgattctggtaaagcttggctatggatggacggaacccccttcacgtctgagctgttccatatcattattgacgtaacttctcctcggtcacgggattgtgtggccatcctaaatggcatgatcttctctaaagactgtaaagaactaaaacggtgcgtctgcgaacggcgagccggaatggtcaagcctgaatcacttcacgtgccacccgagactctgggagaaggggattag

SEQ ID NO: 219449 - DNA, 213 bp, synthetic construct
  misc_feature 1..213: note = Description of Artificial Sequence: Synthetic coding sequence
  source 1..213: mol_type = other DNA
atgcaggctaaatattcctctacacgggacatgctagacgacgatggagacaccaccatgagcttacattcccaggggagcgctaccactcgtcaccccgaacccaggagaactgagcaccgagccccatcttcaacctggcggccagtggctctgacactcctgaccctctgcctggtgctattgatcggattagccgcactgggactttag

SEQ ID NO: 219450 - DNA, 879 bp, synthetic construct
  misc_feature 1..879: note = Description of Artificial Sequence: Synthetic coding sequence
  source 1..879: mol_type = other DNA
atgacgagaacgtatgagaacttccagtacctcgagaataaagtgaaggtgcagggcttcaaaaacggacccttaccgttgcagtccctcctgcagcggctctgcagtgggccttgccacctcttgctgagcttaggcttaggcctgctgctcctggtgattatttgcgtagtgggcttccagaactctaagtttcaacgagatctggtgacattaaggactgatttctctaatttcacaagcaatacggttgcagagatacaggccctgacgtcacagggatcctcacttgaggagactatcgcatctctcaaggccgaggtagaagggttcaagcaggaaaggcaagctgttcactccgaaatgcttctgcgcgtgcagcaactagtccaggacctgaagaagctcacttgtcaggtggcaactttgaacaataacggagaggaagccagtaccgaggggacctgctgcccagtgaactgggtggagcatcaggactcctgctactggttttctcactctggaatgagctgggctgaggccgagaagtattgccagctcaaaaatgcccacttggtggtgatcaattccagggaagagcagaatttcgtccagaagtacttgggcagtgcatacacatggatggggctgtccgatcctgaaggagcctggaagtgggtggacggaacagactacgcgacagggtttcagaattggaagcccggtcagccagatgactggcagggacatggcctagggggtggagaggactgcgcacatttccatcccgatggcagatggaacgacgacgtatgtcagcgtccatatcattgggtatgtgaggccggtctcggacagaccagccaggagtcccattag

SEQ ID NO: 219451 - DNA, 951 bp, synthetic construct
  misc_feature 1..951: note = Description of Artificial Sequence: Synthetic coding sequence
  source 1..951: mol_type = other DNA
atgaccagaacctacgaaaacttccagtacctggagaataaggttaaggtacaaggattcaagaacggcccactgcctcttcagagtcttctgcagagactttgttctggaccttgccaccttcttctctcccttggcctggggctgctgcttttggtcatcatctgcgtggttggctttcagaactctaagtttcagcgcgacttagtgaccttgagaacagactttagtaactttacatcaaataccgtcgcagagattcaagcactgacgtcacagggtagttcgcttgaggaaactatagcctcactgaaagctgaggtcgaaggttttaagcaggaacggcaggcgggtgtctcggagctgcaggagcatacaacacaaaaggcccacctcgggcattgcccacactgcccaagtgtgtgcgtgcctgtgcactcagaaatgcttctgcgagtacaacagctcgtgcaggacctaaagaagctgacatgccaggtggcaactctgaacaacaacgcatccaccgaaggcacttgttgccccgtaaactgggttgaacatcaggactcttgttattggttctcccattcaggcatgagttgggctgaggccgagaaatactgccagctcaaaaacgcccacctagtcgtaataaatagcagagaagaacaaaatttcgttcagaagtatctgggcagtgcgtacacgtggatggggctgtccgatcccgaaggggcatggaagtgggtcgacggcacggactacgccactggcttccagaactggaaacccggacaaccagacgactggcaggggcacggtctggggggtggcgaggactgtgcccattttcaccccgatggaagatggaacgatgacgtgtgtcagcgtccctaccattgggtctgtgaagctgggctcggtcagactagccaggagagtcactag

SEQ ID NO: 219452 - DNA, 879 bp, synthetic construct
  misc_feature 1..879: note = Description of Artificial Sequence: Synthetic coding sequence
  source 1..879: mol_type = other DNA
atgaccaggacctacgaaaacttccagtatctggagaacaaggtaaaggtccagggctttaagaatgggccactgcccctgcagagtctccttcaacgcctgtgtagtgggccttgccacctgttacttagcctgggactgggacttctcctccttgtgattatttgcgtggtgggttttcagaactcgaaatttcagcgggacttagtcaccttgagaacagactttagtaattttacctccaacacagtggcagagattcaggccttgactagtcaagggtcatcactggaggaaacgatcgcttctttgaaggccgaagttgaggggttcaagcaagaacggcaggccgtccatagtgagatgttactccgcgttcagcagcttgtgcaggatctcaaaaagctgacatgtcaggtagcgacactgaataataatggggaagaagcctctactgagggcacctgctgtcctgtgaactgggtagagcatcaggactcctgttattggttctcacactcaggaatgtcctgggccgaggccgaaaagtattgtcagctgaagaacgcacatctcgtcgtcatcaatagcagagaggaacaaaactttgttcagaaatacctcggatccgcttatacctggatgggcctgagcgatcccgagggagcttggaagtgggtagatggaaccgattatgctaccggatttcagaactggaaacccggacagcctgatgactggcagggccacggactcggtggaggtgaggattgtgcacattttcatcccgacggacgttggaacgacgacgtgtgccaacgcccttatcattgggtctgtgaggctgggctgggacagacctcacaggagtcacattag

SEQ ID NO: 219453 - DNA, 798 bp, synthetic construct
  misc_feature 1..798: note = Description of Artificial Sequence: Synthetic coding sequence
  source 1..798: mol_type = other DNA
atgtcggaagaagtcacctacgcagacttgcagtttcagaattctagcgagatggagaaaatcccagagatcgggaaattcggagagaaggcccctccagccccatcccatgtctggagaccggcagcattgtttctcactctgctttgtctccttctgcttattggcttgggagttctcgcatcaatgtttcacgtcactctcaaaattgagatgaaaaagatgaataagctccagaatatcagcgaagaattacagagaaatattagcctccaattgatgtcgaacatgaacatcagcaataagatacggaacctgtctacaacgctgcaaaccatcgccacaaaactgtgtcgagaactgtattccaaggagcaggagcacaaatgcaaaccctgcccaaggcgctggatatggcacaaggatagctgttatttcttgtcagacgatgtccaaacctggcaggagtccaagatggcatgtgccgctcagaacgccagtcttctgaaaatcaataataagaatgcgctggaattcattaagagccagtcacggtcttatgactattggttggggttatccccagaggaagacagcacaagggggatgcgtgtggacaatattatcaatagttccgcttgggtcattagaaacgcgcctgacctgaataatatgtattgcggctacattaaccggctttacgtccagtactatcactgcacttataagaaacgtatgatctgtgagaagatggctaatccagttcaactggggtccacttactttcgcgaagcctag

SEQ ID NO: 219454 - DNA, 699 bp, synthetic construct
  misc_feature 1..699: note = Description of Artificial Sequence: Synthetic coding sequence
  source 1..699: mol_type = other DNA
atgtctgaagaggtcacatacgccgatctgcagttccagaactcgagcgagatggagaaaattcccgagatcggcaagttcggggagaaagtgcacgtgactctcaagatagagatgaagaagatgaataagctgcaaaatatctcagaggagctgcaaagaaatatttctctacagctaatgagtaacatgaatatctctaataaaattagaaatctgtccacaactctccagaccatagccaccaaactttgccgcgagttatatagtaaagaacaggagcacaaatgcaaaccatgccctcgccgttggatctggcataaggattcatgctacttcctgagtgatgatgttcagacgtggcaggaatccaaaatggcttgcgcagcccagaatgcttcccttctcaagattaacaacaaaaacgctctcgagtttatcaagagtcaatcgcgttcatatgattattggctcggcctgtcacccgaagaagactctacacgaggcatgcgggtcgataacatcatcaacagcagtgcgtgggttataaggaacgcccctgaccttaataacatgtactgtggctacatcaatcggctctacgtgcagtattaccattgcacatacaaaaagcgcatgatctgtgaaaagatggccaacccagttcagcttggctctacatattttcgtgaggcttag

SEQ ID NO: 219455 - DNA, 828 bp, synthetic construct
  misc_feature 1..828: note = Description of Artificial Sequence: Synthetic coding sequence
  source 1..828: mol_type = other DNA
atgtggatcgacttcttcacgtactctagcatgtctgaggaagtcacttatgccgatcttcagttccagaattccagcgaaatggagaagattcccgaaattggcaaatttggggaaaaggctccccctgcccctagtcacgtgtggcggcctgccgctctgttccttacgctgctttgtctgctgttgctcataggccttggagtccttgcctcaatgtttcatgtcacattgaagattgagatgaagaaaatgaacaagctacagaacatcagtgaggaactgcagcgcaatattagcctccagctgatgagtaatatgaacattagcaataagatcaggaacctcagtaccacactgcagaccatcgccacaaagctctgccgggagctgtacagcaaggagcaagagcacaagtgcaagccatgtccgcgaagatggatttggcacaaagatagttgttactttttgagcgatgatgtccagacctggcaagagagcaaaatggcctgcgcagctcagaatgcctccctgctgaaaatcaacaacaaaaacgcattggaattcatcaagtctcagtcgagatcctacgattattggctgggactgtctccggaggaggatagcactcgagggatgcgagttgacaacatcattaactcctcggcgtgggtgattcgaaatgcccctgatctgaacaacatgtactgtggctacatcaatcgcctctacgtgcagtattatcactgtacttacaaaaaacggatgatctgcgagaagatggcgaatcccgtgcagctgggtagtacctactttcgcgaggcgtag

SEQ ID NO: 219456 - DNA, 264 bp, synthetic construct
  misc_feature 1..264: note = Description of Artificial Sequence: Synthetic coding sequence
  source 1..264: mol_type = other DNA
cacaagtgtaagccgtgccctaggagatggatttggcataaggacagttgttactttctgagtgacgatgtgcaaacctggcaggaatcaaaaatggcttgcgcagctcaaaacgcctccctgctaaagattaataataagaatatctttagcgttatcaagaagaagacagaaaaattcttctggctgggcctttcttgggattcttctggaaggtcatggttttgggaggatgggtccgtgccctctccctcactgtactag

SEQ ID NO: 219457 - DNA, 498 bp, synthetic construct
  misc_feature 1..498: note = Description of Artificial Sequence: Synthetic coding sequence
  source 1..498: mol_type = other DNA
atgagtgaagaagtgacatatgccgacctccagttccagaactcatccgagatggagaagataccagagatcggcaaatttggggaaaaagccccacccgctccgtcccacgtgtggagacctgcagcactattcctgaccttgctgtgtctgctgttactaatcggactaggcgtgttagcctctatgttccacgtaactctaaagatagagatgaagaaaatgaataagctgcagaacataagcgaagagctccaaagaaatatatctttgcagcttatgagcaatatgaatatatccaacaaaatcaggaacctgagtacaactttgcagactattgccaccaaattgtgccgcgagctgtatagcaaggaacaggaacacaaatgtaaaccatgccccagaagatggatttggcataaggattcctgctatttcctttctgatgatgtgcaaacatggcaagaatcaaagatggcctgtgctgctcagaactag

SEQ ID NO: 219458 - DNA, 642 bp, synthetic construct
  misc_feature 1..642: note = Description of Artificial Sequence: Synthetic coding sequence
  source 1..642: mol_type = other DNA
atgtctgaagaggtgacctatgcagatctacagtttcagaatagttccgaaatggagaagattcctgagataggaaagtttggagagaaggccccaccggctccatcgcacgtttggcgccctgctgcactgttcctcacactcctctgtctcctgttactgattggactgggagtcctcgccagtatgttccatgttactctcaagatcgagatgaaaaagatgaacaaactgcagaatataagtgaggagctgcaacgaaacatctcccttcagctgatgagtaacatgaacatctccaacaaaattcgtaacctctccaccactctacagaccatcgctactaaattgtgtagagagctctattcaaaggagcaggaacataaatgcaagccctgtccacggaggtggatctggcataaggatagttgctatttcttgtccgatgacgtgcaaacttggcaggagtcgaaaatggcatgtgccgcacagaacgcctctctgcttaagattaataataagaacgccctggagttcattaagtctcaatctaggtcgtatgattactggctaggcctctcaccagaggaagattccacgaggggcatgcgggtggataacatcatcaattcatcggcatag

SEQ ID NO: 219459 - DNA, 423 bp, synthetic construct
  misc_feature 1..423: note = Description of Artificial Sequence: Synthetic coding sequence
  source 1..423: mol_type = other DNA
atggcagcaaccggattcagcgcaccaaatggatcttgtcacggaacgagcaggacagtgaattctgacgcaccgatgtctcccgaattgccaaaaccgcacttacccgatcagctcgtcattgtgaacgagactgaggccgatagcaaaccgagtaaaaatgtggccagaagcgcagcagtcgagacagcttccctgagcccttccctggtaccagctcgccaaccgacaatttccctgttatgcgaggacacggctgacactcttagtgtggaaagtctaacgctggttcctccggtcgacccccatagtttacggtcactcaccgggatgccccctctttctacaccagctgctgcctgtaccgagccagttggggaggaagctgcctgtgcggaacccgttggcactgcagaggattag

SEQ ID NO: 219460 - DNA, 2721 bp, synthetic construct
  misc_feature 1..2721: note = Description of Artificial Sequence: Synthetic coding sequence
  source 1..2721: mol_type = other DNA
atgtttgggagatcccgctcctgggtgggcggaggccacgggaagaccagccgaaacatccacagcctggatcacctaaagtatctatatcatgtgctgactaaaaacaccaccgtcactgagcagaacagaaatctcctggttgaaacgatccgttcaatcaccgagatcctgatctggggtgatcagaacgattcttcggtgttcgacttctttctggagaaaaacatgttcgtcttctttctgaacatcctgcgccaaaaatccgggagatacgtgtgcgtgcagttactccaaaccctgaacatcctctttgaaaacatcagccatgagacttcactctattacctactgtcaaacaattacgtcaactccatcatcgtgcataaatttgatttcagtgacgaggagataatggcttactacatttcttttctgaaaaccctcagtttaaaactgaacaatcataccgtgcattttttctacaatgagcatacgaatgattttgcactttacactgaggccatcaagttttttaatcatcccgaatctatggtccgcatcgccgtgcgcactatcactctaaacgtgtataaggtggacaatcaagctatgcttcattacatccgtgataagactgccgttccttactttagcaaccttgtgtggttcattggtagccatgtcatcgagctcgatgattgcgtgcagacagatgaagagcacagaaatcgcggaaaactgagtgatctggtcgccgagcaccttgaccacctacactatctcaacgacatcctgataattaactgcgaatttctaaacgacgtactcactgatcatctcctgaatcgtctgtttttgcctctgtacgtatactctctggagaatcaggacaagggaggggagcggcctaaaatctcattaccggtgtccctatacctcctcagtcaagtcttcctcatcatacaccacgccccactggtgaactccttagccgaggtcatcctcaatggagacttgagtgagatgtatgccaagacggagcaagatattcaaagatcaagcgctaaaccgtccatccggtgttttatcaaacctactgagaccctcgagcggtccctcgaaatgaacaagcataagggcaagcgcagagttcagaagcgccctaattataaaaacgtgggggaggaggaggacgaggaaaagggcccaacagaggatgctcaggaggacgccgagaaagcaaaagaaatcgaaatggtgattatggagagaagtaaactttccgagcttgctgccagcactagcgttcaggaacagaacaccaccgatgaggagaagtcggctgccgcaacttgcagtgaaagcacccagtggtctagaccatttttggatatggtttatcatgcccttgacagtcctgatgatgactatcacgccttgttcgtgttatgtctgttatacgccatgtctcacaataagggcatggaccccgaaaaactggagcgtattcaactgcctgttccgaacgcagcggagaagacaacatacaatcacccccttgcggagaggcttatccgtatcatgaataatgccgcacagccagatggcaaaatccgactcgcgacccttgaattgtcctgtctgttgctgaaacagcaggtcctcatgtccgcagggtgtatcatgaaagacgtccatctggcttgcctcgaaggagccagagaggaatcagttcaccttgtccggcatttttataagggtgaagacatctttctcgacatgttcgaagatgagtaccggtcaatgactatgaagccaatgaatgtggagtacctcatgatggatgcaagcatcttgttaccacctacgggcaccccgcttaccggcattgactttgtgaaacgcctcccttgtggagatgtggaaaaaacaaggcgcgctataagagtcttctttatgcttaggtcactgagtctccagctgcggggagaacccgaaacacagctgcccctgaccagagaggaggatctgattaagaccgacgacgttttggacctgaataactctgatcttatcgcttgtaccgttattaccaaagatggaggtatggtccagcggtttctggcagtggacatataccagatgagcctagtggaacctgatgtgagtcggcttggctggggcgtagtgaaattcgcaggattgctgcaggatatgcaggtcaccggcgtggaagatgactcgcgcgcactcaatattaccattcacaagcctgctagttcccctcacagtaagccattccctattctgcaagccacatttatctttagcgaccacattcgctgcataatcgctaagcagcggttggccaagggcagaatacaggcacgacgcatgaaaatgcagcggatcgctgctctgctggacctcccaatccaaccgacgactgaagtccttggctttggacttgggagctctacttccactcagcatctgccattcaggttttatgaccaggggaggcggggatcttctgacccaactgtccagagaagtgtgttcgcgtctgtcgataaagtaccaggggaaccagctccgagacctgctccccagctcgttcatcacggcggtcggtctaggagcttctccctttggagcctctgcgagctgccattcctgtcccaaaagcccagaagattggcagcaccggcttcatag

SEQ ID NO: 219461 - DNA, 3162 bp, synthetic construct
  misc_feature 1..3162: note = Description of Artificial Sequence: Synthetic coding sequence
  source 1..3162: mol_type = other DNA
atgttcgggagatcacgttcctgggtgggtggcggtcacggcaagacatcgcgaaacatccatagcctggatcacctaaaatatctctatcacgttctcacaaaaaacaccacagtaaccgaacaaaataggaatctgctcgtcgaaactatcagatctatcaccgagatcctcatttggggcgatcagaatgatagcagcgtatttgatttctttctggagaagaacatgttcgttttcttcctcaacatcctgaggcaaaaaagtggtcgctacgtctgcgtgcagctcctgcagacactgaatattctgttcgaaaatataagccacgagaccagcctctattacttgttgtctaataactatgtcaattctatcatcgttcacaaatttgacttctccgatgaagaaattatggcgtactacatatctttcttgaagactttatctcttaaactgaataatcatactgtccactttttctataacgagcatactaacgatttcgctctgtataccgaagctatcaaattttttaatcaccctgagtcaatggtgagaatagcagtgcgcacgattactttgaacgtgtacaaggtgtctcttgacaaccaggccatgctgcattatatcagagacaagacggccgtgccctacttttccaaccttgtatggttcatcgggagtcatgtgatcgaactggatgactgcgtgcagaccgatgaagagcatcgtaataggggcaagctttccgatttagtggctgaacatctggatcaccttcattacctgaacgacatattaatcatcaattgcgagttccttaacgatgtgttgacggaccatcttctcaatcgcctcttcctcccactttatgtgtactctcttgaaaatcaggacaaagggggagaacgaccgaagataagccttccagtgtctctatatttactgtctcaagttttcctgatcatccatcacgcacccctcgttaactcccttgccgaagtaatcctcaacggcgacctgtcggaaatgtacgccaagactgaacaggatatacagcgttcaagcgcgaagccctcgattcggtgtttcattaaacctaccgagactctggagcggagcctggaaatgaacaagcataaaggtaagcgacgcgtgcagaagcgtcccaactataaaaatgtgggagaggaggaagacgaagaaaaaggtccaactgaagacgcccaggaggatgccgaaaaggctaagggtaccgaggggggaagtaagggcatcaagactagcggggagtctgaggagattgagatggtgattatggagagatcaaagctaagtgagctcgccgcttcaacctccgttcaggagcagaatacaaccgatgaggagaagagtgccgcagccacctgcagcgagagcacccagtggtctcgtcccttcttagacatggtgtaccatgccctagatagccccgacgacgactaccacgcgcttttcgtcctgtgtctattatacgctatgagtcacaataagggcatggaccctgagaagctggaacggattcagttacctgtaccaaacgctgccgagaaaaccacttataaccaccccctggccgaaagactgattagaatcatgaataacgccgcacagcccgacggcaaaatccggcttgccacacttgagctgagttgcctcctattgaagcagcaggtgttaatgagcgctggctgtatcatgaaagacgtccatctggcttgcctggagggagcacgggaagagtctgtccatctcgtacgccatttctacaaaggggaggacatctttctggatatgttcgaagacgagtatagatccatgaccatgaagcccatgaacgtggaatatctaatgatggatgcgagcattctgctgccccctacaggcaccccactgactgggatagacttcgtaaagcggttaccttgtggagatgtggaaaagacccgcagggccatccgcgtgttttttatgctcaggtctctgagtctgcaactccgaggggagcccgagacccagctccccctgactcgcgaagaggacctcatcaagacagacgatgtgctggatctgaacaattcagatctcattgcctgcactgtcatcaccaaagacggcggaatggtccaacgcttcttggctgtagatatataccagatgtctctcgtcgagcctgatgtgagtaggctgggatggggggtggtcaaattcgctggcttgctacaggatatgcaggtgaccggagtagaagacgatagccgggctctgaatattactatacataagccagcctcctctccacactctaagccattcccgatcctgcaggcaacattcatctttagcgaccacattaggtgtatcattgctaagcagcgcttggcgaaagggaggattcaggccaggagaatgaagatgcagaggatcgctgctctcctggatctgccaatccagccaaccacggaagtccttggcttcggtcttggaagcagcacgagcacgcagcatctgccattccgcttctacgatcagggcagacgcggaagcagcgatccgaccgtacagcgaagtgtgtttgccagtgtggataaggtgcccggattcgccgtggctcaatgtattaaccagcacagcagccctagccttagcagccaatctcccccatctgcctcaggctctcccagcgggtcagggtctactagccattgtgattcgggcggaacctcaagttcctccactccatctactgcccagagcccagctgacgccccaatgagccctgagcttccaaagcctcacctgcccgatcagctggtgattgtcaatgagaccgaggccgactccaaacccagtaaaaacgtggctcggtcggcagcagtggaaaccgcttctctctcgccttctttggtgccggcacgtcagcctacaatctccctgttatgtgaggatactgcagatacgctgtcagtggagagcctaacactggtgccgccagttgacccgcattctcttcgctctctgactggcatgccacccctgtcgacgcccgcagccgcttgcactgaaccagtaggagaagaggcagcctgtgctgagcctgtcgggactgccgaggattag

SEQ ID NO: 219462 - DNA, 3162 bp, synthetic construct
  misc_feature 1..3162: note = Description of Artificial Sequence: Synthetic coding sequence
  source 1..3162: mol_type = other DNA
atgtttggcaggtccaggtcgtgggtcgggggagggcatggaaaaaccagccgcaatattcattctttagatcatctcaagtatctgtatcacgttttaaccaaaaacactaccgtcacagaacagaaccggaatctgttagtggaaaccatccgcagcattaccgagattctgatatggggggaccagaatgactcttctgtttttgattttttcctggagaagaacatgttcgtgttctttttaaacatcctaagacagaaaagcggcagatacgtatgcgtgcaactgcttcaaaccttaaatattctgttcgagaacataagccacgaaacttcactgtattatctactgagcaataattatgtgaactctattattgtgcataagttcgactttagtgatgaagagataatggcttattacatatctttcctgaagaccctgtccctgaagctgaataaccacaccgtgcactttttttacaacgaacatacaaatgacttcgcgctctacaccgaagctattaaattctttaaccatccagagtctatggtgaggatcgccgtcagaaccatcaccctcaacgtctacaaagttagcgtcgataatcaggcaatgctgcattacatcagggacaagacagcggtaccctacttttcaaaccttgtgtggttcatcggctctcatgtgatcgagctcgatgactgcgtgcaaacggatgaggaacacagaaataggggaaagttaagcgacctggtagcagagcatctggaccatctccattacctcaatgatatcttgattattaattgcgaatttctgaacgacgttctcaccgatcaccttctcaaccggcttttcctgccgctgtatgtatattctttggaaaatcaggataaagggggtgaacgacctaaaatatctttgcccgttagtctatatcttctgtcacaggtgttcctgatcatccaccatgccccacttgtcaactcactcgcggaggtaatactaaatggtgacctttccgaaatgtacgccaaaactgaacaagatatccaacgatcaagtgcgaaaccatcaatacgctgtttcattaagccaaccgagacactggagcgttcccttgagatgaacaaacataaaggtaaacgtagggtgcagaaacgtcctaactacaagaatgtcggcgaggaggaggatgaggagaaaggacctacggaggatgcacaggaggacgcagagaaggcaaaggggacagaagggggttccaaaggcatcaaaacatccggggagagtgaagagattgagatggtcataatggaacggtccaagctgtccgaactggcagccagcacatcggtccaggaacagaacacgaccgacgaggagaaaagcgccgctgcaacctgttctgaaagtacgcagtggtcacggccatttctggacatggtgtaccacgctttggattctcccgacgatgactatcacgcactgtttgtcttgtgtctcctttatgccatgagtcacaataaaggaatggacccagagaagcttgagcgaatccagctcccagtccccaacgccgcagaaaaaactacctataatcatccgctcgcagaacggctcatccgcattatgaacaacgcggctcagcccgatggtaagatccggctggctactctggaattgtcgtgtcttctcttgaaacagcaggtcctgatgtcagccggatgtattatgaaggacgtccatctagcatgtctggaaggcgcacgtgaggaatccgtacacttggtgaggcacttctacaagggtgaagacatcttcctcgacatgtttgaggatgaatacagatccatgaccatgaagcccatgaatgtagaatatcttatgatggacgcctcaattctgttaccacccacaggcacacccctcacgggcattgacttcgtgaaaagactgccctgcggggacgtcgagaagacccggcgtgccatcagggtctttttcatgctcagatcactgagtcttcagctgcgcggagagcccgagacacagctgcccctcactagggaggaggacctcataaaaactgacgatgttctggacctgaataacagtgatctgatagcctgtactgtgattaccaaggatggcggaatggttcagcgatttttggcagtggatatttaccagatgagtctcgtggaacctgatgtatcccggctcggctggggggtcgtcaagtttgctggcctgttgcaggatatgcaggtgaccggcgtggaagatgattcccgagcactgaacatcacaatccacaagcccgcatcatcgccacattccaaaccctttcccatcctgcaagccaccttcatttttagcgaccacatccgctgcataatcgctaaacagagactcgctaaaggcagaatccaagccagaagaatgaaaatgcaaaggattgctgccctgttagatctgcccattcagcctactaccgaggtgctcggctttggcctggggagcagtacctcgactcagcatctgccatttcggttttacgatcaaggcagaaggggatcatctgaccctactgtgcagaggtccgtgtttgcaagcgtcgacaaagtgcccggattcgctgttgcccagtgtatcaatcaacatagtagtccctcattatcgagtcagagtccaccctcagcatcaggatcacctagtggatccggctcgacatcacattgtgactccgggggaacatcatcatctagtactccgtctaccgcccagtcccctgctgatgcgccaatgtctcccgagctcccgaagcctcatctcccagatcaacttgtgatagtgaacgagaccgaggctgatagtaagccttcgaagaacgtagccaggagcgccgctgtggagacagccagtctgagcccttctctggtacctgcccgtcagcccacaatctccctgctatgtgaagacacggcggataccctttctgtggagtcactgaccttggtgccaccagtggaccctcactccttgcgtagcctgaccggtatgccccctctgtccactcctgcagctgcctgtactgagcccgtcggcgaagaagccgcttgtgccgaacccgttggcaccgccgaagattag

SEQ ID NO: 219463 - DNA, 288 bp, synthetic construct
  misc_feature 1..288: note = Description of Artificial Sequence: Synthetic coding sequence
  source 1..288: mol_type = other DNA
atgcatgatagcaataacgtggaaaaagacattaccccttccgagttgccagcgaatcctgctattcgcgcaaattgccaccaggagccctctgtgtgcctgcaagccgcttgccccgaatcgtggatcgggtttcaaagaaaatgtttctatttttccgacgacacaaaaaactggacctcatcacagcgcttctgcgatagccaggatgccgatctggcccaagtcgagtctttccaggagttagtgtcttaccctggctcccgtcgcgtttgtctgtttgagtag

SEQ ID NO: 219464 - DNA, 525 bp, synthetic construct
  misc_feature 1..525: note = Description of Artificial Sequence: Synthetic coding sequence
  source 1..525: mol_type = other DNA
atgattaaccctgaactacgcgatggtcgggcagacgggtttatccacagaatcgtgcctaaactcatccagaactggaaaatcggccttatgtgttttctgagtattataatcacaaccgtatgcatcatcatgatcgccacttggtcaaagcatgcaaaacccgtcgcatgtagtggcgactggctcggcgtccgcgacaaatgtttttatttttcggacgacacccgtaattggaccgccagtaaaatattctgctctctccagaaggccgagcttgcccaaattgacacacaggaagatatggaattcttgaaacgctacgcaggaacagatatgcattggatcggccttagccgtaaacagggtgatagctggaaatggaccaacggtactaccttcaatggttggtttgaaatcatcggtaatggctcatttgcgttcctttctgcggatggtgtccactcatctaggggcttcatcgatattaaatggatctgcagcaagcccaagtactttctgtag

SEQ ID NO: 219465 - DNA, 2406 bp, synthetic construct
  misc_feature 1..2406: note = Description of Artificial Sequence: Synthetic coding sequence
  source 1..2406: mol_type = other DNA
atgcatcatagaatgaacgaaatgaacctctcccctgttgggatggaacagcttaccagctcctctgtaagcaatgccctgcccgtgtccggttcccacctggggttggctgcttcccccacccacagcgccatccccgctcccggtctacctgtcgcgatacctaacctgggcccatccctctcatccctgccctccgccctgagcttgatgcttccaatgggaatcggcgatcgtggggtgatgtgcggactgcctgagcgtaactacacgttgccccctcccccttacccccacttagagtctagttacttccggactattctccccggaatcttgagctatctggccgaccggcctcctccccagtacatacaccccaatagcatcaacgtggatggcaacacagctctgtcaattacgaataatccatccgcactcgacccctaccagtctaacggcaatgtggggctggagccagggatcgtctccatcgactccagatccgtgaatacacatggagcccagagcctccacccttccgacggccacgaggtggcgctggataccgctatcacgatggaaaacgtgtcaagagtgactagccctatcagcaccgacggcatggctgaggagctgacaatggacggagttgccggtgagcactctcagatccccaatggaagtcgatcccatgaaccccttagcgttgactccgtttcaaataatctagccgcagacgccgttggccacggaggcgtcattccaatgcatggtaacggactggaattacctgtcgtgatggagactgaccatattgcaagtagagtgaacggcatgtccgacagcgctctgagcgactccattcatactgttgcaatgtcgacaaattccgtgtctgtggcgctctctaccagtcataatcttgcctcattagaatcagtgtccttgcacgaggttggcctgtcattggaacctgtagccgttagttctataacccaagaggtcgcaatggggaccggtcacgtggacgtaagctccgattctctgtccttcgtctcacccagcctccagatggaagactctaatagcaataaggagaatatggcaacgcttttcacgatatggtgtacactatgtgatcgggcatacccaagtgattgccctgaacatggcccagtcacattcgtgcctgataccccaatagaaagccgagctcgcctgtctcttcccaaacagctggtcctcaggcagagcatagtaggcgcagaggtcggggtgtggactggagagactatccctgtgcggacgtgtttcgggccacttattggtcagcagagccactccatggaagttgctgaatggaccgataaggccgttaatcatatctggaagatttaccacaatggagtactggagttctgcattatcaccacagacgaaaatgagtgtaactggatgatgttcgtccgcaaggctaggaaccgcgaagagcagaatctcgtcgcttacccgcacgacggcaagatctttttttgcacctctcaggacatccctcccgaaaacgagctgcttttctattacagccgtgattacgcacagcagatcggcgtgccggaacatcccgatgtgcacctatgtaactgcggaaaggagtgcaactcgtacaccgaatttaaagcccatctcacgtcgcacatacacaaccacctgcctacccaaggtcattccggttctcacgggcctagccactctaaggaacgaaagtggaaatgttctatgtgtcctcaagctttcatttcccccagtaagctgcacgtgcacttcatggggcatatgggaatgaagccccacaaatgcgatttctgctctaaagccttttctgatccctcaaatctcaggacacatctgaagatccataccggacaaaagaattatcgttgtacactgtgcgataagagcttcacacagaaggcacatctggagtcgcatatggtcattcacacaggggaaaagaaccttaaatgcgattactgcgacaaactctttatgaggcgacaggacctcaaacagcacgttctgatccatacccaggagcgccagattaagtgtccaaagtgtgataagctatttctgcggacgaaccatcttaaaaaacacctgaactcccacgaaggtaaaagagattacgtgtgtgagaaatgtacaaaagcatatctgacgaagtaccacctgacccgtcaccttaaaacttgcaaggggcctacaagttcaagctctgctcctgaggaggaagaggaggacgattctgaagaagaggacctagctgactccgtggggactgaagactgcagaatcaactcagccgtgtatagcgcagacgaatcactatccgctcacaagtag

SEQ ID NO: 219466 - DNA, 465 bp, synthetic construct
  misc_feature 1..465: note = Description of Artificial Sequence: Synthetic coding sequence
  source 1..465: mol_type = other DNA
atgcacgattcaaataatgtggaaaaggacatcaccccctctgagttaccagcaaatcccgcaatccgcgcaaactgtcatcaggagcccagcgtttgtttacaggcagcctgtcctgaaagctggatcggatttcaacgcaaatgcttctacttctccgacgacaccaagaattggacctcttcacagagattctgtgactcccaagatgcggacctggcacaagtggagagttttcaggaactgaacttcttgctacgctataaaggaccctccgatcactggataggcttatctcgtgagcagggccagccttggaagtggatcaacggaacagagtggaccagacagttccctatcctaggagccggagagtgcgcttatctcaacgataagggtgctagcagcgcgcgtcactatacagagaggaaatggatatgttctaagtccgatatccacgtgtag

SEQ ID NO: 219467 - DNA, 585 bp, synthetic construct
  misc_feature 1..585: note = Description of Artificial Sequence: Synthetic coding sequence
  source 1..585: mol_type = other DNA
atgcacgattccaacaatgtcgagaaggatatcactccgagtgagctccctgcaaatccaggttgcctgcactcaaaggaacattccatcaaggccaccctcatatggcgtctcttctttctgatcatgtttcttactatcatagtctgcggaatggtggccgctctgagtgccatcagggcaaactgtcaccaggaaccaagcgtgtgtctgcaggccgcttgccctgaatcatggatcggctttcaaaggaagtgcttctacttctccgacgacaccaagaactggaccagttcacagcgcttttgtgattctcaggacgcagatttggctcaggtggagtcttttcaggaactgaacttcctacttaggtataagggaccctccgatcattggatcgggctgtctagggaacaaggacaaccatggaaatggatcaacggcacagagtggactcggcagcttgtgatgaaagaggacggagctaatttgtatgttgctaaagtgtcccaagtacccaggatgaacccgcgtcccgttatggtgtcctaccccggatcacgcagagtctgcctttttgaatag

SEQ ID NO: 219468 - DNA, 576 bp, synthetic construct
  misc_feature 1..576: note = Description of Artificial Sequence: Synthetic coding sequence
  source 1..576: mol_type = other DNA
atgcatgacagcaacaatgtggagaaggacattactccctcagagttgcctgccaacccaggctgcctgcatagcaaagaacactccatcaaggccaccctaatttggcggctgtttttcctcattatgttcctgacgattatcgtgtgtggaatggtagccgcactcagtgctatcagagcaaactgtcatcaagagccctcagtgtgtttgcaggccgcttgccccgagtcttggatcggtttccagcgaaagtgcttttatttctccgatgatacaaaaaactggacctcttctcaaaggttttgtgactcccaagatgcagatctggctcaggtggaatctttccaggagcttaacttcctattaaggtacaagggcccatcggatcactggattggactgtctcgagaacaaggacagccgtggaaatggatcaatgggaccgaatggacaaggcagtttcctattctgggtgctggagagtgcgcatatctgaatgataagggcgcttccagcgcacggcattatactgaaaggaagtggatctgtagtaagtcggatatacacgtctag

SEQ ID NO: 219469 - DNA, 399 bp, synthetic construct
  misc_feature 1..399: note = Description of Artificial Sequence: Synthetic coding sequence
  source 1..399: mol_type = other DNA
atgcacgattcaaataatgtggagaaggatatcacaccctctgagctccccgctaaccccggttgcctccactcgaaggaacattccattaaagctaccctaatttggagactattcttccttatcatgtttcttacgataatagtgtgcggtatggttgccgctctcagcgctatccgcgcaaattgccaccaggaaccatctgtttgtctgcaagccgcatgtcccgagtcatggattggatttcagaggaaatgcttctacttcagcgacgatactaaaaactggacaagctcccagaggttctgtgactcccaggatgccgatctcgcacaagttgagtccttccaggaactggtttcgtatccgggtagccgccgtgtttgccttttcgagtag

SEQ ID NO: 219470 - DNA, 891 bp, synthetic construct
  misc_feature 1..891: note = Description of Artificial Sequence: Synthetic coding sequence
  source 1..891: mol_type = other DNA
atgtctgacagcaaagagccaagggtacaacaactgggactgttggggtgtctcgggcatggagctttagtgcttcagcttctctcctttatgttactagcaggggtcctggtagcaattcttgtccaagtcagcaaagtgcccagcagcctgtcacaggagcaatctgagcaggatgccatttatcaaaatctcacccagctgaaagcagcggtgggcgaactgtccgagaaatctaagctccaggagatctaccaagagctcacgcagttaaaggccgctgtgggagagttgcctgaaaaatctaaacttcaggaaatttatcaggaactcacaaggcttaaagcagctgtgggggaattgccagaaaagtctaagttgcaggaaatctaccaagagttgacgcgccttaaggcagcggtcggagagcttccagagaagagtaagctgcaagagatctaccaggagctgaccagactgaaagccgctgtcggtgagctgcctgagaaaagcaagttacaggagatatatcaggaactgaccgaattgaaggctgcggttggcgaacttccagaaaaatcaaaactgcaggaaatttaccaggaactgacccaactcaaggctgctgtgggggaactgcccgatcagagcaagcagcagcaaatctatcaggagctcactgatctaaagactgcctttgagcgtctgtgcaggcattgcccgaaagactggaccttttttcaggggaattgttattttatgtctaacagccagcgcaactggcacgattctgtcaccgcatgtcaagaggtgagggctcagctggtcgtgataaagacagccgaagaacagctgcccgcagtgctcgagcagtggcggactcaacagtag

SEQ ID NO: 219471 - DNA, 2379 bp, synthetic construct
  misc_feature 1..2379: note = Description of Artificial Sequence: Synthetic coding sequence
  source 1..2379: mol_type = other DNA
atggccgctccttcacttctcaattggcgaagagtgtcaagcttcactggtcccgtccccagggccagacacgggcacagagctgtggccatacgagagctgatgattatttttggaggcggtaatgagggtatcgccgacgaattacacgtgtataacactgccacaaaccagtggtttctcccggcagtaaggggtgatatccctcctggctgtgctgctcacgggttcgtgtgcgacggaacacgcatactggtctttggaggcatggttgagtatggccgatactctaacgagctgtacgagctgcaggcctcaagatggctgtggaagaaggtgaagccgcatcccccacctagtggactcccaccttgtccccgtctcggacatagctttagcctctatggtaacaaatgctatttgtttggcggattagcaaatgaatcagaggacagtaacaataatgtacctcgctacttgaacgacttctacgagctcgagttgcagcacgggagcggagtcgtgggttggtcaattcctgtgaccaagggcgtggtgcctagtcccagagagtcacatactgccgtgatttactgcaagaaggactctggaagtcccaaaatgtacgttttcggcggaatgtgcggtgctaggctggatgacctatggcagcttgacctagaaacgatgtcatggtccaaacctgagacaaaggggacggtgcctctcccgagatcactgcatactgcttctgtcataggaaacaaaatgtacatctttggcggatgggttccccacaagggtgaaaacactgagacttccccgcacgattgtgagtggaggtgcactagctctttcagctatctaaatctagatactacggaatggacaacccttgtcagcgactcacaggaagataaaaaaaacagccgaccaaggccacgcgctggccactgcgcggtcgcaatcggaacaagactgtatttctggtcaggcagggacgggtacaaaaaggccctcaacagtcaggtttgttgcaaagacctctggtatctggatacagaaaaaccacccgcaccctcccaagtgcagctcattaaggctaccaccaattctttccatgttaaatgggatgaagtctctacggtcgaaggatacttgctgcagctgtctacagatctcccttatcaggctgctagcagcgactctagcgctgcgcctaacatgcagggcgtgcgcatggacccccacaggcagggaagtaataacatagtccccaattccattaatgacaccattaattctactaaaaccgagcaacctgctacaaaggagacctctatgaagaacaaacccgacttcaaggctctcactgactctaatgctatactgtacccatctctggcttccaacgcaagcaatcataattctcacgtggtagatatgttgaggaagaatgagggaccacacacaagcgcgaatgttggcgtgttgtccagctgtttggatgtgcgcacagtgatacccgaaaccagcgttagtagcacagtgtcaagcactcagactatggttacgcagcagaccattaaaacagaaagctcctcaactaacggtgccgtggtgaaggacgagacctcactgaccactttctctaccaagtcagaggtcgacgaaacctacgccctgccggcaaccaaaatttctagagtggagacgcacgctaccgccacccctttctcaaaggagactcctagcaatcccgttgcaaccgttaaggccggagagcgccagtggtgcgatgtaggaatatttaaaaacaacaccgcgttagtaagccaattttacctcttgccaaagggcaagcagagcatctcaaaggtcgggaacgcagacgttcccgattactccctgctcaagaaacaagatctggttcccggaactggttacaggttcagggtcgcagccatcaatggatgtgggatcgggccattctccaaaatcagcgaatttaagacctgcataccgggattccccggtgcaccctcagccgtcagaatcagcaaaaacgtagagggtattcacctttcctgggagcctcctacgtctccttcaggcaatatactggaatattcagcatacttagcgatccggaccgctcagatccaagacaacccttcccaattggtcttcatgaggatctactgtggcctgaagacgtcatgtatagtgacggctggtcagctggccaacgcccatatcgactacacttcgagacccgcaattgtgttcaggattagcgccaagaacgagaagggatacgggcctgccacacaggtgcggtggttgcagggtaataacaagaaagcccctctcaactag

SEQ ID NO: 219472 - DNA, 498 bp, synthetic construct
  misc_feature 1..498: note = Description of Artificial Sequence: Synthetic coding sequence
  source 1..498: mol_type = other DNA
atgacctccgagattacgtatgcagaggtgcgatttaagaatgaatttaagagtagcgggatcaatacggcttcttcggccgaaacagcctggagctgttgtccaaaaaattggaagtccttctcttcaaactgttacttcatctctaccgaatcagcatcttggcaagactctgaaaaggactgcgccaggatggaggcccacctgttggttatcaacactcaggaggaacaggatttcatattccagaatcttcaagaagagagcgcgtactttgtcggactgagcgacccagaagggcagcgccactggcagtgggtagatcagacaccgtataacgaatcatccaccttttggcacccacgggagccctcggaccccaatgagaggtgcgttgtgctgaattttagaaaatctcctaaacgttggggatggaatgatgtcaactgtctcggcccacagagatccgtatgcgagatgatgaagatccatttgtag

SEQ ID NO: 219473 - DNA, 615 bp, synthetic construct
  misc_feature 1..615: note = Description of Artificial Sequence: Synthetic coding sequence
  source 1..615: mol_type = other DNA
atgacaagcgagattacttacgctgaggtgcgatttaaaaatgaattcaagtccagtggcataaacacggcctcatccgctgccagcaaagaacgcaccgcccctcataagtctaatactggttttcctaaactcctctgcgctagtctgctcatattttttcttctccttgctatcagcttctttatcgcattcgtgaagacagcctggtcctgctgccctaaaaactggaagtctttcagttccaactgttacttcattagcacagagtcggctagctggcaagattcagaaaaagactgtgctagaatggaagcacacctactagtgattaacacccaagaggaacaagactttatttttcagaacctgcaggaagagtccgcctactttgtcggcctaagcgaccctgaggggcaacgccactggcagtgggtggaccagaccccatacaacgagtcttccaccttttggcatccacgcgagcccagcgatcccaacgaaaggtgcgtggtgttaaatttcagaaagtctccaaagcggtggggttggaacgacgtgaactgtctgggaccacagcgtagtgtctgtgagatgatgaagattcacctgtag

SEQ ID NO: 219474 - DNA, 597 bp, synthetic construct
  misc_feature 1..597: note = Description of Artificial Sequence: Synthetic coding sequence
  source 1..597: mol_type = other DNA
atgacctccgaaatcacatacgctgaggtgcgattcaaaaacgaattcaagtcgtccggcatcaataccgcatcatctgcagttttttttcagaaatactctcagctgctggaaaaaaaaactaccaaagagcttgtgcatacaaccctcgaatgcgttaaaaagaatatgcccgtggaggaaaccgcttggagctgttgccccaagaactggaagtccttttccagcaactgctacttcatatctacagagagcgccagctggcaggactcggagaaagactgtgccaggatggaggcccacttacttgtgatcaacactcaagaggagcaggacttcattttccagaacctccaagaggaatcagcctatttcgttgggctgagtgatccagagggacagaggcactggcaatgggttgatcagactccctataatgaatcatctacattttggcaccccagagaaccatcagaccctaacgagaggtgtgttgtgctgaacttcaggaagtcaccaaagcggtgggggtggaacgacgtcaattgtctgggaccacagagatccgtgtgcgaaatgatgaaaattcacctttag

SEQ ID NO: 219475 - DNA, 549 bp, synthetic construct
  misc_feature 1..549: note = Description of Artificial Sequence: Synthetic coding sequence
  source 1..549: mol_type = other DNA
atggtgcccgaggaggagcctcaggacagggtccctcataacttcatgtattccaagaccgtcaaaagactatctaagctgcgcgagtaccagcagtaccatccaagtcttacatgtgttatggagggaaaggatatcgaggactggagctgttgcccgactccatggacttcttttcagtcctcctgctacttcatttctacggggatgcaaagttggacaaaatcccaaaagaattgttccgtgatgggggctgatttagtggttattaacactagagaggaacaggattttattatccagaacttgaagaggaatagctcctacttcttgggcctatccgatcctggcggaaggagacattggcaatgggtggatcagaccccctataatgagaacgtgacgttctggcacagtggtgagccaaacaacttagacgaaagatgcgccattattaatttcaggtccagtgaagagtggggatggaacgatatccactgccacgtgccccagaaatccatttgcaaaatgaagaaaatctatatctag

SEQ ID NO: 219476 - DNA, 642 bp, synthetic construct
  misc_feature 1..642: note = Description of Artificial Sequence: Synthetic coding sequence
  source 1..642: mol_type = other DNA
atggtccctgaagaggagccccaggaccgcgagaaaggtctgtggtggttccaacttaaagtttggtctatggccgtcgtgagcatactgctgttgagcgtttgttttactgtgtcctccgtggtacctcataattttatgtatagtaagacggtgaagagacttagtaagctacgggagtaccagcaataccaccctagcttgacctgcgtgatggaagggaaagatatcgaggactggagctgctgccccacaccatggacaagctttcagtcaagctgctatttcatttctacgggtatgcaaagctggactaagagccaaaaaaattgttcagtcatgggtgccgatctggtggtcattaatacccgggaggagcaggatttcattatacagaacctcaagcgcaatagcagttacttcctggggctgagtgacccgggaggcaggcggcactggcaatgggtagaccaaaccccctacaatgagaacgtgacattttggcatagcggcgagccaaacaatttagacgaaagatgtgcaattataaacttccggagcagcgaggaatgggggtggaacgacattcattgtcacgtgccgcaaaagtccatctgtaagatgaagaagatttatatctag

SEQ ID NO: 219477 - DNA, 549 bp, synthetic construct
  misc_feature 1..549: note = Description of Artificial Sequence: Synthetic coding sequence
  source 1..549: mol_type = other DNA
atggtccctgaagaagaaccccaggatagggtccctcacaactttatgtacagcaagaccgttaagcggctgtcaaagcttagagaatatcagcaatatcatccctccctgacttgtgtaatggaagggaaagatatcgaagattggtcttgctgtccaacaccttggaccagctttcagtctagctgttattttatttctacaggcatgcagtcctggaccaagtcccagaagaattgttcagtcatgggagccgatctcgtggttatcaatactcgagaagaacaggactttattattcagaatctcaagaggaacagcagctactttctaggactgagtgacccgggagggcgaagacattggcagtgggtggatcagaccccctacaatgaaaacgtgactttctggcactctggagagccaaacaacttagacgagcggtgcgctataattaacttcaggagttcagaggagtggggatggaatgacattcattgtcacgtgcctcaaaagtccatatgcaagatgaaaaaaatatatatttag

SEQ ID NO: 219478 - DNA, 642 bp, synthetic construct
  misc_feature 1..642: note = Description of Artificial Sequence: Synthetic coding sequence
  source 1..642: mol_type = other DNA
atggtgcccgaggaggaaccacaggatagggagaagggactgtggtggttccagctgaaagtgtggtctatggccgtggttagcatattgctgctgtccgtttgcttcacagtatcgtcagtcgtgccccacaattttatgtactccaagacagtgaaacgtttgagcaagctacgcgagtaccagcagtaccatccatcactgacatgtgttatggaaggtaaagatatcgaggactggagctgctgtcccacaccctggaccagttttcagagctcctgctattttattagtaccggaatgcagagctggactaagagtcaaaaaaattgctcggtgatgggcgctgaccttgtcgttataaacacgcgggaagagcaggatttcataatccaaaatctgaagcggaattcttcttacttcctcggcctatccgatcctggcggtaggaggcactggcagtgggtcgatcagactccttacaacgagaatgtgacgttttggcacagcggtgagcctaataacctagacgaaagatgcgccatcatcaatttcagatcaagtgaagagtggggatggaatgatatccactgtcatgtgccgcagaaatccatctgcaaaatgaagaaaatctatatttag

SEQ ID NO: 219479 - DNA, 648 bp, synthetic construct
  misc_feature 1..648: note = Description of Artificial Sequence: Synthetic coding sequence
  source 1..648: mol_type = other DNA
atgggtctcgaaaagcctcagtctaagttagagggaggtatgcatccacagctgatccccagtgtgattgcggtggtgtttatcctgctcctgtccgtctgcttcattgctagctgtctggttacacaccataatttctcgcgttgtaagagagggacaggagtccacaagctcgagcaccacgctaagttaaaatgcatcaaggaaaaaagtgaactgaaaagtgcagaagggtctacatggaactgctgccccatcgactggcgggcattccagtccaactgctatttccccctgacagacaacaaaacctgggccgaatcggagcgtaactgttccggcatgggggctcacttaatgacaatctccaccgaagccgaacagaattttatcatccaattcttagacaggaggttaagctatttcttaggcttacgagatgagaatgctaagggccagtggcgttgggtcgatcagacaccattcaatccgcgtcgcgtgttctggcacaagaatgagccagacaatagccagggcgagaattgcgttgttctggtatacaaccaggataaatgggcgtggaatgatgtgccgtgcaacttcgaggcatccaggatctgtaaaattccagggactactttgaactag

SEQ ID NO: 219480 - DNA, 435 bp, synthetic construct
  misc_feature 1..435: note = Description of Artificial Sequence: Synthetic coding sequence
  source 1..435: mol_type = other DNA
atggggctggagaaaccacaatcaaaattagagggcggtatgcacccccaactgattccaagcgtcatcgctgtggtattcatcctgctcttatcagtgtgcttcatcgcttcctgtttggtcacgcaccacaatttctccagatgtaaacgcggaacaggggtacataaattggagcaccacgccaagttgaaatgtatcaaagagaagagtgagctcaaaagtgcagaaggctcgacgtggaactgctgccccattgattggcgcgcattccagtccaattgttacttccctttgacagataacaagacatgggctgagtccgagagaaattgcagcggcatgggggcacatctgatgacaatctccaccgaggccgagcagaatttcattatacagtttctcgatcggagactgagctactttctgggctag

SEQ ID NO: 219481 - DNA, 660 bp, synthetic construct
  misc_feature 1..660: note = Description of Artificial Sequence: Synthetic coding sequence
  source 1..660: mol_type = other DNA
atgaactccagcaaatcctccgaaacacagtgcaccgagcggggttgtttctcctcgcagatgttcctgtggactgtcgccggaatcccaatactgtttctctctgcttgctttatcactcgttgcgtcgtgacatttagaatttttcaaacttgcgatgagaagaaatttcaactgcctgagaactttaccgagctgtcctgctacaattatggtagcggatctgtgaagaactgttgccctttaaattgggagtacttccagagttcttgctatttcttttccacggacacgatcagttgggcattgagcctcaagaactgctccgctatgggggcacacctggttgtgatcaattcacaggaggaacaagagtttctttcttacaaaaaacctaaaatgcgagagttctttattggcctgagtgaccaagtagtggaggggcagtggcagtgggtcgatggtacaccacttacaaaatcattatcattctgggatgtcggggagccgaacaacatcgccacattggaggactgcgcaacaatgcgtgattcttccaatccacgccaaaactggaacgacgtgacctgtttcctcaattactttagaatctgcgaaatggttggcattaatccgcttaataaggggaagtcactatag

SEQ ID NO: 219482 - DNA, 1134 bp, synthetic construct
  misc_feature 1..1134: note = Description of Artificial Sequence: Synthetic coding sequence
  source 1..1134: mol_type = other DNA
atgtccgattctaaagagccaagggtgcagcagctcggcttgctggaggaggatccaactacaagtggtattaggttgttccctcgtgatttccaattccagcagatccacgggcacaaatccagtacaggctgtctcgggcacggcgctttggtactgcagctgcttagttttatgctgctcgccggagtcttggtcgcaatactggtgcaagtatccaaagtgccgagctctctcagccaggagcaatcggaacaggacgccatctatcaaaatttgactcaactgaaggccgctgttggggagctttctgagaagagcaagttacaagagatctaccaggagttaacccaacttaaggccgcagtcgttggcgaattacctgagaaaagcaaactgcaagagatctatcaggaactgacccgactgaaggccgcagtaggcgagttgccagaaaagtctaagctgcaggaaatttatcaggaacttacaaggctgaaagcggctgtgggcgaattgccagagaagtcaaaactccaagaaatttaccaggaactgactgagctcaaagcagctgtcggagagctgccagaaaagtctaaattacaggaaatctatcaggaattgacgcaactcaaggccgctgtcggtgaactcccagaccaaagtaaacagcagcagatctatcaggaattgacagatctgaagactgctttcgagcgtctctgtagacattgtccaaaggactggaccttcttccaggggaactgttacttcatgtccaacagtcagagaaattggcatgactccgtgactgcatgtcaagaagtgagagcccagctggtcgttatcaaaactgccgaggaacaaaattttctgcagctacaaacatcgcgaagtaacagattcagctggatggggctgtcagacctgaaccaggagggtacctggcaatgggtagacggttctcctttgagtccatcatttcagcgctactggaacagcggcgagcccaacaacagtggaaatgaagactgtgcggagttctccggctctggatggaatgacaacagatgtgatgtagataactattggatatgtaaaaaaccggctgcttgttttcgcgacgaatag

SEQ ID NO: 219483 - DNA, 1200 bp, synthetic construct
  misc_feature 1..1200: note = Description of Artificial Sequence: Synthetic coding sequence
  source 1..1200: mol_type = other DNA
atgtctgactcgaaagagcccagagtacagcaattaggccttttagaggaggatcctacaacctctgggattagattgttccccagagacttccagtttcagcaaatccacggccataagtcaagtacgggatgcctcggccatggagccctcgtgctccagctgctcagttttatgctgttagcaggtgtgctagtggcgatattagtacaggtttccaaggtgccctcctcccttagccaggaacagtctgagcaggatgccatctaccagaacctcacccagttaaaagcagcagtgggcgagttgtcagagaaatctaaattgcaagaaatctatcaggagctgacacagcttaaggccgctgtaggagagctgccggagaaaagtaaattgcaagaaatatatcaggagctgactaggttaaaggctgccgtgggagagttgcctgagaaatccaagctacaggagatctatcaagaattgacacgactgaaggccgctgttggagagcttcctgaaaagtcgaaactgcaggagatctatcaagaattaacgcgtctgaaggctgcggtcggtgagctgccagagaaatccaagctgcaggagatataccaggagcttaccgagctgaaggcggcagtgggcgaactaccagagaagtctaaattgcaggagatttatcaggaactgacccagctgaaggctgctgttggggaactaccagaccaatcgaagcagcagcaaatctaccaggagctcactgatctaaagaccgctttcgagcggttgtgccggcactgccctaaggattggacatttttccagggtaactgttactttatgtctaatagccaaaggaactggcacgactccgttacagcatgtcaagaggtccgggcacaattggtcgtcatcaaaaccgctgaggaacaaaatttccttcaattacagacatcccggtctaatcggttttcgtggatgggtctgagtgacttgaatcaggagggcacctggcaatgggtcgacggttcgccactttctcccagcttccagagatattggaacagtggggagcccaacaactccggcaacgaggattgtgctgagttcagcgggtctgggtggaacgataacaggtgcgatgtggacaactactggatttgcaaaaaaccggctgcatgctttcgtgatgaatag

SEQ ID NO: 219484 - DNA, 1047 bp, synthetic construct
  misc_feature 1..1047: note = Description of Artificial Sequence: Synthetic coding sequence
  source 1..1047: mol_type = other DNA
atgtccgactctaaggagcctcgcgtccagcagctggggctcctgggatgcctcggccacggtgcattagtgctgcagttgctgagtttcatgctgttggccggagttttagtcgccattctcgtgcaggtttcaaaggtgccgtcaagcctttcacaggagcagagtgagcaggacgcaatttaccagaatcttacgcagttaaaagccgctgttggggaactgagcgagaaaagcaagttacaggagatatatcaggaactaactcagttaaaggccgcagtgggtgaactgccagaaaagtccaagcttcaagaaatttaccaggaactgactcgcctgaaggcagccgtcggggagctgccagaaaaatccaaactccaggagatatatcaggaactgaccagactgaaagccgctgtgggagaactgccagaaaaatcgaagctccaggaaatttaccaagaattgaccgagctgaaggccgcagtcggtgaattgccggagaagtcaaaattgcaggagatctatcaggagctgacgcaactgaaggctgcagtgggagaattgcctgatcaaagcaagcagcagcaaatttaccaggagctgaccgacctgaaaaccgccttcgagagactttgtcgtcactgtcccaaggattggacattcttccaagggaactgttacttcatgagcaatagtcagcgcaattggcatgactctgtaactgcctgccaggaagtccgcgcacagcttgtggtaattaagaccgctgaggagcagaatttcctccagttgcagacatcacggagcaatcggttctcatggatgggactgtccgacctgaatcaagagggtacctggcagtgggtcgatgggtcgcccttatctccaagttttcagcgctactggaacagtggagaacccaacaattctggcaacgaggattgcgccgagttttctggaagtggttggaacgacaatcgttgcgatgttgataattattggatttgtaagaaaccagcagcttgctttagggatgagtag

SEQ ID NO: 219485 - DNA, 975 bp, synthetic construct
  misc_feature 1..975: note = Description of Artificial Sequence: Synthetic coding sequence
  source 1..975: mol_type = other DNA
atgagtgactccaaggaaccaagggtgcagcagctgggcttactcgaggaagatcctacaacttcaggcatccgcctctttcccagggacttccaatttcagcaaatccacggccacaagagttccacgggatgcctaggacatggggctttggtccttcaactccttagttttatgcttctcgctggtgtcctcgttgctattctcgtccaggtttccaaagtcccctcatccctgtcccaggaacaatcggagcaggacgcgatatatcagaaccttacccagctaaaagccgctgtgggcgaactcagcgagaagtccaagctacaggagatttaccaagaactcactcagttgaaggctgctgtgggagagctcccagaaaagagtaagctgcaggaaatttaccaggaattgacgcggttgaaggccgctgtcggggaacttcctgaaaagagtaagctgcaggaaatctaccaggagttgacacggctcaaggccgctgtcggcgagctgcccgaaaaatctaagctacaggaaatttaccaggaacttactcggctgaaagccgctgtgggtgaattacctgaaaagagcaaactgcaggaaatttatcaagaactgactgaactgaaggctgcagttggtgaactccctgaaaagtctaaactgcaagaaatctaccaggagctgactcaactcaaagcggctgtcggcgaacttcccgaccagtccaagcagcagcagatttatcaggaactcaccgatttgaagaccgctttcgaaagactgtgtcgccactgtcctaaagattggacattcttccagggaaactgctacttcatgagtaacagtcagcggaattggcacgactctgtgaccgcctgtcaagaagttcgagcccaattagtcgtcattaaaacagcggaggaacaactccccgctgtgctggaacagtggaggacacaacagtag

SEQ ID NO: 219486 - DNA, 771 bp, synthetic construct
  misc_feature 1..771: note = Description of Artificial Sequence: Synthetic coding sequence
  source 1..771: mol_type = other DNA
atgtctgatagtaaggagccacgtgtgcagcagcttggtttactagtcagcaaggtgcctagcagtctgtctcaggagcagtctgaacaggacgccatttaccagaacctgacccagttgaaggccgctgtaggcgagctttctgagaaaagtaaactccaggagatctaccaagagctaacccagttgaaggccgctgtcggggaactgcctgagaaatcgaagctccaggagatctatcaggagttaactaggctgaaggccgcagtgggcgaactcccagaaaagagtaagctgcaggaaatctaccaagagctgacccggctgaaggctgctgttggcgagctcccggagaaatctaagttgcaggagatctaccaggagcttacacggctgaaagcagccgtcggagagcttcctgagaaaagtaagctgcaggaaatctaccaggagctcaccgaactgaaagctgcagtgggcgagctgcccgaaaagagcaagttacaggaaatctaccaagagctgacccagctcaaggcagctgttggggagctgcctgatcaatcaaaacagcaacagatctatcaagagctcacagatcttaaaactgcctttgaaagactgtgtcggcactgccccaaggattggactttctttcagggaaactgctactttatgagcaactctcagcggaactggcacgattccgtgacggcctgtcaggaggttagggcccagctagttgtgattaagacggctgaagaacagtag

SEQ ID NO: 219487 - DNA, 999 bp, synthetic construct
  misc_feature 1..999: note = Description of Artificial Sequence: Synthetic coding sequence
  source 1..999: mol_type = other DNA
atgtccgattccaaagaacctcgcgtgcagcagctgggattactcgaagaggacccaactacttccggaatcagactgttccctcgggatttccagttccaacagatccacggacacaagagcagcacagtgccgtttctcttgggccctgtgagcaaggtgccaagctccctgagccaggaacagagcgagcaggatgctatttaccagaatctcactcagctgaaggctgctgtcggtgagttatcagagaagagcaagttgcaggagatctaccaagaactgactcagttgaaagctgccgtcggggagctgccggagaaaagtaagctgcaggaaatctaccaggagttaacaaggctgaaagccgcagtaggcgagctccccgaaaaaagcaagcttcaggagatctaccaggaattgactcgcctcaaagccgctgtcggagagctgcctgaaaagtctaaactgcaggagatttatcaggagctaactgaattgaaagccgcagtgggagagctcccagagaagtccaagctccaagaaatataccaggagcttacccagttgaaagctgccgtggagaggctgtgtaggcactgcccgaaggactggacattcttccagggtaactgctactttatgagtaactctcagcggaactggcacgacagcgtaaccgcctgtcaggaggttcgtgcccaactggtggtgattaagaccgcggaagaacagaattttctgcagcttcagaccagcagatcgaacaggtttagctggatggggcttagtgacttgaaccaggaaggtacatggcagtgggtcgacggatccccgctgagtccctcattccaacgctactggaactccggcgagcccaataattcgggaaacgaggactgtgcagagttcagcggatccgggtggaacgacaatcgttgcgacgtggataactattggatctgtaaaaagccggctgcttgtttccgggacgaatag

SEQ ID NO: 219488 - DNA, 1164 bp, synthetic construct
  misc_feature 1..1164: note = Description of Artificial Sequence: Synthetic coding sequence
  source 1..1164: mol_type = other DNA
atgtccgacagcaaggaacctcgggttcagcagctggggctgctggaggaggatcctactaccaatttccagtttcagcagatccatggtcacaagtcttctaccggatgcttaggccacggagccttagtcctacagctcttgtcatttatgctcctcgccggagtcctcccacggctctcgaaagtccccagcagcctctcccaagaacagagcgagcaagacgctatctaccagaatctgacccagctgaaagccgctgttggggaattgtcagagaagtctaagctccaagagatataccaagagctcactcagctcaaggcagctgtcggcgaacttccagaaaaatccaagctccaggagatctaccaggaactgacaagactgaaggccgcagtcggggagctgccagaaaaatcaaagctgcaggaaatttatcaggagttaacacgtttgaaggcagccgtcggcgagctgcctgaaaaaagtaagttgcaggagatttaccaggagttgacccgacttaaggcagctgtgggagagctgccagagaagagtaaattacaggagatctaccaggaattgacagaactgaaagctgcggtgggtgagctcccagaaaaaagtaagcttcaggagatctatcaagaactcacccagttgaaggctgccgtgggagagctccccgaccaatcaaagcagcagcaaatataccaggaacttaccgacctgaagaccgcgtttgaaagactgtgcaggcactgtcctaaggactggaccttctttcaaggcaattgctactttatgagtaattcccaacgcaattggcacgacagtgtgaccgcatgtcaggaggtaagggcgcaattggtggtcatcaagactgccgaggagcagaactttctgcagcttcagacttcacggtcaaaccggtttagttggatgggacttagtgacttgaaccaggaaggtacgtggcagtgggtggatgggagtcctctgagccctagcttccagagatattggaacagcggagagcccaataactccggcaatgaggactgtgctgagttttctggctcgggatggaacgacaatcggtgtgatgtggacaactactggatctgcaagaagcccgcagcttgctttcgagatgaatag

SEQ ID NO: 219489 - DNA, 567 bp, synthetic construct
  misc_feature 1..567: note = Description of Artificial Sequence: Synthetic coding sequence
  source 1..567: mol_type = other DNA
atgaattggcacatgatcatttccggccttattgtagtggtactaaaagtggtaggtatgaccctttttttgctctatttcccccaaatctttaataagtcaaacgatggcttcactactactcgttcctatgggactgtgtcgcaaatctttggcagtagcagtcccagtcctaacgggttcattactactaggagttatggcacagtgtgtccaaaagattgggaattctaccaggccaggtgtttctttctttccacatccgagagcagctggaacgaaagtagagatttttgtaaagggaagggcagtacactggccatagtcaacacccctgaaaaactgaagtttctacaggacatcactgatgccgaaaagtatttcataggactcatttaccaccgtgaagagaaaagatggcgctggattaacaatagcgtctttaacggaaatgtgactaatcaaaaccagaatttcaactgtgccacgatcggactaaccaaaacttttgacgctgcctcttgtgacatctcttaccgcagaatttgcgagaagaacgccaaatag

SEQ ID NO: 219490 - DNA, 630 bp, synthetic construct
  misc_feature 1..630: note = Description of Artificial Sequence: Synthetic coding sequence
  source 1..630: mol_type = other DNA
atgatgcaagagcagcaacctcagtcaaccgagaaacgtggatggctttccttaaggctctggtcagtggccggaataagtattgctctgctgtccgcctgcttcattgtttcctgtgtagtcacgtaccattttacctacggagagaccggcaaacgactttctgagttgcactcataccattcatccctgacatgcttctccgaggggacaaaagttcccgcttggggatgctgccccgcttcttggaagagcttcggctcaagctgctattttatatcatccgaagagaaagtctggtcgaaatccgaacagaactgcgtggagatgggtgcccacttggtggtgtttaataccgaagccgagcagaacttcatcgttcagcagttgaacgaaagcttcagctactttctagggctgtcagatcctcaggggaataataactggcaatggatagataaaacaccatacgagaaaaatgtgagattttggcatttgggcgagcccaatcactccgccgagcagtgtgccagcatcgtcttctggaagccaacggggtggggttggaatgacgtcatctgcgaaacacggcgaaattccatttgtgagatgaacaagatctacctgtag

SEQ ID NO: 219491 - DNA, 432 bp, synthetic construct
  misc_feature 1..432: note = Description of Artificial Sequence: Synthetic coding sequence
  source 1..432: mol_type = other DNA
atggagtaccaccccgaccttgaaaatctggacgaggacgggtacacccaattgcactttgattctcagagcaacacccggatagccgtggtgtccgaaaagggctcatgcgcggcatcaccgccatggaggctaattgcagtaatactgggcattctctgtttggtgattctggttatagcagtcgtcttggggaccatgggggttctgtccagtccttgccctccaaattggatcatttacgaaaagagctgctatctgttctccatgtccttaaactcttgggatggcagcaaacgtcagtgctggcagctggggagcaacttgctgaagattgattctagcaacgagctgattagtgatcaaaatcactcctacccccgtaaacccatctccaaactttgcatggactccagagtcagccacctctag

SEQ ID NO: 219492 - DNA, 744 bp, synthetic construct
  misc_feature 1..744: note = Description of Artificial Sequence: Synthetic coding sequence
  source 1..744: mol_type = other DNA
atggaataccatcctgatctcgagaatctggacgaggatgggtatacccaactccacttcgactcccagagtaatactaggatcgctgtggtctccgaaaaagggagctgcgccgcttcccccccatggaggttgatagccgtgatcttgggaatcctgtgtctcgtgattctggtgatcgctgttgtactgggcaccatggctatttggaggagcaattcagggagcaataccctggagaacgggtatttcctcagtcgaaataaggagaatcattctcagcctacacagtccagcctcgaggacagcgttactccaacaaaggctgtaaaaacgacaggtgtgctgagtagtccatgccctccgaactggattatttatgagaaatcctgctatctcttcagtatgagtctaaatagttgggacggcagcaaaagacagtgctggcagcttggtagcaatctcttgaagatcgattctagcaacgaactgggattcatcgtgaagcaagtatcaagccaaccagacaatagtttttggatcggcttatctaggcctcaaactgaagtcccctggctctgggaagacggcagcacgttctcatccaacctttttcagattcgcaccactgcgacacaagagaacccttcacccaattgcgtatggatccatgtttcagtaatttatgatcagctctgcagcgttccatcctactctatttgcgagaagaagttttcaatgtag

SEQ ID NO: 219493 - DNA, 234 bp, synthetic construct
  misc_feature 1..234: note = Description of Artificial Sequence: Synthetic coding sequence
  source 1..234: mol_type = other DNA
atggagtatcacccagaccttgaaaatctggatgaggacggatacacgcagctccactttgactctcagtctaacacaaggatagcagtagtaagtgagaagggctcatgtgcagcttcccctccctggaggctgatcgccgtcatcttgggaatcctctgtctcgtgatcttagtgatcgccgttgtgttaggcacaatggcaggctttaaagctgtggagttcaagggatag

SEQ ID NO: 219494 - DNA, 606 bp, synthetic construct
  misc_feature 1..606: note = Description of Artificial Sequence: Synthetic coding sequence
  source 1..606: mol_type = other DNA
atggagtaccatcctgatttggaaaatctcgacgaggacgggtatacacaactacatttcgacagccagagcaacacccggattgcagttgtgtccgagaagggatcatgcgctgcttcgccaccttggagactgatagcagtcattctgggcatcttgtgtttagttattctggtaatcgctgtggtactgggcaccatgggggtattgtcgtccccttgcccacctaattggatcatatatgagaaatcttgctatctcttcagcatgtctctcaacagctgggacggtagcaagagacagtgctggcagctgggcagcaatttgctgaagatcgactcttcgaatgaactggggtttattgtcaaacaggtatcctcccagccggataacagcttctggatcggcttaagccggccacagacagaagtgccctggttgtgggaggacgggtccaccttctcgagtaatctcttccagattcgtactacggctacccaggaaaatccttccccgaactgcgtttggattcacgtatctgtgatctacgaccagctatgttccgttccaagctactccatttgcgagaagaaattctcaatgtag

SEQ ID NO: 219495 - DNA, 507 bp, synthetic construct
  misc_feature 1..507: note = Description of Artificial Sequence: Synthetic coding sequence
  source 1..507: mol_type = other DNA
atggaatatcatccagaccttgaaaacctcgatgaggacggctatactcaactgcacttcgattctcagtctaacacccggatcgccgttgtgagcgaaaagggggtgctatccagcccctgtcctccaaattggataatttacgagaaaagttgctacctgttctccatgtctctgaacagctgggatggaagtaagcgccagtgctggcagcttggctcaaatctgttgaagatcgatagcagtaatgagcttggctttatcgtgaagcaagtctcctctcagcccgataattccttttggattggtctctccagacctcagaccgaggtcccgtggttgtgggaagatgggtccacattttcgtcgaatctttttcagattaggacaacagctactcaggagaatccatctcccaattgcgtctggattcacgtgagcgtcatctatgatcagctatgttccgtaccaagttactccatctgtgaaaagaaattttcgatgtag

SEQ ID NO: 219496 - DNA, 351 bp, synthetic construct
  misc_feature 1..351: note = Description of Artificial Sequence: Synthetic coding sequence
  source 1..351: mol_type = other DNA
atggaataccatcccgacctggaaaatctggatgaagacgggtacactcagttgcattttgactctcagagcaatactagaattgccgtggtgtcagagaaagggagctgcgctgcgagcccaccctggcgcttgattgccgtaatcctcggtatactgtgcttagtaattctggtaatcgctgtggtactaggaaccatgggtacaggacagttcctgaaagatcttagcttcctgaataaccgaagaaagctgtttggggaccctattcaggaagcaactcattggcgcatggctacattctaccaggagatcaagcgtaccaccgtaaatcctcacaatcacctgtag

SEQ ID NO: 219497 - DNA, 744 bp, synthetic construct
  misc_feature 1..744: note = Description of Artificial Sequence: Synthetic coding sequence
  source 1..744: mol_type = other DNA
atggaataccacccggacctcgaaaacctcgatgaggacggttacacgcaactgcacttcgactcacagtcgaacacacgaatcgccgtggtgtccgaaaagggaagctgcgctgcatcacctccttggcggctcatcgcagtgatcctcggaatactctgcctggtgattctggtgatcgccgtggtgctgggcactatggctatatggcgaagcaatagtgggtctaacactctggagaatgggtatttcctgtctcgcaataaggagaaccacagccaaccgacccaatcatctctggaagactccgtgactccaacaaaggcagtgaagactaccggggtgctatctagtccatgcccccctaattggatcatctatgaaaagtcctgctatttgttctcaatgtccctcaactcctgggacggctccaagcggcagtgttggcagcttggctccaatcttctgaaaatagacagctcaaacgagctggggttcattgtaaaacaggtttcgagccagccagacaactccttttggataggcctatcacgcccacagacggaagtaccatggctgtgggaagacggaagcacgttcagttccaatctctttcagatccggaccacagccacccaagaaaacccctcacccaactgtgtgtggatacatgtgtcagtgatatacgaccagctgtgttcggttcccagctattcaatctgtgagaagaagttctccatgtag

SEQ ID NO: 219498 - DNA, 570 bp, synthetic construct
  misc_feature 1..570: note = Description of Artificial Sequence: Synthetic coding sequence
  source 1..570: mol_type = other DNA
atggaatatcatcccgacctggagaatctggatgaggatggatacacacaactgcactttgattctcagagtaacacccgcattgcggttgtgagtgagaagggaagctgtgccgcttctcccccatggcgacttatcgcagtcatcttgggcatcctttgtctagtgattctggtcattgccgtggtcctgggcactatggctatctggagaagcaatagcggcagcaatacgctcgagaatgggtacttcctcagccggaataaagagaaccactcacagccaacacagtcctcattggaagactctgtaaccccgaccaaggctgttaagactaccggagtgctgagtagtccatgtcccccaaattggatcatctacgaaaaatcttgctatctgttctctatgtcactcaattcctgggatggatctaaacgtcagtgctggcaactcggatctaacctgttaaagatagacagcagcaacgagcttatcagcgaccagaaccactcttatccccgtaaaccaatctcaaagctctgtatggactcgcgcgtctcccatctctag

SEQ ID NO: 219499 - DNA, 10281 bp, synthetic construct
  misc_feature 1..10281: note = Description of Artificial Sequence: Synthetic coding sequence
  source 1..10281: mol_type = other DNA
gtgctacctagccacacctgcggaaacccaggcgaaatcctgaagggagtcctgcacggaaccagatttaatattggggataagattcggtacagttgtctgccgggatacattctggagggtcatgctatactgacgtgcatcgtcagccccggtaacggggcttcatgggatttccccgctcccttttgccgcgcagagggcgcatgtggagggacattgcggggaaccagctctagcatttctagtccacatttcccctcagagtacgagaacaacgcagactgtacatggacaatcctagctgaaccaggtgataccattgcgttggttttcaccgacttccaactggaggaagggtacgactttcttgagatttccggcaccgaggctcccagtatttggctgacaggaatgaacttaccgagtccagtgatttcatccaaaaattggctgaggctacactttacaagcgattctaaccaccggcgtaaggggttcaacgcgcaatttcaggtcaagaaggccatcgagctaaagagtagaggggtcaaaatgctgccgtcaaaggacggtagccacaaaaattccgttctgtcacagggtggcgttgccctcgttagcgatatgtgtcccgatcccggaatccctgaaaacggccgtagggcgggatcagacttctcacgagtgggagctaatgtgcagttctcctgcgaggacaactacgtcctacaagggagtaaatcgattacctgtcagcgtgtcaccgaaactctcgcagcctggagcgaccacaggcccatctgtagagcgcgtacatgtggatcaaacttgcgcggtccatcaggagtcatcacatcacctaactaccccgtacaatacgaagacaacgcccattgtgtctgggttataacaactaccgacccagacaaggtgataaaactagccttcgaggaattcgaactggagcggggatatgatactcttacggttggagatgctggcaaggtaggggacactcgttcagtgctctacgtgctgaccggtagcagcgtgccagatcttattgtctctatgagcaaccagatgtggctgcacttacagagcgatgatagcattggatctcccggttttaaagccgtatatcaggagattgagaaaggtggctgcggagaccctggcatcccagcgtatgggaagagaacaggttcatcttttctccatggtgacaccctcacatttgagtgccccgctgccttcgaacttgttggagaacgggtcataacgtgccagcagaacaatcaatggtctggaaacaagccttcttgcgtgttctcctgcttttttaattttacagccagctctggcataattctctctccgaattacccagaggagtatggaaacaacatgaattgcgtctggcttattatctctgagcccggatctcgcatacacctgatctttaatgatttcgatgtagaaccacagtttgactttttagcagtgaaagatgatggcatctccgatatcaccgtgctggggacattctcagggaacgaggtcccatcccaactcgcgtcatctgggcacatagtccgcctcgagttccagagcgaccactcaactactgggcgtgggttcaacattacttatactacattcggtcagaacgagtgccacgatccagggatcccgattaatgggaggaggtttggtgatcgcttcctcctggggtcttccgtcagcttccattgcgacgatggcttcgtgaagacacagggctccgagagtatcacttgcatcctgcaagacggtaacgtggtgtggagttctaccgtacctagatgcgaagccccatgtggagggcatttgaccgccagcagcggcgtcattctccctccgggatggccaggttactataaggatagcctccactgtgagtggatcattgaagcaaagccaggacactcaatcaagattaccttcgatcgatttcagaccgaggtgaattacgatacccttgaagtgagagacgggccagccagctcttcgccgctgattggcgaatatcatgggacgcaggctcctcagtttctgatctccacagggaactttatgtacctacttttcaccactgataacagcagaagctccatcggcttcctgatccactatgaatctgtcaccctggaatctgactcatgcctggatcccggtatacctgtgaatggacatagacatgggggagactttggtattcgctctacagtcactttctcgtgcgatcccggatatacccttagcgacgacgagcctcttgtgtgcgaacgcaaccaccagtggaatcacgccctcccttcatgcgatgcgctttgtggaggttacatccagggcaagtccggcaccgtgttgtcacctggattccctgacttttaccccaactcacttaactgcacatggactatcgaggtgtcccacggtaaaggagtccagatgatctttcacacatttcatctggaaagttcccatgattatctgttgatcaccgaagacggaagcttctcagaacccgtggctagactcaccgggtccgtgctgcctcatacaattaaggctggcctgttcggcaattttacagctcagcttagattcatctctgacttcagtatctcctatgagggattcaacattaccttttctgagtacgacctggaaccttgtgacgacccgggagtgccagcattctctcgaaggatcggcttccactttggcgtgggcgattctctcacttttagctgttttctgggataccgacttgagggcgcaaccaaactcacttgtctcggtggtggcaggcgtgtatggtctgccccactccctcgatgcgtcgcagagtgcggggcttctgtcaaaggaaacgagggaacactgcttagccctaattttcctagtaattacgataacaaccacgaatgcatctacaagatagaaactgaagccggtaaaggaatccatctaagaacaaggagtttccagctatttgaaggggacaccctcaaggtgtacgacggcaaagattcttccagtcgcccactgggaacatttacaaaaaacgagctgctggggctgattttaaatagcaccagcaaccatttatggctggagtttaacaccaacggatccgatacggatcagggcttccagttaacttatacctcatttgatttggtcaaatgtgaggaccccggtataccaaattacgggtatcgcattcgcgatgaaggtcacttcactgacacagtagtgttgtatagctgtaatccagggtacgccatgcatggttctaacaccttaacgtgtctgagcggggatcggcgagtgtgggacaagcctctgccttcctgtatcgccgaatgcgggggtcagatccatgccgcaaccagcggacgcatactgagtcctggctaccccgctccatacgacaacaacttgcactgcacttggatcattgaggctgacccagggaaaacaatcagcctgcacttcatcgtcttcgacactgaaatggcacacgatattttaaaagtgtgggatggaccagtggactctgacatcctgctcaaagagtggtcagggagtgccctcccagaggatatccattcaacattcaattccctaactctgcagttcgactctgatttttttatcagcaaatccgggttctccatccagttctcaactagcatcgccgctacttgtaatgatcccggaatgccccagaatggcaccaggtacggggactccagggaggccggagatactgtcacatttcagtgtgatccaggctatcagttgcaaggccaggctaaaattacctgcgtgcagctgaataaccggttcttctggcagcctgaccctcccacgtgcatcgcagcctgtggagggaatctgaccggtcctgctggcgtaatactttcccccaattacccccagccatatcctcctggaaaagaatgcgattggagagtaaaggtgaatccagactttgttatagccctgatttttaaaagcttcaacatggagccaagttacgactttttgcatatatatgaaggtgaggactcgaattcccctctcattgggtcctatcagggcagccaggctcctgaacggatcgaaagtagcggcaactccctgttcctggcctttcgcagcgacgcctccgtgggcctgtcagggttcgccatcgaattcaaagagaagcctcgcgaggcttgtttcgaccccggtaacatcatgaatgggacgcgagtggggacagatttcaagctaggtagtaccatcacctatcagtgtgactccggctacaaaatcttagatcccagtagtataacatgtgtcatcggcgcagacggcaagccgagctgggatcaagtgttgccttcatgcaatgcaccttgtggaggacagtacacaggcagcgaaggcgtggtgctgagccctaactacccgcacaactacaccgcaggccaaatttgcctgtatagtatcacagtgccaaaagagtttgtggtgttcggccaattcgcctactttcaaactgccttaaacgatttggctgagctattcgatgggacgcatgctcaggcaagactgctgagctcgctatccgggtctcacagtggggagactctgccactggccactagcaaccagatcctgttgaggttctcagctaagtccggggcatctgctagggggtttcattttgtgtaccaagcggtgcctcggacaagcgacacacagtgctcctccgtgccagaaccccgatacggtcggaggataggctctgagttttctgccggatccattgtcaggttcgagtgcaatcccggatatcttcttcagggttccaccgccctgcattgccaatctgtgccaaatgctctagctcagtggaacgatacaattccctcgtgcgtggtgccctgctcaggtaactttactcaaagacgtggcacgattctttctcccggatatccagaaccctatgggaacaatctgaactgtatttggaagataatagtcacggaaggatctggtatccaagacccaagtgaccagttctgtcatggggcagagctggggctcgagattcatgatgggggagatgtgaccgccccacggctggggtccttttcaggcacaactgtgcccgctctgctaaattccacctccaaccagctttacctccactttcagagcgacatctccgtcgctgcagcgggattccatctggaatacaagacagtggggttagccgcttgtcaggagcccgcattaccctctaatagcattaaaataggggacaggtacatggtgaacgatgtgctgagcttccagtgcgagccgggatacaccttacagggacgcagtcatatttcatgcatgcccggaacagtcaggagatggaattatccctctccactgtgcatagcgacctgcggcggtaccctgtctacattgggaggcgtgatactctccccagggtttccaggcagctatcccaataacctggattgtacctggcgcataagccttcccatagggtacggcgctcacatccagtttctaaatttcagtaccgaagcaaatcacgacttcctggagatccaaaacggtccctaccacacatcacctatgatcggccagttctccggaacagacctgccagcagccttgctgtccaccacccacgaaacactgatccatttttactcggatcactctcagaaccgacagggattcaaactggcctatcaggcctatgaactgcagaattgtcccgatccaccccctttccagaatggttacatgataaacagtgactattccgtcgggcagtcagtctcattcgagtgttatcccggatacattctgattggccacccagttctgacatgtcagcacggcattaaccggaattggaattatccctttccgcgatgcgacgcaccttgtggctacaatgtgacctcccagaacggaaccatctactcccctgggtttcctgacgaatatcccatactgaaggattgcatttggttaattacggttcctccaggtcatggcgtttatatcaacttcacactcctgcagaccgaggcggtaaacgactacattgccgtatgggacggtcctgaccagaactctcctcagctgggggtcttttcgggaaatacggctctggaaacagcatactctagtacgaatcaggtgctcctcaagtttcacagcgacttctcaaatggcggattcttcgttctgaattttcatgcgtttcagttgaaaaagtgccaacccccaccagcggtgccacaggctgaaatgctcacagaggatgatgattttgaaatcggagatttcgtgaagtaccagtgccaccccggatacactctggtgggaacggatatactgacatgcaagctgtccagccaactccagttcgaaggctcattgcccacttgcgaggcccagtgcccagcaaatgaggtgcggactggcagctccggggtcatcttgtctccaggatacccgggtaactactttaacagtcagacatgttcttggtccatcaaagtcgagcccaactataatattaccatcttcgtggatacatttcaatccgagaaacagtttgatgcacttgaggtttttgacggttcaagcggtcaaagcccacttttagtggtgctctcagggaatcatacggaacagtccaacttcactagccggtcaaatcagctttatctgcgctggtctaccgatcatgcaaccagcaaaaaagggtttaaaatccgctatgccgctccatattgttccctcacccaccccctcaaaaacggcggaatcttgaacaggacagctggagctgttggctcaaaagtgcattacttctgcaagccaggttatagaatggtgggacactctaatgctacttgccgccgaaacccattaggcatgtaccaatgggactctttgacgcccctgtgtcaagctgtgagctgcggtatcccggagagcccaggaaatggatccttcacaggcaatgaattcacccttgatagcaaggtggtatatgagtgccacgagggcttcaaactggaaagttcacagcaggccactgccgtgtgccaggaagacggcttatggagcaataagggaaaaccacctacgtgcaagccagtggcatgcccaagtatcgaagcgcagctctcggagcacgtgatttggagattggtatccggtagcctgaacgaatacggcgcacaggtgttactgtcctgctccccaggttattacctcgagggatggcggctgcttagatgtcaggccaacggcacatggaatatcggagacgagcggccttcttgccgggtgatcagctgtggaagtttatcattccccccaaatgggaataaaattggcacgttgaccgtgtacggggcaacagccatctttacctgtaatactggatacaccttagtcggaagccacgtgcgagagtgcttggcgaacggactgtggagcgggagtgagactcgctgcctggctggtcattgcgggagcccggaccctatagttaatggccacatttctggcgacggcttctcctatagggacacagtggtataccagtgtaatcctggatttcgactggtcgggaccagtgtccggatttgtttacaagaccacaagtggagcggtcagacccccgtttgtgtgcctattacgtgtggccatccaggcaatcccgcacacggcttcacaaatgggtcagagtttaacctgaatgatgtggtgaactttacctgtaacactggatacttgcttcagggcgtcagtagagcacagtgtcgttctaacgggcaatggtctagtccccttcccacttgcagagtggtgaactgcagtgatcctggattcgtcgagaacgccatccggcacggccagcagaacttccccgagtcttttgagtacggcatgagcatcctgtaccactgtaagaaaggattctatctgctggggagcagcgcgctgacatgcatggccaacggactctgggacagaagcctgcccaagtgtctagccatttcctgcgggcacccaggagtgcccgctaacgcggtgctgaccggcgaactcttcacttacggggctgttgtgcactatagttgccggggaagcgaaagtctgataggaaacgacacacgtgtatgccaggaggatagtcactggtccggagcgctccctcactgcacaggcaacaatccagggttttgcggggaccctggtacaccagcgcatggtagccgtcttggcgacgatttcaaaaccaaaagcctgctgaggttcagctgcgagatgggccaccagttacgtggatcccccgagcggacatgcctgctcaatggatcctggagtggcctgcagccagtgtgcgaagctgtttcttgtggaaatccaggcacccctactaatgggatgatagtttccagcgacggcatcctgttctcttcctccgtgatttacgcctgttgggaagggtacaaaacaagcgggctgatgaccagacattgtacggcaaacggaacctggacgggcacagccccagactgtactattatctcttgtggagaccccggtaccctagccaatggtatacagttcgggacggactttaccttcaataaaacagtatcctaccagtgcaatcctggttacgtgatggaggctgtgacctctgcgacgatccgctgtaccaaagacgggcgatggaacccctccaagccggtgtgtaaggccgtgctttgccctcagccacctccagtccagaacggaacagtggagggcagtgattttagatggggaagctcaatctcttactcctgcatggatggataccagcttagccacagtgccatcttgagttgcgagggcagaggggtctggaaaggagagatccctcaatgtctccccgtattttgcggggatcccggaattcctgccgagggtaggctaagcggcaagtccttcacctataagtctgaagtgttcttccaatgtaagtcccccttcatactggtggggtcatcccgcagggtgtgccaggccgatggaacctggagcggaatccagccgacgtgtattgaccccgcacacaacacatgccctgatccgggaaccccccatttcgggatacagaatagttcccgcggttacgaggtgggctccaccgtgtttttcaggtgcaggaagggatatcatatccagggttcaaccacgcggacctgtttggctaatctgacatggtccggaatccagaccgaatgcatcccccacgcatgtcgccagccggaaacacctgcacatgcagatgtgagagcaatcgacttacccactttcggttacaccctggtttacacctgccatcccggatttttccttgcaggcggttcggagcaccgaacttgtaaggccgatatgaagtggactggcaagtcacccgtttgtaaatccaaaggggtccgcgaggtgaacgagaccgtgacaaagactcccgtgccctcagacgtgttttttgtcaactctctgtggaagggatactatgagtacctgggtaagcgacagcctgctacactgacagttgactggttcaacgcgacttcatccaaggtcaatgcgacattttccgaagcttcgccggtggaattgaagctgaccggaatttacaagaaggaggaagcacatctgcttctgaaagcatttcaaatcaaggggcaggccgacatttttgtttcaaaattcgagaatgacaattggggcttagacggatacgtttcatccggattggagcggggtggtttcaccttccagggggacattcacggcaaagactttggtaaattcaaattggaacggcaggatcctctaaatcctgatcaggattcctcctctcattaccatggaacatcgagcgggtctgtggctgcagctatactggtaccctttttcgctctcatcttgtcgggctttgccttttacctgtataagcacagaacacggcctaaggtccaatataacggctatgccggtcatgagaactctaatggccaggcaagctttgagaacccaatgtatgataccaacctcaagccgacagaagcaaaagcagtgcggttcgacacaaccctgaatacagtttgcactgttgtctag

SEQ ID NO: 219500 - DNA, 10167 bp, synthetic construct
  misc_feature 1..10167: note = Description of Artificial Sequence: Synthetic coding sequence
  source 1..10167: mol_type = other DNA
atgacagcatggcggaggtttcagtctctgctgctgctactgggccttcttgtgctgtgtgcgaggctgctaactgctgccaagggtcagaactgcggcggacttgtgcagggccctaatggtactattgagtccccaggttttccccatggatatcccaactacgctaactgcacatggataatcatcactggggagaggaaccgcatccaactctccttccatacatttgcgttagaggaagattttgatattctcagcgtttacgacggccagccacaacagggaaatttgaaagtcaggctatccgggtttcagcttccctccagcattgtgagtaccggctccatcctgacactgtggttcacaacggactttgctgtctccgcccagggctttaaggccctgtacgaggtgctcccttcccatacttgcggaaatccaggagaaatactgaaaggagtgttgcacggtacacgcttcaacatcggagataaaatccgatatagttgcttgcctggttatattctggagggccatgcaatcctgacatgcattgtgagtcccggaaatggggcttcttgggacttccctgcgccattctgccgtgccgaaggcgcatgcgggggtactcttagagggacgtcgagctctatatcgtcacctcactttccgtccgaatacgaaaacaacgccgactgtacttggacaatcctggctgagcccggtgacacgatcgccctggtgttcactgactttcagttggaagagggttatgattttctcgagatctccggaacagaggccccatccatttggttaactgggatgaatctcccctcccctgtaatcagcagcaaaaattggcttcgtttgcacttcaccagcgactcaaatcacagaaggaaagggtttaatgcccaatttcaggtgaagaaagccatcgagttgaaaagccgaggtgttaagatgcttccaagtaaggatggatcccacaagaattccgttctgagccaggggggagtggccctcgtgagtgatatgtgtcctgacccaggaatccccgagaacggtcggcgagccggttccgatttttcaagggtgggtgctaacgtccaattcagctgcgaagataattacgttcttcagggatcaaaaagcattacttgtcagcgagtcactgagactttggccgcatggtcagaccacaggcctatttgccgagcccgtacatgcggatctaacctgcgcggacccagtggcgtgatcacctcacctaactaccctgttcagtacgaggataacgctcattgcgtgtgggttatcactacaacggaccccgataaagttatcaaactggcattcgaggaattcgagctcgagcgcggttacgatacacttacagtgggcgacgcgggtaaggtaggagatactcgcagcgtactctacgtactgacgggaagctccgtcccggacctcatagtgtccatgagtaatcagatgtggctgcatcttcagagcgacgacagtataggcagtcccggatttaaagccgtgtaccaggagattgagaaggggggttgcggagatccgggaattccggcttacggaaaacgtaccggcagtagttttttgcatggtgatacactgaccttcgagtgtcccgctgcctttgagctcgtaggggagagagttatcacctgtcagcagaacaatcagtggtctggaaataaaccctcatgtgtcttcagttgtttttttaattttaccgcctcgtcgggaatcattttgtctcccaattatcctgaggaatacggtaataacatgaactgcgtatggctgattataagtgagcccggatccagaatccatttgatcttcaatgattttgacgttgaaccacagtttgatttcctcgccgtcaaggatgacggcatttctgacatcactgtcctggggaccttttctggaaatgaggtgccatcccagctggcatcttctggacatattgtgaggctagagttccagtctgaccacagcactacaggacgaggatttaatattacatataccaccttcggacaaaacgagtgccatgaccccggtattccaattaacgggcgacgctttggagaccgatttttgctaggctctagcgtgtccttccactgcgatgacggcttcgttaagacacagggctcggaaagcattacatgcatactacaggacgggaatgttgtgtggagctctactgtcccccgttgtgaagccccatgcgggggtcacttaactgccagtagcggtgttatccttcccccaggatggccagggtactataaagattcattgcactgcgagtggataatcgaagcaaagcccggacactccattaagattaccttcgatcggttccagactgaagtcaactacgataccctggaggtgagggacggcccagcatcttcctcaccactcattggagagtaccacgggactcaagctccccagttcctcatcagtacagggaatttcatgtatctgctgtttactaccgataactcccgctcaagcataggatttcttattcactatgaaagtgtgactctcgaatctgacagctgcttagaccccggtatcccggtgaatggacacaggcatgggggagactttggtattcgcagtaccgttacattttcatgtgatcctggctacacactgagtgacgatgagcctttggtctgtgagcgcaaccatcaatggaatcacgccctgccatcctgcgacgctctctgtggcggatatatacagggcaagtccggtactgtgttatcacccggattcccagacttctatccaaactcactgaactgcacatggactattgaggtttcacacggtaaaggggttcagatgatcttccacaccttccacctcgaaagctcccatgactacttgttgataacagaagatggttctttttctgagcccgttgccagactcaccgggtcagtcctcccacatacgataaaggcagggctgttcggcaacttcacagcccagctgcggttcatttcagattttagcattagctacgagggcttcaacattacatttagcgagtacgatttggagccgtgtgatgaccccggagtgccggctttcagcagaagaataggattccattttggcgtgggagacagcctcacattttcctgttttctcggctaccgacttgaaggcgcaacaaaactaacctgtctcggtggaggaaggagagtctggtcagcacctctgccacggtgcgttgccgagtgtggggcttctgtgaagggcaacgagggaactcttcttagcccgaatttcccaagtaactacgataacaaccacgagtgtatttataagatcgagacggaggctggaaaaggaattcacctcagaacaagatcattccagctcttcgagggagacactttaaaggtgtacgacggtaaggactcctccagccggcctctcgggacttttactaagaacgagctgctaggtctgatcctgaactctacttcaaaccacctgtggctggagttcaacacaaatggatccgacacggatcagggattccaactgacttacacatcattcgacctcgtaaagtgcgaagacccaggaattccgaactacggatatcggatccgggatgaagggcactttaccgacacagtggtgctctactcatgtaaccctggttacgccatgcatggcagcaacactctgacatgcctaagtggcgatcgcagagtctgggacaaaccgcttcccagttgtatcgcagagtgcggtgggcaaatccacgctgctacttccggacggattctcagtcccggatatcccgcaccctacgacaataatctgcactgcacatggattattgaagcagacccaggcaagactatatcactgcacttcatcgtgttcgataccgaaatggcgcatgacatcctgaaagtatgggacgggcctgtggactcagatatcttgcttaaagaatggtcgggctcggccctccctgaagatatccattccactttcaatagcctgacactgcagttcgattccgacttctttatctcgaagagcggtttctctatccaattctccacatccatcgcagccacctgtaacgatccaggcatgccccagaacggaacccgttacggcgattcccgcgaagctggcgacacggtgacatttcagtgtgaccccggttaccaactgcagggtcaggctaaaataacttgcgtacagctgaataacagattcttttggcagccggatccgccaacatgtattgccgcatgtgggggaaacctgaccggacctgcgggtgttatcctctcccccaattatcctcagccatatcccccaggcaaagaatgtgactggagggtgaaggtgaacccagactttgtcatcgcactgatctttaagtcttttaatatggaaccatcgtacgactttcttcacatttacgagggagaggattctaacagcccattgatcggatcctaccaggggagtcaggcgcctgagcggattgagagtagcggaaactccctgtttctggcattccggtccgatgcttccgtggggttatcagggttcgccattgagttcaaggaaaagccacgagaagcctgcttcgaccccggtaacatcatgaacgggaccagagtcggcacagacttcaagctggggtctacaataacatatcagtgtgatagcggttataaaatcttggacccaagcagcattacttgtgtgattggagcagacgggaagcctagctgggatcaagtacttccttcatgcaacgctccctgtggaggacagtacaccgggtctgaaggtgtggtgctgagtcctaattatccccacaattacacagccggtcaaatttgcctgtattctattactgtcccaaaggaattcgtggtcttcggccaattcgcttactttcagacagcgctcaatgatcttgcagagctgtttgacgggacccatgcacaggcccgactgctgtcatcactgtcagggtcccattcaggagagaccttacctttggccacaagcaatcagatcctcttacggttttccgcgaaatccggcgctagcgccaggggatttcattttgtgtatcaggcggttccaaggacatctgatacacagtgctccagcgtgccggaacctagatacggcaggcgcatcgggtctgaatttagtgcgggatcaatcgtgaggttcgaatgcaaccctggttacctgttgcagggctccacagctcttcattgtcagtccgtccctaacgctcttgcccagtggaatgataccattccttcatgcgtggtaccatgctctggtaacttcacgcagagacggggtactatactgagtcccggatatccagagccttatggcaacaatctcaattgcatttggaaaattatcgtgacggagggctcaggtatacagatccaagtcatttccttcgcaactgagcagaactgggactcgctggaaattcacgacggcggagacgtcaccgctccacgattggggtcgtttagcggaaccacagtgcccgctctattgaactctacaagcaatcagttatatctacactttcagagcgatattagcgtggccgcagccggattccatctggagtataagacggtgggattggccgcttgtcaggagccagcactcccatctaacagtataaagataggggaccggtacatggttaatgacgtgttgtcattccagtgcgaacccggatatactctgcagggacgctcccacattagctgtatgcctggcaccgtccggcgttggaactacccatctccactgtgcatcgcaacatgtggtgggactctctctacactggggggtgtcatccttagccctggcttccctgggtcgtacccaaacaatctggattgtacatggcgcatttcacttccaatcggctatggggcacatatccagttcctgaatttttcaaccgaagccaatcatgacttccttgagattcagaatggtccttatcatacatctcctatgattggccagtttagcggaacggatctgccagccgctctgttaagtacaacacatgagacactgatccatttttactccgaccattcccaaaaccggcagggtttcaagctggcgtatcaagcctatgagttacagaactgccctgaccccccacccttccagaatggatacatgattaattccgactacagcgtggggcagagcgttagcttcgaatgttacccaggttatatcctgatcggccatcccgtgctgacttgtcagcacggtattaacagaaactggaattatccattccctcgttgcgacgccccatgcgggtacaatgtgacgagtcagaacggaactatatattctccagggttcccagatgaatatccaatactgaaagattgtatttggttgatcactgtacctccagggcacggggtctatattaatttcacactgttgcagacagaagcagtcaatgactacattgctgtgtgggatggcccagatcaaaattcgccacaattgggcgtgttcagtgggaatacggcgttagaaacagcatattcttccacgaatcaagtactgctgaagtttcacagcgatttttccaatgggggattcttcgtgctgaatttccatgcttttcaactgaagaagtgccagcctccaccagccgtgcctcaagccgaaatgctcacagaggacgatgatttcgaaataggcgattttgttaaataccagtgtcatcctgggtacacgctggttggaactgatattctgacttgtaagctgagctcacaactgcaatttgagggatctctgccaacttgcgaggcccaatgcccggcaaacgaagttaggactgggtcctctggagttatcctttctcctgggtaccctggcaattactttaactcccaaacttgttcctggtcaatcaaggtggaacctaactataatattacaatttttgtggacacgttccagtctgagaagcaattcgacgccctggaggtcttcgatgggtcaagtggacagagccccctactggtcgtcctgtcgggaaaccataccgaacagtctaacttcacctctcgcagcaaccaattatacctgaggtggagcactgatcacgctactagcaaaaaggggttcaagatccgctacgccgcaccctattgcagtctgacccaccccctgaagaacggagggatactaaaccggacagccggagctgtgggctcaaaggtacactacttttgcaaacccggatatcggatggtgggccattctaacgcaacttgtaggagaaatccgctgggtatgtaccaatgggacagcctaacacctctttgccaggctgtcagttgcggtatccctgagtcgcctggcaacggatcattcacgggtaacgaatttactctggattcaaaagtagtttacgaatgtcatgagggatttaaactcgagtcgtctcagcaagcgacagctgtatgccaggaggatggtctctggagtaataaggggaagccacctacatgcaaaccggtggcctgtcccagcatcgaggctcagctgtccgaacacgtcatatggcggctggtcagtggcagtctgaatgagtatggcgctcaggtcctgctcagttgctctcccggttactatctcgagggttggcgtctcctgaggtgccaagcaaatggcacgtggaatattggtgatgagcgtccatcatgcagagctgggcactgtggatcaccagaccccatcgtgaatggacatatatccggggatgggttcagctacagggacactgtggtttaccagtgcaaccctggatttcggttggtgggcacctccgttagaatctgcctccaggatcataaatggagcggtcaaacacctgtgtgcgtgcccatcacctgtgggcatcctggtaaccccgcacacggattcactaacggttccgaattcaacctcaatgacgtggtgaactttacttgtaacactggatatctcctgcagggcgtgagccgggctcagtgccggtcgaacggacagtggagtagccctttacctacatgtcgagtggtgaactgctctgatccaggcttcgtcgaaaatgcgattaggcacggtcagcaaaactttcctgagtccttcgagtacggaatgagcatcctgtatcactgtaagaaggggttctatcttttgggaagttctgccctcacgtgcatggcaaacggactgtgggacagatccttacctaagtgtctggctatcagctgcggccatcccggagtacccgctaacgccgtgctcactggagaactgttcacttatggagcagtcgtccactactcctgcaggggatcagagtctctcataggaaacgacactcgcgtctgccaagaggatagccactggtcaggcgctttgccccactgcaccggaaacaatcccggattttgtggagatcctggaacgcctgctcatggctcccggttgggggatgacttcaagaccaaatccctactccgattcagctgtgagatggggcaccagctgcgtgggagcccagaacgcacatgcctgctcaacggcagctggagtggcctccaacccgtctgcgaggcggtgctttgccctcaaccgccacccgtccaaaacgggaccgtggagggttccgatttcagatgggggtcatctattagttatagttgtatggacggctatcagctgtcccacagtgcaatcctctcgtgtgagggccgaggagtgtggaagggcgagatcccacagtgtcttcctgtgttctgcggagatccgggaatcccagcagaaggccgactctctggtaagagcttcacctataagtcagaagtattttttcagtgtaagtcccctttcatacttgtcggctcctcacgacgcgtgtgccaggccgatggaacttggtccggcatccagcctacttgcatagacccagcgcacaacacctgccccgacccaggaacgccgcactttgggattcagaatagttcacggggttacgaagtgggctctaccgtgttctttaggtgccgcaaaggttaccatatccaaggcagcactactagaacttgtctggctaatctgacgtggtccggaatccagacagaatgcatcccacacgcctgccggcagcctgagaccccggctcatgccgacgtgagagcaatcgacttgcctacgttcggatacacactggtttacacctgtcaccctggcttctttctggccggtggctcagagcataggacatgcaaggctgatatgaaatggacgggcaagtctcccgtctgcaagtccaagggcgtgagagaagtaaacgagacggtgaccaaaaccccagtaccttcagacgtgtttttcgtgaacagtctctggaaaggttactatgagtacctcggcaagcgccagcccgctaccctgacggtcgattggtttaatgccacaagttccaaagtgaacgccacgtttagcgaggcaagccccgtggaattgaagcttactggaatctacaagaaggaggaggcccaccttcttcttaaggcattccagatcaagggccaggccgacatttttgtctctaaattcgagaatgacaactggggcctggatggttatgtaagctctggcctggaacggggtgggttcacttttcaaggcgacatccatggaaaagattttggtaaatttaaactggagcgccaggaccccttgaatccagaccaagactcctcatcacactatcacgggacctctagcggttctgttgccgcagcaatcctggttccattcttcgctttaatcctctctgggttcgctttctatctctacaagcaccggacacgacccaaagtgcagtacaatgggtatgcgggtcacgaaaattcaaacggccaggcatcgtttgagaatccaatgtatgataccaatctcaaaccgacagaggccaaggccgtaaggtttgacacaactctgaacaccgtgtgcaccgtggtgtaa

SEQ ID NO: 219501 - DNA, 10698 bp, synthetic construct
  misc_feature 1..10698: note = Description of Artificial Sequence: Synthetic coding sequence
  source 1..10698: mol_type = other DNA
atgacggcgtggaggaggtttcagtccctcctgcttctcctgggcctcctagtgttgtgtgccaggctgctgactgccgctaaaggccagaattgtggtggattggtgcagggccctaacggcactatagagtccccgggatttccacacggctaccccaactacgctaattgcacttggattatcattacaggcgaaagaaataggatccaactgtccttccacacatttgcgctagaggaggactttgatatactgagtgtctacgatggtcagccccagcagggaaacttaaaagtgaggctgtccggcttccaactcccctcctcgatcgtgtccactggtagtattttaacgctgtggttcactactgacttcgctgtgagcgcccaggggtttaaagctctctacgaagtgctgccttcacatacctgcggcaaccctggggagatccttaagggagtgttgcacggcacccgttttaatattggagacaaaattcgctactcttgcttgccgggatatatattggaggggcatgcaatcttgacttgtatagtaagcccaggcaacggcgcttcatgggatttccccgctccattttgcagagcagagggtgcgtgtgggggaacgctacggggtacctcgtcttcaatcagctctccacatttcccttcagaatacgaaaacaacgcggattgtacctggactatccttgctgagccgggagacaccatcgctcttgttttcacagacttccagttggaggagggttatgatttccttgaaatctcaggcacagaagctccaagcatctggctgaccgggatgaacctgccaagccccgtaatctcctcaaagaattggttaaggctacacttcacatctgactctaaccatcggagaaaaggattcaatgctcagtttcaggtgaagaaggctattgagctcaaatcccgcggtgtaaagatgctcccatccaaagatggcagccacaagaactcggtgctgagccagggcggagtggccttagtttcagatatgtgtcccgatcccggaatccccgagaatggcaggcgcgcaggcagcgatttttctcgggtgggggcaaatgtgcagttttcatgcgaggataactatgttctgcaggggtcaaaatccattacgtgtcagcgggtgaccgagacactcgcagcctggtccgaccacaggcctatttgccgagccagaacttgcggtagtaatctccgcggaccctctggggtcattaccagtccaaactaccccgttcaatatgaggataacgcacactgcgtctgggtgattaccacgacagaccccgataaagtaatcaagcttgcttttgaggagttcgagttagaaagaggttacgacacactgacagtaggcgatgccggaaaggtgggggacaccaggagcgtcctgtacgttctcactggtagcagcgtaccggacctcatagtttcgatgagtaatcagatgtggctccatctgcagagcgatgactccatcgggagtccagggtttaaggccgtataccaagagatcgaaaaagggggttgcggtgaccctggcatacctgcttatggtaaaaggaccggatccagcttcctgcatggtgacactttaacatttgagtgccctgcagctttcgagttggttggtgagagagtgatcacttgccagcagaacaatcagtggagcgggaataagccaagctgcgtgttttcctgttttttcaattttactgcctcttccggcattatactcagtccaaattatcccgaggagtatgggaacaatatgaactgtgtgtggcttataatctcagagcctggttcccggatccaccttatctttaatgattttgacgtggagccccaattcgatttcctcgcagtgaaagacgatggcataagtgatatcacagtcttgggcaccttcagcggcaacgaagtgccatcccagcttgcttcctccggccacattgtgagactggaatttcagtccgatcattcaactaccggccgtgggttcaacatcacttacaccacatttggacagaatgagtgccacgacccgggaattcccatcaacgggagaagatttggcgacagattcctgctcggttctagtgtgagttttcattgcgacgatggctttgtgaagactcagggatcggagtccatcacatgcattctccaagatggcaatgtggtttggtctagtacagtcccacggtgcgaggccccttgtggcggtcatctgaccgcttccagtggagtcatcctccctccgggttggccaggatactacaaggactcgttgcactgtgaatggatcatcgaggccaagccaggtcattctattaagattaccttcgatagattccagactgaggtgaattatgacacgttggaggtgcgtgacggacctgccagctcctcacctttgatcggggagtatcatgggacacaagcgcctcagtttctgattagcaccgggaactttatgtacctactctttaccacagacaatagccgctcatcgataggatttctgattcattatgaaagtgtgactctcgaatccgatagttgcctcgatccaggtattccagtcaatgggcaccgccacggcggagattttggaattagatctaccgtaaccttctcatgtgaccccggttataccctgtctgatgacgagcccctcgtgtgcgagagaaatcaccaatggaatcacgccctgccttcctgtgatgcactgtgtgggggatatatccaaggaaaatcaggaacagtgctgtccccaggcttcccagacttctacccaaatagcctgaattgcacatggactatcgaagtttcccatggcaaaggagtccagatgattttccacaccttccatttggaatcctctcatgactacctgcttataacggaagacgggagcttctctgagcctgtcgcaaggctcacaggcagtgtgcttcctcacaccattaaggcgggtctttttggtaatttcacggcccaacttcgcttcatttccgatttctcaatctcctacgaggggttcaacataaccttttccgagtacgacctggaaccgtgcgatgatcctggagtacctgccttctcacgccgaatcggatttcactttggcgtgggagatagtttaaccttttcctgtttcctgggatatcgactggaaggagctacaaagctgacgtgtctggggggtggtcgacgcgtgtggagcgctccgcttcctcgatgcgtcgcagaatgcggagcgtctgtcaaaggcaatgaagggacattattgtcgcctaatttccccagtaattatgataacaatcatgagtgcatctataaaattgaaactgaagctggaaaaggcattcacttgaggacccgctccttccagctcttcgagggagatacgctcaaggtttacgatggaaaggatagctcttccagaccgctggggactttcaccaaaaatgaactgcttggcctcatcctgaattctacaagcaatcatctatggctggaatttaacacgaacgggtccgacactgatcagggcttccaactgacttacacgagcttcgatctggtgaagtgtgaagatccaggcatccccaattatgggtatcgaataagagatgagggacactttactgatactgtggtgctctacagctgcaaccctggatatgcaatgcatgggtccaatacactgacatgcctgtctggggaccggcgagtctgggataaacctctcccaagttgtatcgcagagtgcggcggtcagatccacgcagccacctctgggcgtatcctgtcaccaggataccctgctccttatgacaataacctccattgcacctggattatcgaagccgatccgggtaagaccattagccttcattttatagtgttcgataccgaaatggctcacgatattctgaaggtttgggacggcccagttgactcagacatcctactgaaagaatggtcagggtcagctctgcctgaggacatacactctactttcaatagtcttacattacaattcgattcagatttttttatctcaaagtcgggcttttccatccaattctctactagcatcgctgccacatgcaatgatccaggcatgccacagaacggtacccgttacggcgattccagagaagcaggcgatacagtgactttccagtgtgaccctggctaccagttgcaagggcaggccaagatcacatgcgtacagctgaacaacaggttcttctggcagccagaccctcccacatgtatcgcagcgtgcggcggtaatctcaccggacccgctggggtaatcctgtctcccaactatccgcaaccctatccacccggaaaagaatgtgactggcgggtgaaagtcaacccagattttgtgatagccctgattttcaagagcttcaacatggaaccatcctatgattttctgcacatttatgagggggaagactctaacagtcctttgatcggtagctaccagggaagccaggctcctgagaggatcgagtcatcagggaattcgctgtttttggcctttcggtcagatgcttctgttggcctgtcaggattcgccattgaattcaaagagaagcctagggaagcttgcttcgacccaggtaatataatgaatggaacacgtgtgggaacggattttaagttaggatccactatcacataccagtgtgattcaggatacaaaatccttgacccaagctcgatcacctgcgtaatcggggctgacggtaagccttcctgggatcaggtactcccttcatgtaatgctccttgcgggggtcagtacacagggtctgaaggcgtggtgctttctcctaactacccacacaattatacggccggacaaatatgcttgtactccatcaccgtacccaaggaattcgtggtattcggccagtttgcctactttcaaacagctctgaacgatctggcggaattgttcgatggtacccatgcccaggccaggctcttgtccagcttgtcagggtcccatagtggggagactcttcccctagcaacatcaaaccagattctcctgcgcttttcagctaagagcggggcatccgccagaggcttccatttcgtgtaccaggcagtgccgcgaacaagcgacactcagtgtagctctgtccccgaacctaggtacgggcgacgcataggatcggaattctcagccggttctatagtacgcttcgaatgtaaccccggatacctgctgcagggaagcaccgctttgcactgccagtctgtccctaacgccctggcccaatggaatgacacaatccctagctgtgtcgtgccatgcagcgggaacttcacacaaaggagagggacaattctgtctcctggataccccgaaccatacggtaataatctgaactgtatatggaagattatcgtaacagagggcagtggaatccaaattcaagtcatcagtttcgccacggagcagaattgggactcacttgagattcacgacgggggagatgtgactgcacctcgtctggggtcctttagcggtaccacagtgccggctctgctaaattctaccagcaatcagctgtacttacacttccaatcagacatttctgtggcggcagccggatttcatctcgagtacaaaaccgttggcttggctgcctgtcaagagccagcgctgccatctaactccataaaaatcggcgatagatacatggtcaatgacgtgctgtcgttccagtgtgagccagggtacacgttgcagggcaggagccatatcagctgcatgccaggcaccgtcagacggtggaactatccctcgccactgtgcattgcgacatgtggcggtacactttcaaccctgggaggtgttatcctctcccccggattccccggatcttatcccaataaccttgactgtacttggagaattagcttgcctatcggctacggtgctcatatccagttcctcaatttcagtaccgaagccaatcacgactttctggagattcagaacggcccttaccacacctctccaatgatcggccagttttccggcacggacctgcctgctgctttgctaagtaccacccatgaaaccctgattcacttctattctgatcactctcagaatcggcagggcttcaagctggcctaccaggcgtatgaactgcagaactgcccagacccacccccatttcaaaatggctacatgatcaactcagattactccgtgggtcagtcagtgagtttcgaatgttatcctgggtatattctcatcgggcaccccgtgttaacttgtcagcacgggataaaccgcaactggaattacccatttccacggtgcgatgctccttgtggctacaatgtcacttcacaaaacgggacaatctattcacccggtttccccgacgagtatccgatactcaaagactgcatatggctgatcactgtgccgcctggccacggagtatacataaatttcacgctcctgcagaccgaagcagttaatgattatattgccgtgtgggacggccctgatcagaactcgccgcagctaggcgtgtttagcggaaatacagccttagagacagcttatagctcaaccaatcaggtgctcttaaaatttcactcagactttagcaacggcggattcttcgtgctgaacttccacgctttccagcttaagaagtgccagccgcctcctgctgtgccacaagccgaaatgctgacagaggatgacgactttgaaataggggactttgtgaagtatcagtgtcatcccggatataccctggtcgggactgacattctaacttgcaaactcagctctcagctacaatttgaggggagcttgccgacctgcgaggcacaatgtcccgcaaacgaagtgcggactggtagttccggagttatcctgtcaccaggctatccgggaaactactttaatagccagacctgttcgtggagtattaaagtcgagcccaactacaacataaccatttttgttgacacattccaaagcgaaaagcaatttgatgctttggaggtgttcgacggaagttctggacaatctccattacttgttgttctgagcgggaaccacactgagcagtcaaattttacaagtagatcaaatcagttatacctgaggtggtctaccgatcacgcgacctctaagaaaggctttaagatcaggtatgccgctccgtactgcagcttaacacacccattgaaaaacggaggcattttgaaccgcacagcaggcgctgtaggctccaaggttcactacttttgcaagccagggtatagaatggtgggacatagcaacgctacctgtagaagaaatccattggggatgtaccagtgggactctctgacacctctttgccaggctgtatcgtgcggaatcccggaatccccgggtaatgggagcttcaccggaaacgaattcaccctcgactctaaggttgtatacgaatgtcacgagggattcaagctcgaaagttcccaacaagccacggcagtgtgccaggaggatggactgtggtctaacaaaggtaagcccccaacgtgtaagcccgtggcttgcccctccatcgaagcccagttgtccgagcacgttatctggagattggtctccgggagcttgaatgaatacggagctcaagtacttctttcttgcagtccgggatactacttggagggctggagattgctgcggtgtcaagccaacggcacatggaatatcggtgatgagagaccctcttgccgtgtgatcagttgtggcagtctctcctttcctccaaatggcaataagatcgggaccctgactgtgtatggtgcaacggcgatcttcacttgcaacaccgggtatacactggtgggcagccacgttagagagtgcctagctaacggactgtggtccggcagtgagaccaggtgtctggcaggtcactgcggctcacccgatcctatcgtgaatggccacattagcggggacggcttctcttatcgagatacagtggtctatcagtgtaatcctggatttcgacttgtcggtacatcagttaggatctgtttacaggaccacaagtggagtgggcagacccccgtctgcgtcccgatcacttgtgggcacccgggtaaccctgctcacggctttactaatggcagtgaattcaacttgaatgatgtggttaactttacttgtaacacaggctacctccttcagggagtctcaagggctcagtgtagaagtaatgggcagtggtcctcaccacttcccacatgtagagtagtgaactgttctgatcccggttttgtcgagaacgctatcaggcatggtcaacagaacttcccagaaagcttcgagtatggcatgtccatcctgtatcactgcaagaaggggttttacctgttaggatcatcagctctcacttgcatggctaacggtctatgggatcgctcactgccaaaatgcctggcaataagttgtggacatccaggagtgccggcaaatgctgtgctcaccggcgaactcttcacctatggggctgttgtgcattacagctgccgcggttctgagtctttaatcggtaatgatacccgggtgtgccaagaggattcccattggtccggcgcactgccccactgcaccgggaataaccccggattctgcggcgaccccggtactccagcacacggctcacgcctcggcgatgattttaagaccaagagtctgctgcgcttttcatgtgagatgggtcatcagctgagaggctcaccggaacgaacatgtctgctcaacggatcgtggtctggtctgcagcctgtgtgcgaagccgtctcatgtggcaatccaggcactcccaccaacggtatgatcgtgagttccgacgggattctgtttagttcctcagtcatctatgcttgctgggagggatacaaaacatcgggacttatgacgaggcactgcaccgccaacggaacgtggacgggaactgctccagactgtacaatcatttcttgcggggatccaggaacacttgccaatggaatccagttcggaactgatttcactttcaataagaccgtctcctaccagtgtaatcctggatatgtgatggaggccgtgacttcggctactatcagatgcaccaaggacggacgctggaaccctagcaagccagtgtgtaaggcggtgttatgccctcagccccctccggtgcagaacggaaccgtggagggcagcgactttcgctgggggtcaagcatttcctattcctgcatggacggctaccagttgtcacattccgccatcctgtcttgcgaaggacgtggggtatggaagggagagatcccccagtgcctgcctgtcttttgtggcgacccgggaataccggcagagggcagactgtccggtaaatcattcacatacaagagcgaagtattctttcagtgcaagtctccttttatcttggtggggtcttctagacgtgtttgccaggctgacggcacgtggtccggcatccagcccacgtgcatagatccagcacacaatacctgcccagatcccggaacgccccacttcggtattcagaatagtagccgcggatacgaggtggggtccactgttttcttcagatgtagaaaagggtaccacattcagggatccactacacgtacctgtctcgctaacctgacgtggtccggcattcagacagagtgcatcccccatgcctgcagacagcctgagactccagctcacgccgacgttagggctattgaccttcctactttcggatataccctggtctacacatgtcatcctggattttttctggctggcggaagcgaacacaggacatgtaaggctgatatgaaatggactggaaaaagtcccgtgtgcaaaagtaagggagtgcgggaggtaaacgagaccgtgacgaagaccccagttccaagcgacgtgttcttcgtgaacagcctttggaaaggatattatgaatatttagggaagcgccagccggcaacactcaccgtcgattggttcaatgccacgtcttctaaagtgaatgcaacattcagcgaggccagccctgtcgagctgaagctgaccggtatatacaagaaagaggaagcccacttgctgctgaaagcttttcaaataaaggggcaggccgatattttcgtgagcaagttcgagaacgataactgggggctggatggatatgttagcagcggactggaaaggggaggctttactttccagggcgacattcacggaaaagactttggaaaatttaagctcgaacgccaagatccgctgaacccggatcaggactcaagctctcactatcatgggacatcgtccggctctgtcgccgcagctatcctggtgccttttttcgccctgattttgtcaggctttgcattttacctatacaaacatcgaactagacctaaggtgcagtacaatggctacgcaggacatgaaaactccaatggacaggcttccttcgagaaccccatgtatgacacaaatctgaagcctacagaagctaaagcagtccggtttgacaccactctcaatacagtctgcacagttgtttaa

SEQ ID NO: 219502 - DNA, 10695 bp, synthetic construct
  misc_feature 1..10695: note = Description of Artificial Sequence: Synthetic coding sequence
  source 1..10695: mol_type = other DNA
atgacggcgtggagacggtttcagtcgttactactgctgcttggcctgctggtcctatgcgccagactcttgactgctgctaaggggcagaactgcgggggtttagtacaaggccctaacggcaccatcgaatcacctgggttccctcacggatatccaaattacgccaactgtacatggattataataaccggcgagcgaaaccggatacagctctctttccatacctttgctcttgaagaggacttcgacatcctctctgtgtatgacggccagccccaacagggtaacctgaaggtgcgcttatcaggcttccagctgccttcttctatcgtgtcaaccggatctattcttaccctttggtttaccacggacttcgccgtaagtgctcagggtttcaaggccctttacgaggtgctcccctctcatacctgcggtaatcctggagaaatactgaagggcgtcttgcacggcactcgcttcaatattggggacaagatcaggtactcctgtctgccaggctatatactggaagggcacgccatcctcacatgtatagtgagcccgggtaatggggcaagctgggatttccctgctcccttttgtcgggctgagggtgcatgtggtggtacgctgagggggacaagctcaagtatctcgtcaccccacttccctagtgaatacgagaacaatgcagactgcacttggaccatcctggcggagcctggtgatactattgctcttgtgtttaccgatttccagcttgaggagggctacgatttcttagaaatttccggaaccgaggccccatcaatctggttgacagggatgaatctaccctcgccagttatctcctcaaagaattggctgcgtctacattttacctcagatagtaatcataggaggaaggggttcaacgcccagtttcaggttaagaaagctatcgagttgaagtcccgaggtgtgaagatgctgccttctaaagacggctcccacaaaaattcggtgctgagtcaaggtggagtcgctttggtgagcgacatgtgtcccgatccgggaatcccggaaaatggtcgaagagccggttcagacttcagagtcggtgctaatgtccagtttagttgcgaggataactacgtactacagggttccaaatccattacatgccagagggtgacagaaacactagccgcttggagcgatcacaggccaatctgccgagctaggacttgtggcagcaatctgcgtgggccttctggtgtaattacgagtcccaattaccctgtccagtatgaggacaacgcccattgtgtgtgggtcattacaaccacggaccctgataaggtgatcaagttggcctttgaggaattcgagctagagcggggatacgatacattaaccgttggagacgcgggaaaagttggagacacccggagcgtactgtacgtactaacagggagttctgtgcctgacctgattgtgagtatgagtaatcagatgtggcttcacctgcagagcgatgacagcatcggaagcccgggtttcaaggccgtgtaccaggaaattgagaaggggggatgcggagatcctggaatacctgcctacggcaaaagaacaggctcgagtttcctgcacggggacacacttacctttgagtgcccagctgcgtttgaactggtgggcgagcgtgtcataacttgtcagcaaaataatcagtggtccgggaacaaaccgagttgtgttttcagttgcttcttcaacttcactgcaagtagtggaattattctctctcccaactatcctgaggaatacggcaacaacatgaattgcgtgtggctcatcatcagcgagccagggtcaagaatccatctgattttcaacgactttgacgtcgagccccagtttgacttccttgcagtcaaagatgacggcatttcggatatcactgtcctcggaacatttagcggaaatgaagtgccgtcccagttggcttctagtggccatattgttcggctggagttccagagcgatcatagtacaacagggaggggatttaatattacttatactacttttggccaaaatgagtgccatgatccaggcatcccaattaatggaagacggtttggtgataggtttctgcttggcagttcagtttcctttcattgcgatgacggattcgtgaagacccaggggtctgaatcaataacatgtatattacaggatggcaacgtggtttggtcttctactgtccctaggtgtgaagcaccatgcgggggacatctgacggcaagttcaggggtgatcctcccaccgggatggcctggatattacaaggactcactgcactgcgagtggatcattgaggcgaaacccggacactctatcaaaatcacttttgacaggtttcagaccgaagtaaactatgacaccttggaagtcagagacgggccagcgagtagttcacctctgatcggtgagtaccacgggactcaggctccccagtttctcatcagcacaggcaattttatgtacttgctcttcaccaccgataattcaagatcatccattgggtttctgatccattacgaaagcgttacactcgaatctgatagctgtctggaccccggaataccagtgaatggtcatcgccatggcggagattttggtatccggtctaccgtaaccttttcttgcgaccccggttacacactgtctgatgacgagccattagtatgtgagcgcaatcaccagtggaatcacgcactgccttcatgtgacgccctttgtggcggatacatccaggggaaaagtggcaccgttctgagccctggcttccctgacttctatcccaactccctgaattgcacatggactattgaggtgagccacggcaaaggcgtccaaatgatcttccacacttttcatctggagagcagccacgactacctgctaattacagaagacgggagctttagcgaacctgtggcaagactgactggaagcgtgctgccacacaccattaaagcaggactcttcgggaatttcaccgcccagctgcggttcatctctgatttttccatctcttacgaaggtttcaacattactttttccgaatatgatctggagccctgtgatgatcccggagtgccggcattctcacgcaggatcggctttcatttcggtgtcggcgatagtctcaccttctcttgcttcctcgggtaccggctggaaggcgcaacaaagctcacttgtctcggaggcggacgcagggtctggagcgcgcctctgcctcgttgcgtcgcagaatgcggggcttcggtaaaaggcaacgaaggtacgctactgagcccaaactttccttccaactatgataataaccatgaatgtatatataaaattgaaacagaagcaggaaagggcatccacctaagaacacgttcgtttcagctctttgaaggtgatacgctaaaggtttatgacggcaaggatagttcatccaggccattgggaacctttacaaagaacgagcttctgggcctgattctcaattccacaagcaaccatctgtggttagaatttaatacaaacggcagcgacaccgaccaaggattccagttaacctacacctccttcgacctggtcaagtgcgaagacccgggaatccctaactatgggtaccggatccgtgacgaaggtcacttcacagatacggttgtcttatattcttgcaaccctgggtatgccatgcacgggtcgaacaccctgacgtgcctctcaggggatcgcagggtatgggacaagcctcttccaagctgtattgccgagtgcggtggccagattcatgcagccacgtcgggcaggattctgtccccaggttatccggctccctacgacaataacttacactgcacttggattatcgaggctgaccctggcaaaactatatcgctacacttcattgtgttcgacacagagatggcccatgacatcctgaaagtgtgggacggtccggttgatagtgatatactcctgaaggaatggagcggctccgccctgccggaggacatccacagtacattcaattcactgacgcttcagttcgatagcgatttcttcatatccaaatccggcttcagtatccagttctctaccagtattgccgcaacctgtaatgatcctggcatgcctcaaaatgggacccggtacggagatagcagagaagcgggagatactgtaacattccaatgtgacccgggataccaattacagggtcaggccaaaatcacctgtgtgcagctcaataacagattcttctggcaaccagacccgcctacttgtattgctgcatgcggagggaatctgactgggcctgccggagtgatcctgtcgccaaactatccgcagccttatccaccaggcaaggaatgcgattggagagtgaaagtcaatcctgacttcgtgatcgctctgatttttaaaagctttaatatggagccatcatatgactttctgcacatctacgagggcgaggatagtaatagtcccctgatcgggtcatatcaagggtctcaagcccctgagaggattgagagctccggtaacagcttgtttcttgctttccgttccgacgcaagcgtgggattgagcggctttgcaattgagttcaaggagaagccccgagaagcctgttttgatcccggtaatatcatgaacgggactcgcgtgggaactgactttaaacttgggtctacaattacgtatcagtgtgattctggctacaagattctcgacccaagttccatcacatgcgtgataggcgcagacggcaagccctcctgggaccaggttctaccaagctgtaacgcgccttgcggtggccagtataccggatccgagggcgtagtcctatcaccgaattacccccataattacactgccggacagatatgtctgtacagcatcaccgtacccaaggaattcgtggttttcggccaatttgcctatttccagaccgcccttaacgatttggccgaattatttgatgggacccacgctcaggcgagactcttatcttcactgtcaggctcacattctggcgagacgctgcctctcgcaacttccaaccagatattgctgcgcttttctgctaagtcgggggcttccgctcgaggatttcacttcgtgtaccaagcagtacctcggacgtcggatactcagtgctcaagtgtcccagagcctcggtacggtcgcaggatcgggtccgaattcagcgcagggtccattgttagattcgagtgcaacccagggtatcttcttcaaggttctactgcactgcactgtcagtctgtcccgaacgccctggcccagtggaacgacacaataccttcttgcgtcgttccctgcagcggaaatttcacacagcggagaggaacaattctgagtcccggttaccccgagccctatggaaacaacctaaactgcatctggaaaatcatcgtcacagaaggcagcgggatccaaatccaggtgatttctttcgctaccgagcaaaattgggatagtctggaaattcatgatggcggtgatgtgactgctcccaggctgggctccttctcggggaccaccgtccccgctctcctaaattcaacctccaaccagctgtacttacatttccagtcagatatctccgtcgcggcagccggattccatctcgaatacaaaaccgtcggcctcgcggcttgccaagaacctgctctgccaagtaattccattaaaatcggcgaccgatacatggtcaacgacgtcctgagcttccagtgtgagcccggatatacgcttcagggccgaagccacatcagttgtatgcctgggacggtgagaaggtggaattatccttccccactgtgtatcgccacctgtggcggaaccctctccaccctcgggggtgttatactgtccccgggattccccggttcttatcctaataacttagattgtacatggaggatctcactgccgatcggctatggggctcatatccagttcctcaacttctcaactgaggctaaccatgactttctggagatccagaacggaccatatcacaccagtccgatgattggtcagttctcaggcaccgacctgcccgctgcgctcctctctacaacacatgaaaccctcattcatttctacagtgaccattctcagaatcggcagggtttcaagcttgcctaccaggcttacgaactgcagaactgtccggaccctcctcccttccagaatggatacatgataaacagtgattattcagtgggtcagtccgtaagtttcgagtgttatccaggatacatcttaattgggcacccagttctgacatgccagcacggaataaatcgcaattggaactacccctttcccaggtgcgacgcaccttgcggatacaacgtcacctcacagaatggcacaatctactctccgggatttcccgacgagtatccaatcctgaaagattgtatttggttgatcacggtccctcctggtcacggggtctacatcaacttcactcttctacagaccgaggctgtgaatgattatattgccgtttgggatggtccagatcagaactccccacaactcggcgtgttcagcggcaatacagctctggaaactgcctatagcagtacgaaccaggtcttactgaagtttcatagcgacttcagcaacgggggattctttgtgctgaacttccacgcgtttcagctgaagaaatgccagcctccacccgctgtgccacaagccgaaatgctgactgaggacgacgactttgagataggagattttgtcaaataccaatgtcaccccggatacaccctagtgggtacagatattttgacctgtaaactgagtagtcaactgcagtttgagggaagcctgccaacctgcgaggctcagtgcccggctaacgaagttcgcaccggctcctcaggtgtgattttatcccctggttaccctggcaactatttcaattcgcagacatgcagttggtctattaaagtagaacccaactataacatcaccatttttgttgacacttttcagtcggaaaaacagttcgacgctctcgaggtttttgacgggtcatcgggacagtctcccttgctggtcgtgttgtccggcaatcacaccgaacagtccaacttcacctctagatctaaccagctttacctgcggtggagcacggatcatgcaacgtcgaaaaagggcttcaagataagatacgccgcaccttattgcagcctgacacatccactgaagaatggtggtattctcaatagaacggctggggcagttgggagcaaagtgcattacttttgcaaacctgggtataggatggtaggtcattccaatgccacctgtcgcaggaaccctttaggtatgtaccagtgggattcattgactccactgtgtcaggcagtttcttgtgggatccccgagagtcctggcaacggttcattcaccggcaatgaattcaccttggactccaaggtggtttacgaatgtcacgagggctttaagttagagtctagccagcaagccaccgccgtgtgtcaggaggacgggctgtggtcaaataaaggaaagccgcctacatgtaaacctgtggcttgtccatcaattgaggcacagctgagtgagcacgtcatctggcggctggttagcggctctctgaacgagtatggggcacaggtgcttctgtcatgtagccctggttattatttggagggttggagattgctccgctgccaggcaaacggcacgtggaacatcggtgacgaacgcccttcctgtagagtcatctcctgtgggtctctgtcttttcccccaaatgggaacaaaattggtacattgacagtctacggagccactgcgatctttacctgtaacaccggctacaccctagtgggaagccatgtcagggaatgtcttgccaatgggctgtggtctgggtccgaaaccagatgtcttgccggacattgcggtagccctgatcccattgtaaatggccacatctccggcgacggtttcagctatcgcgacaccgttgtgtatcagtgtaatcctgggtttcgattagtgggcacgagtgtgcgtatatgtctgcaggatcataaatggtctggccagacacccgtctgcgtgccaatcacatgcggacatcccggaaacccagcccatggcttcactaatgggagtgaattcaacctcaacgacgtagtgaactttacatgcaacacaggctatctgctccagggcgtcagtcgcgctcagtgtcgatcaaatggacagtggagcagcccactgcctacttgccgagtggtgaattgctccgaccctggattcgttgagaatgctatccgtcacgggcagcagaatttccctgaatcgttcgaatacggcatgtcaatcctgtaccattgcaaaaaaggattttacctgctcgggtcttctgccctcacctgtatggccaatggcctttgggatcgtagcctgccaaagtgtctggccatctcgtgcggccaccctggtgtgccagccaatgccgttctaactggagaattgttcacctacggagctgttgtgcattactcttgtcggggaagcgagagcctgatcggcaacgatactcgtgtgtgtcaagaggactcccattggtccggggctcttccacactgtaccggtaataaccctggcttctgtggagatcccggaaccccagcccacggtagccgattgggcgacgactttaagacgaaaagtcttctaagatttagctgcgaaatggggcaccagcttagggggtcaccagaaaggacgtgcttactgaacgggtcctggtcagggctgcagcctgtgtgcgaagcagtctcctgtggaaaccctggcacgcctactaatggcatgattgtatcatccgatggcattctgttctcaagcagtgtgatctatgcctgttgggaaggatataagacgtctgggcttatgacgagacactgcacagccaatggaacatggactggaacagcaccagactgtaccattatcagctgcggcgaccctggaaccctggctaacggaattcagttcggaaccgattttacgtttaataagacagtgtcctatcagtgcaatcctggctatgtcatggaggccgttaccagcgctacaatcaggtgtacaaaagatggccgttggaatcccagcaaacccgtctgcaaggccgttctctgccctcagccgcctccagtgcaaaatggaacagtcgagggcagcgacttccgctggggcagcagcatctcttactcatgcatggacggctaccagctgtcccattcagccatcctttcctgcgagggacggggagtgtggaagggagagatcccccaatgtctgcccgtgttctgcggggatcctggcattccagccgagggacgtctgagtggcaagagttttacatataagtctgaagtgttcttccagtgcaaatctcccttcatccttgtgggatcctccagaagggtctgtcaggctgacggcacctggtccggtatccagcctacctgcatagacccagcccacaatacatgccccgatccgggtacacctcactttggtatacaaaatagctcaagagggtatgaggtgggttctaccgttttttttcgctgtcggaagggctaccacattcaggggtcaacaacgcgcacatgccttgccaacctcacatggagcgggatccaaacggagtgcattcctcatgcctgccgtcagcccgagacccccgcacacgcagacgtgagagccattgatcttcccacatttggctacacgctggtgtacacctgccaccctgggtttttcttagcaggaggatctgagcacaggacttgtaaagccgatatgaagtggaccggtaagagtcctgtctgcaagtctaaaggagtgcgcgaggttaatgaaaccgtgacaaagactccagttccaagcgatgtcttctttgtgaacagtctgtggaaaggttactatgagtatctgggaaagcgccagccggcaactctaacagttgattggtttaatgctacttcctcaaaggtcaatgcaacgtttagcgaggcctcccctgtggagctcaagctcaccggtatctacaaaaaagaggaggctcacctccttttaaaagcctttcaaataaaagggcaagctgacattttcgtgagcaagtttgagaatgacaattggggtctcgacggatacgtaagtagtggccttgaacgtggcggttttaccttccagggggacatccacggcaaggatttcggaaaattcaaattagagcggcaagatcccctgaacccagaccaggactcgagctcacattaccacggcactagtagcggaagcgtggccgctgccatcctcgtaccattttttgctctaattttgtccggcttcgctttctatctctacaaacatcgtacacgacctaaggttcagtataacggatatgcaggccatgagaattcgaatggtcaggcgtcatttgaaaatccaatgtacgacactaacctcaaaccaacggaagccaaagcagttcgatttgatacgaccctaaatactgtctgcacagtggtgtac

SEQ ID NO: 219503 - DNA, 6329 bp, synthetic construct
  misc_feature 1..6329: note = Description of Artificial Sequence: Synthetic coding sequence
  source 1..6329: mol_type = other DNA
atgacagcttggcgacggttccaatccctactgctactgctcggtctgctggtgctgtgtgcgagactgcttactgcggctaagggacaaaattgtggtggccttgtccaggggccaaatggcaccattgagtctccaggcttccctcatgggtatccaaattatgcaaattgtacttggatcattattactggggaacggaacagaatccaactgtccttccatacatttgcactagaagaagactttgacatcctctccgtatatgatggtcagcctcaacagggcaaccttaaagtgcggctgtctggctttcagcttccatcctccatcgtctccaccggcagcattctgaccctttggttcacgacagactttgccgtatctgcacagggattcaaggctttgtatgaagttctgccaagtcacacctgcgggaatcccggagaaatcctgaagggagtcctccatggtacccgcttcaatattggagacaaaatccgttatagttgcctacccggatatatactagaagggcatgccattctgacttgtatcgtcagccccggtaacggcgcatcctgggacttccccgctcctttctgtagggccgaaggagcttgcggcggaaccctgcgtggaaccagctcatctatcagcagtccccacttcccctccgaatacgaaaacaacgcagattgtacttggactatcttggctgagcccggagacaccatcgccctagtattcactgacttccaacttgaggagggctatgacttcctggagatcagcggcacagaggctcccagtatctggctgaccggaatgaaccttccgagccctgtaatctcatctaagaattggctgcgacttcatttcaccagtgacagtaatcaccgcaggaagggcttcaatgcacaatttcaagtgaaaaaggctatcgagctcaaaagtcggggtgttaaaatgttgccgagtaaagatgggtcccataaaaacagcgttctgtcacaggggggagtagccctggtgagtgacatgtgtcctgatcccggaatacccgaaaatggcagacgtgctggatctgactttagagtgggtgcaaacgtgcagttctcctgtgaggacaactacgtgctccaaggatctaagtcaataacgtgccagagagtcacagagaccctagccgcatggtcagatcacaggcccatctgccgcgctaggacttgcgggtctaaccttcgcggtcctagcggggtaattacatctcccaattacccggtgcagtacgaggataatgcacactgtgtgtgggtgatcaccaccactgatcccgacaaggtgattaagctggccttcgaagagtttgaactggagcggggttatgataccctgacagtgggagatgccggaaaagtcggcgatacgcggtctgtgctgtatgtgctcactggatctagcgtgcctgatttgatcgttagcatgtcaaaccagatgtggctccatttgcagtctgacgattccattggcagtcccggattcaaagcagtttaccaagagatcgaaaagggcggatgtggcgaccccggtatacctgcctatggaaaacgcaccggctccagtttccttcacggagacactctgaccttcgagtgccctgctgcatttgaactggtgggagaaagagtgatcacatgtcagcagaacaatcaatggtctgggaacaagcctagctgtgtcttttcctgcttttttaatttcacggcaagcagtggaatcatcctgtcccccaactatcccgaggagtacggtaataacatgaattgcgtttggctgataatctcggagcctgggtcacgaatccacctgattttcaatgacttcgacgtggaaccgcagtttgatttcctggccgtgaaggacgacggcatcagcgacattacggtcttgggcacgtttagcggaaatgaggtccctagccagctggcctcttcaggccatatcgtccgactcgagtttcagtcagaccactcaaccaccggcaggggcttcaacatcacatataccacattcgggcagaacgagtgtcacgatccaggtattccgattaacggtcgcaggtttggtgaccggttcctcctgggcagctctgtcagcttccactgcgatgatggtttcgtcaagacgcagggatccgagtccataacctgtattctgcaggatggcaatgtagtgtggagtagcaccgttcctcggtgcgaagctccatgcggcggacacttaacagcaagctctggagtcatattaccaccgggatggcctggatactacaaagacagcttgcactgcgagtggattattgaggccaagccaggtcattccataaaaatcaccttcgaccggttccagacagaggtaaactatgacactctagaggtgagagatggcccagcctctagctctccacttattggggaataccacgggactcaagccccacagtttctgattagcactggaaacttcatgtacctgctctttacaacggataatagtaggagctcaatcggctttttaatccactacgaatccgtgacgctcgagtcagactcatgtctcgatccaggtatcccagtaaatggtcaccggcatggaggcgacttcggcattcgcagtacggtcacattttcttgtgatcctggatacacgttgtcagacgacgagccgttggtgtgtgagagaaaccatcagtggaatcacgccttgccaagctgtgacgctctttgcggtggttacattcaggggaaatcaggtactgtgctcagccccggtttccccgacttctatcccaacagcctaaattgcacatggaccattgaggtaagccacgggaagggagtccaaatgatcttccacaccttccatctcgagtcctcacacgattacctcctaatcacagaggatgggagctttagtgaacccgtcgctcggctaactggctccgtgttgccccacactatcaaagccggattgtttgggaacttcactgcacaactacgatttataagcgactttagcatttcctatgaaggctttaacatcacgttctcagaatacgacctggaaccttgcgacgatcctggcgttcccgctttctctaggcgtataggtttccactttggcgtgggtgattccctgactttcagctgttttctcggctatagacttgaaggcgcaaccaaactgacctgtcttggcggaggaagaagggtgtggtctgcccctctaccacgatgtgtggccgaatgtggcgcatcagtaaagggcaatgaaggtacactcttatcacccaactttccctctaactacgataacaaccatgagtgtatttataaaattgaaacggaggctggaaagggtatacatctgagaacgaggagctttcagttgttcgaaggtgatacacttaaagtctatgatggcaaggattcatcctcacgaccactcggcactttcactaagaatgaactgctgggtcttatcttgaacagcacatccaaccacctttggctggaatttaacaccaatggtagtgataccgaccaaggctttcagctgacttacacttcctttgatttggtgaaatgtgaagaccccggaatcccaaattacggctatcgaatccgcgacgaggggcacttcaccgataccgtcgtcctgtattcttgcaatccaggatatgcaatgcatggatcaaacactctgacttgtctgagcggagatcggcgagtgtgggataagcccttaccatcttgcatcgctgagtgtggtgggcagatccacgccgctacaagcggcagaatcttaagcccgggatatccagccccatatgataacaatttacattgcacctggattattgaagccgaccccggtaagactatttctcttcactttatcgtgtttgacacagagatggcacacgatatcctgaaggtctgggacggacctgtcgattcggatatcttgttgaaggagtggtccggctcagccctcccggaggacatccactcgacatttaactccttgaccctgcagttcgacagcgacttcttcatctcaaaatcaggcttttccatacagttttctacaagtatcgccgctacttgtaatgatccagggatgcctcagaatgggacccggtatggagactcacgggaggctggcgacaccgtgacttttcagtgcgatccaggatatcaactacagggccaggctaaaatcacttgcgtccagctgaataaccgattcttctggcagcccgatccgccaacctgcattgcagcctgcgggggtaatctgactgggcctgccggagtcatcttatcccccaactatcctcaaccctacccgcctggtaaggaatgtgactggagagtgaaggtgaatcctgactttgttatagcactcattttcaagtcatttaacatggagccatcttacgacttcttgcacatctatgaaggtgaagactccaattctcctctcattggctcctaccagggttcacaggcgccagaaagaatagaatccagtggcaattcgctcttcctagctttccggagtgacgcttccgtcgggctcagcgggttcgctattgagttcaaagagaaaccacgggaagcctgctttgatcctggaaacatcatgaacggtacaagagtagggacagattttaagctgggctcaactattacataccagtgtgactctggctacaagatcttggatccctctagcatcacttgtgtgataggggcagatggaaagccttcctgggatcaagtgctgccaagttgcaacgccccttgtgggggacagtacactgggtctgaaggggtggtcctgtccccaaactatccacacaattatactgcaggccaaatctgcctatacagcatcacagttcctaaagagtttgtggtgtttggacaatttgcctactttcagacggctctcaatgacctggcggagctattcgatgggacccacgctcaagctaggctccttagcagccttagcggctcccactccggagagactctgccgctagctacttctaatcaaatcctgctacgtttttccgccaaaagcggcgcatctgccaggggcttccattttgtgtatcaggcagtgcctcgaacgagcgatacacaatgcagctctgttcctgaacctcggtatggccgacgcatagggagcgaattttctgcaggctccatcgtacggttcgaatgtaaccccggatacttgcttcagggatcaaccgccctacattgccagagcgtccccaacgctctggctcaatggaacgacacaatacctagctgtgttgtgccctgctctgggaacttcacccagaggcgcggtactatactgagcccgggatatccagagccctacgggaacaaccttaactgcatatggaaaatcatcgtgaccgaaggttccggcatccaaattcaggtcatctccttcgcaacggaacagaactgggatagtctagagatccatgacggtggagacgtaaccgcccctcggttgggcagcttcagcggcacgaccgttcctgccttgctgaattctacttccaatcagctttatcttcacttccagtcagacatttcggttgcggctgccggatttcatcttgaatacaagaccgtgggcctggccgcatgccaggagcctgcactgccaagtaatagtatcaagatcggagaccgctacatggttaatgacgtcctcagtttccaatgtgaacctggttacaccctgcagggcaggtcacacatttcgtgcatgcctggtacagtcaggcggtggaactacccatcgccactttgtatcgctacatgcggcggaaccttgtccactcttggcggtgtcattttatcacccggttttcccggaagttaccccaataatctggattgcacatggaggatctccctcccgattggttacggcgcacatatacagtttctgaactttagtacggaggccaatcacgacttccttgagattcagaacggtccataccacacctcccccatgataggacagttcagtgggaccgatctccctgcagctttgctgtccactacgcacgaaacccttattcacttttactcggaccactctcaaaaccgccagggcttcaaactggcctatcaggggggttctggcaacatcggcccagcattcccatgcctcgacacaccatttcaggcacgctgccaaggagaagaacgcacattcaacta

SEQ ID NO: 219504 - DNA, 10163 bp, synthetic construct
  misc_feature 1..10163: note = Description of Artificial Sequence: Synthetic coding sequence
  source 1..10163: mol_type = other DNA
atgaccgcgtggcggagattccaatctctgctgttgttgctcggactgctcgtattgtgtgccaggctgctgacggcggctaaagggcaaaattgcggcggactggtgcagggtcctaatgggacaatcgaatcgcccggttttccacacggatatcctaattacgctaattgcacctggataatcattactggagagcgcaatagaatccagctgtctttccacaccttcgcccttgaggaagattttgatattttatccgtctacgacggtcagccacagcagggcaacctcaaagtgagattatcaggattccagctaccctcaagtattgtgtcgacgggttccattctgaccttgtggtttactacagacttcgccgtgtcagctcaaggctttaaggcactctatgaggtcctgccctcacacacttgcggaaaccccggagaaatccttaaaggagttctacatggcactaggttcaatataggcgacaaaatccgctattcgtgtctccccggatatattctggaaggccacgcaatcctgacctgcattgtgtcccccggtaacggcgcatcctgggatttccccgcacctttttgcagagccgagggagcatgcggaggcacactcagaggaacttctagcagtattagctcgccccatttcccgtctgagtacgagaataatgccgactgcacttggacaatccttgccgagcctggcgatactattgcactcgtgtttaccgatttccaacttgaggaggggtatgattttcttgagatttctggaacagaagcacccagcatctggctgactggcatgaacctgccctctcctgttatatcctccaaaaattggctccggctgcacttcaccagcgactccaaccaccggaggaagggattcaacgcccagtttcaggtcaaaaaagcaatcgagttgaaatcccgaggagtcaagatgctccccagcaaggacgggagtcacaaaaattcggtgctgtcacagggtggggtcgccctggtatccgatatgtgcccagatcccggaatccctgagaacggtcgtcgggcaggctctgactttagggttggggctaacgtacaattctcctgtgaggataattacgtgctgcaaggaagtaaaagtattacctgtcagcgggttactgaaactctggccgcatggtccgaccatagacccatctgcagagcacgtacttgtggctctaatttgagaggaccttcaggtgtgatcaccagtcccaattacccagttcaatacgaggataatgcacactgcgtatgggtgatcaccaccaccgatcccgacaaagtcatcaaactcgctttcgaggagtttgagctggaacgcggatacgacaccctgaccgtaggagacgccggtaaagttggggacacgcgctcggtgttgtatgtgctgacaggatcttctgtcccagatctgattgtgtcgatgtcgaaccaaatgtggcttcacctacagtcagacgacagcatcggcagcccaggatttaaggctgtttaccaagagatcgaaaagggtgggtgtggcgatccaggtattcctgcatatggtaagagaactggaagttccttcctgcacggggacacactgacatttgagtgcccggctgcatttgagctggtgggcgaacgcgtgattacctgccaacagaacaaccagtggtctgggaacaaaccatcctgtgtctttagttgctttttcaatttcaccgctagcagcgggataattctctcccctaactatccagaggagtacgggaataacatgaactgcgtttggttgattatctccgagccgggaagtcgcatccacctcatcttcaatgactttgatgtggagccccagttcgacttcctggccgtgaaggatgatgggataagtgatatcacagtgctaggaacattctcaggcaacgaggttccgtcacagttggccagtagtggccacatcgtgaggctggagtttcagagtgatcactcaacaaccggcagaggcttcaacattacttacaccacatttggccagaacgagtgccacgaccccggaattcccattaacgggaggaggttcggtgacagatttcttctgggtagctccgtttctttccattgtgacgacggttttgtgaaaacccagggctccgaaagcattacgtgcattctgcaggacggtaacgtcgtatggtcatcaaccgtacctcgatgtgaagcgccatgcggtggccacctgactgcctctagcggggtgatcctgccgccagggtggccaggctattacaaggactccctgcactgcgagtggataatcgaggcgaaaccgggtcatagcattaaaattacattcgacagattccaaacggaggtgaattacgatacattggaggtacgggacggaccggcttccagctctcctcttatcggagagtaccatggcactcaggcccctcagttcctcatttccacggggaattttatgtacttgctgtttaccacagacaacagccggagttccatcgggttcttgatccattacgagagcgtgaccctggagtctgactcatgtctggaccctggaattccagtgaacggacatcggcacggcggagattttggaatccgcagcactgtcactttcagttgtgacccaggatacacactctcagatgatgagcctctcgtttgcgaaagaaaccatcagtggaaccacgcccttcctagttgtgatgctctgtgtggcggatatatccagggcaaatcaggcactgtgctatccccgggtttcccagacttctacccaaattctctgaattgcacttggactattgaagtgagtcatggtaaaggggtgcagatgattttccacacattccacctcgaatcctctcacgattatctgctcatcaccgaagacggatcattttctgaacccgtggcgaggctaaccggttcggtactcccccacacaatcaaggctgggctgtttggaaactttacagctcagctccggttcatttcggatttttcaatcagctacgagggcttcaacatcacgttcagcgaatacgatctcgagccttgcgacgatcctggtgtgcccgcattttcacggaggatcggcttccatttcggggtaggagacagtttgacattcagctgtttcttgggctatcgtctggagggggctactaaactcacgtgcttgggtggcggacgccgtgtgtggtcagctccactgccaaggtgtgttgcagagtgcggtgccagcgtgaaggggaatgagggaacccttttgtccccaaatttcccgtccaactatgacaataatcatgagtgcatctacaagattgagacagaagcgggaaaagggattcatctgagaacacggagttttcagctgtttgagggagatacgctgaaggtgtatgatggcaaagactcttcctccaggcctctgggcacattcacgaagaatgagttgctgggcctgattctgaattccacgtccaaccatctatggctcgagtttaacaccaatggaagcgacacagatcaaggttttcagctcacttacacatcattcgatctcgtgaagtgtgaggaccccggaatcccaaattatggctacagaatcagggacgaaggtcactttactgatacagttgtgttgtactcctgcaacccaggttatgcaatgcatgggtctaacacactgacatgcctcagcggtgacagaagagtgtgggacaagcccttaccctcatgtatcgcagaatgtgggggtcagatccacgctgccacaagtggaagaattctgtcccccggatacccagccccatatgacaataatctgcactgcacttggattatcgaggcagatccgggaaagacaataagcctgcattttatcgtcttcgacacagaaatggcccacgatatcctgaaggtatgggacggcccagtggacagcgatatcttgcttaaggagtggagcggtagcgctctccccgaagatattcacagcactttcaactccctcacgcttcagtttgactcagatttctttatttccaaatccgggtttagcatacagttctcgacaagtatagccgcaacctgcaacgacccaggtatgcctcagaatggaactcggtatggagattcaagagaagcaggtgatacagtgacgttccagtgcgacccaggctatcaacttcaaggccaggcgaagattacatgcgtacagcttaataaccggtttttctggcaaccagacccacccacttgcatcgcagcctgcggcggaaatctaaccggaccggctggagtaatcctatcaccgaactacccacagccctacccacctggcaaagaatgtgactggcgggtgaaagttaacccagattttgtaatcgcccttatattcaagtcctttaatatggagccaagttatgactttctgcatatttatgagggagaagactctaactcacctcttatcggctcatatcagggaagtcaagccccagagagaatcgagtcttccggcaattccctgttcttggcctttcgatctgatgcctcagtcggtctatctggtttcgctatcgagttcaaagagaaacctcgtgaagcttgcttcgatcccggaaatatcatgaatggaacccgcgtggggacagacttcaaacttgggagcacaattacataccagtgcgatagcggctataaaatcctggatccatctagcattacatgcgtgataggagctgatggaaagccatcctgggatcaagtgctcccaagctgtaatgccccatgtggcggtcagtatactggctccgagggggtagtactaagtcctaattacccccataattacaccgccggtcaaatctgcctgtatagtataactgtacccaaggaattcgtcgttttcgggcagttcgcttatttccagactgccctcaatgacctggccgagctctttgacggcacgcatgcacaggctaggcttctgtcttccttgtcaggtagtcactctggcgaaacacttcccctcgccacctcaaatcagatcctgctgagattctccgccaaatctggcgcttccgcaagaggtttccacttcgtgtaccaggccgtgccgcgaacatccgacactcagtgctcatctgtgcccgaaccgagatacggaaggcgcattggcagcgaattcagcgctggatccatcgtccggtttgagtgtaaccccggatatctattacaggggtccacggccctccactgtcagtcagtgcccaacgcacttgcacagtggaatgatactattcctagctgtgtggttccgtgctctggcaatttcacccaaaggcgaggaactatactgagccccggttatccggagccgtatggcaacaatttgaactgcatttggaaaatcatcgtgacggaaggctcaggtattcaaatccaggtcatatcctttgccacagaacaaaactgggacagcttagagatccacgacggaggagacgtgacagctccacggctcggctctttttctgggaccaccgtgcccgctctgctgaactctacatcaaaccagctgtaccttcacttccagtcagatatctctgtagcggctgctgggtttcacctcgaatacaagaccgtagggctcgcagcttgccaggagccagccttaccttcaaactccattaaaatcggtgacaggtatatggtcaacgatgtcctgtcattccagtgtgagcccggatatacactccaggggcgaagtcacatcagttgcatgccgggtactgtacgtcgatggaactaccctagcccgctgtgcatcgcgacttgtggcggaaccctgtcgaccctggggggagtgatcttgtcgcctggctttccaggtagttaccccaataatctggactgcacctggcggatcagccttcccatcggatacggcgctcacattcaattccttaacttttcgacggaagccaaccacgactttctcgagattcagaacgggccttatcacacaagtccaatgatcggtcaattcagcgggaccgatctccctgcagccctgttatcaacgacacatgagactctgatccatttctacagcgatcactcacagaataggcagggattcaagctggcatatcaggcgtatgagcttcagaactgccccgatccccctcccttccagaatggttacatgattaactctgattattccgtcggccagagtgtgtcatttgaatgctaccccggatatattctgattggccaccccgtcctcacctgccaacacggaatcaatagaaattggaattacccttttcctcgctgtgatgcaccttgtggctacaatgtcaccagccagaacgggacaatctattctcccggattccccgacgagtacccaattctaaaggactgtatttggttgatcacagttcctccaggacatggtgtatacatcaatttcactctgctccagacggaagcggtcaacgactacattgccgtgtgggacggtcccgaccaaaattcccctcaattaggggtattctctggaaacacagcattggagacagcgtactcgagcacaaatcaagtcctgctcaaattccattccgacttctctaacggcggattcttcgtgctcaactttcacgcttttcagttaaaaaaatgccaaccaccacccgcagttcctcaagccgaaatgttgacagaggatgatgactttgagatcggcgactttgttaaatatcagtgccacccgggatatacacttgtgggcactgatatccttacttgtaagctctctagtcaactgcagtttgagggatccctacctacgtgcgaggcacaatgcccggctaacgaggtgaggactggctcatccggcgtgattctctctcctggctacccaggaaattattttaactcccaaacctgcagctggtccatcaaggtggagcccaactataacattaccattttcgttgacacttttcaatctgaaaagcaatttgatgccctggaggtgtttgatggcagctccggacagagtcccttgctcgttgtgttgtcaggcaaccataccgaacaaagcaactttacttctcgttctaaccagctgtatctgcggtggtctactgatcacgcaacctctaaaaagggtttcaagatacggtatgcggctccatactgttctttaacacatccattaaagaacggaggcatcctcaatcggaccgcaggtgctgtcggatctaaggtgcattacttttgtaagcccggatatcggatggtgggacacagcaatgctacatgcagaaggaatccgctcggtatgtaccagtgggattcgcttacgcctttgtgccaggctgtaagttgtggaattcccgagagcccaggaaatggtagcttcactggcaacgaattcaccttggactctaaagttgtatacgaatgtcatgaggggttcaaactggagtcttcacagcaggctactgctgtctgccaggaggatggtttatggtccaataaggggaaaccacccacatgtaagccagtcgcatgtccctctattgaggctcaactgtctgagcacgtaatatggcgtctagttagcgggagcctgaacgaatatggagcacaggtgctcctgtcctgcagccccggttattatctggaaggctggaggctgttgagatgccaagccaatggtacttggaatataggggacgaacgaccgagctgccgggcaggacactgtggatctcccgatcccattgttaacggacatatctcgggcgacggtttcagctaccgcgatacagtggtatatcagtgtaatcccggatttcgcctcgtcgggacatcagtgcggatatgccttcaggaccacaagtggtccgggcagactcccgtctgtgtcccaataacttgtggacatcctggaaatcctgcgcacggtttcaccaacggctctgaatttaatttgaatgatgtggtgaactttacttgtaatacagggtatctgctacagggcgtcagccgtgcgcagtgccggtctaacggccagtggagtagtcccctgcccacttgccgcgtcgtgaactgctctgacccaggcttcgtggaaaatgccataagacacggccaacagaactttccagagtcatttgagtatggcatgtctatcctatatcattgtaagaagggcttctacctcttgggttccagtgccttaacttgtatggctaatggcctgtgggaccgcagcctgccaaagtgtctagccatcagttgtggccaccccggagtgcccgctaacgccgtcctgacaggcgagctttttacttacggcgcagtggtacattactcctgtcggggaagcgagtctctcatcggcaatgacaccagggtgtgccaagaggatagtcattggagcggcgctcttcctcactgtaccggtaataatcctggcttctgcggtgatccaggaactcccgctcacggcagtaggctgggtgacgatttcaagactaaatctctccttcgcttctcatgtgaaatggggcatcagttgcgagggagccccgagcgcacatgcctgctgaatgggtcgtggtccggattgcagccggtctgtgaagctgtgctgtgcccccaacccccacccgtccagaacggaaccgtggaaggttctgacttccgttggggatccagtatctcttactcctgtatggacggctaccagctgtcccactctgccattctctcctgtgagggacgtggagtctggaagggcgaaatccctcaatgtcttcctgtattctgtggagaccctggcattcccgcagaggggagactgtctggaaagtcctttacatataaaagcgaggtgttcttccagtgcaagtcacccttcatcctcgtgggcagcagccgcagagtgtgccaggctgatggcacctggtctggtatccaaccaacttgcatcgacccagcccacaatacctgtcccgatccaggaactccacactttggcatccaaaattccagccggggatatgaagtcggatctacagtctttttcagatgccggaaaggctatcatatccagggttcaacaaccaggacatgcttggcaaacctcacttggagcggcattcaaactgagtgcatacctcacgcttgccggcaaccagagacgccagcccacgccgacgtccgggcaattgacttaccaacatttggatatactctagtgtatacctgtcatcctggcttcttcttggcaggcggatccgagcaccgtacctgtaaagccgatatgaaatggaccggtaagtcaccggtttgtaaaagcaagggcgtccgggaagtcaatgaaactgtgacgaagacacccgtcccatctgacgtgttttttgtgaacagcctatggaaggggtactacgagtatctgggtaaacggcaaccggcaacactcacagtcgactggttcaatgcaacatctagtaaggtcaatgcgacttttagcgaggcgtctcccgtggaacttaaactgacgggcatctacaaaaaagaggaagctcatctgctgctcaaggctttccagatcaagggacaggctgacatttttgtttctaaattcgagaacgacaactggggcctggacggatacgtctctagtggattggaacgcggaggcttcaccttccagggggacatccatggcaaggactttggcaagtttaagctcgagaggcaggaccctcttaaccctgaccaggattcctcaagccactatcatgggacttcttccggctctgtggctgcagccatcctggtcccgttctttgctctcatcctcagcggctttgccttctatctgtataaacatcgtactcgacccaaggtgcagtacaatgggtatgcgggtcacgagaactcgaacggccaggccagcttcgagaatccgatgtacgacaccaatctgaaacctaccgaggcgaaggcagtgcggtttgacaccaccttaaacactgtttgtacggtcgtata

SEQ ID NO: 219505 - DNA, 10464 bp, synthetic construct
  misc_feature 1..10464: note = Description of Artificial Sequence: Synthetic coding sequence
  source 1..10464: mol_type = other DNA
atgaggttaatcagcattgccccaggcccacgctggcaggtgcagagtcaccatcctagatccgcgggtcaaaattgtacttttcagctgcacggcccaaacgggaccgtagagtcacctggatttccctacggctaccctaattacgccaactgtacttggacgattacagcagaagagcagcacagaatccaattagtgttccagtcattcgccctggaagaagactttgatgtcttgtccgtctttgatggtccaccacagcctgagaatttaagaacacgactgaccggcttccaactgcccgctacgatcgtgtccgccgctactacgctctcactccgattaatctccgactacgcagtgagcgcgcaggggttccatgccacctatgaagttctgcccagtcacacatgcggcaatcccggtaggctcccaaacggcatccaacagggatctacattcaacctgggcgataaagtcagatactcctgcaatttaggattcttcctcgaaggacacgccgtcttaacatgtcatgctggttctgaaaatagcgccacctgggacttccccttaccttcctgcagggcggacgacgcgtgtgggggaacgttgcgcggacagtcagggattatatcttctcctcattttcccagcgagtaccataacaatgccgattgcacttggaccatcctggccgaactgggagacaccatcgccctggtctttatcgatttccagctcgaggatgggtatgatttcttggaggtcacaggtaccgagggaagctctctgtggttcacaggagcttctcttccagcgccagtcatctccagcaaaaattggctgcgtctccacttcacaagcgacggcaatcataggcagcgaggattttctgcccagtatcaagtgaaaaaacaaatcgaacttaaatcacggggagtcaaactcatgccatcgaaagataacagtcagaaaacaagtgtgctcactcaggtgggggtctcccaaggtcataacatgtgcccagaccccggaattcccgagagggggaagaggctcggaagcgactttaggttaggctcctccgtgcagtttacttgtaatgagggctacgaccttcaggggagcaaacggattacatgcatgaaggtgtccgacatgttcgccgcttggagcgaccatcgaccagtgtgccgcgctagaatgtgtgacgcacacttacgcggaccatcaggaatcattacttcacctaatttccctatccagtacgataataatgctcactgtgtgtggattattacagccctgaacccatcaaaggtgattaagctggctttcgaggaatttgacttggaaaggggatacgatactcttactgtcggtgatggcggtcaagacggcgaccagaagaccgtcctgtacattctaaccggcaccagtgtccccgacttgattgtgagcaccaaccaccagatgtggcttttgttccagacggacgggagcggatcaagccttggattcaaggcctcatacgaggaaatcgagcagggcagttgtggtgatcccggaattcctgcctacggacgacgtgaggggagcaggttccaccacggggacacgttgaaattcgaatgccaaccagcctttgagttggttggacaaaaagccataacttgccagaagaataatcagtggagtgcgaagaaaccaggttgtgtatttagttgtttctttaatttcacaagccctagtggcgtagtcctgtccccaaattatccggaagattacggcaaccacctgcactgcgtgtggctcatcctggcccgacctgaatcacgcatccacctagcgttcaatgacattgacgtcgagccacaattcgattttctcgttatcaaggacggggcaacggcagaggcgcctgtcctgggaaccttttcaggaaatcaattacctagctccatcacatcaagcgggcacgttgccaggcttgagtttcaaacagatcacagtaccgggaaaaggggattcaatattacctttacaaccttccgccacaacgaatgtcccgaccctggtgtaccagtcaacggtaagaggttcggtgattctctgcaactgggcagtagtatttccttcttatgcgacgagggctttcttggaacccagggaagtgaaaccatcacttgtgttctcaaagaggggagcgtggtctggaattctgctgtgttgcgctgcgaagcaccctgtggtggacacctgacaagcccaagtggcaccattctttcccccggttggcccggtttctataaggatgccctgtcttgcgcctgggtcatagaggctcagccgggataccctattaaaattaccttcgatagattcaaaacagaagttaactatgacacgctggaggtccgggatgggagaacatactcggcgccactcattggcgtctaccacggcactcaggtcccccaatttttgattagtacaagcaactatctgtacctgctgttcagtactgataagtcgcattccgatataggttttcaactccggtacgaaactatcactttgcagtctgaccactgcctggacccgggaatacctgtgaatggccagcgccacggcaatgacttctacgtgggcgctttagttactttcagctgcgattctggctacacactctcagacggagagcccttggagtgtgaacctaacttccaatggagtcgcgcactcccatcttgcgaagctctctgtggcggttttattcagggatcttccggcacaattctatcacctggctttccagacttctatccgaataaccttaattgtacatggataatcgagactagccatggaaagggcgtgttcttcacatttcacacttttcacctcgagagcgggcatgactacttgctgatcacagagaatgggtccttcacccagccattgcgtcagctgaccggcagcaggctccccgctcctatcagtgcaggcctgtatggcaattttactgctcaagtccggttcattagcgatttctctatgagttacgaaggtttcaatatcacatttagcgagtatgatctggaaccttgtgaagagcccgaagtaccagcctacagcattcgcaaaggacttcagttcggggtcggcgacactttaacttttagttgcttccccggttaccggcttgaaggcaccgcaagaattacctgcctgggcggacggagacgattatggtcgtcgccacttcccaggtgcgtcgccgaatgtggcaattccgttaccgggactcagggcacactgctctctcccaattttccagttaattacaataacaatcatgaatgtatatatagcatccagacacagcctgggaaaggtatccaactaaaggcccgagccttcgagttatcagaaggagacgttctgaaagtctacgacggcaacaataactcagccagacttttaggagtcttctctcattcagagatgatgggcgtgacccttaatagcaccagctcatcactatggcttgacttcattacagacgcggaaaacacctcaaaggggttcgagttgcatttttcttccttcgagctcatcaaatgcgaagacccaggaaccccaaaattcggatacaaggtccacgatgagggacacttcgccggatcctcagtgagcttctcctgcgacccaggatattccctgaggggttctgaggagctactgtgtctctcaggggagcgaaggacgtgggaccggcctttgccaacctgcgtggctgaatgcgggggtaccgttcgcggagaggtaagcggacaggtgttgagcccagggtaccccgctccctatgaacataacctgaattgcatttggacaattgaagccgaagccggatgtaccatcggcctccacttcctcgtgttcgacaccgaagaagtgcacgacgttctgcgaatttgggacggcccagtggaatcaggtgtgctgcttaaagagctgagcgggcctgccctccctaaggacctgcactcaacattcaacagcgtggtcctacagttcagcacagacttttttacatccaaacaaggtttcgccattcagtttagcgtgagcactgctacttcttgcaatgatcctggcataccccagaatggttctcgcagtggggatagttgggaagccggtgattctaccgtgtttcagtgtgatcccggatacgctctgcaggggtccgctgaaatatcttgtgttaaaatcgaaaataggttcttctggcagccctctccacctacgtgtatcgcaccctgcggtggggacctgactggcccttccggcgttattctgtcgccaaactaccccgagccatatcctcccggtaaagaatgcgattggaaagtgactgtcagcccagattacgttattgctctggtgtttaatatttttaatttggaaccaggctacgactttctacacatctatgacggtcgcgacagtctgagtcctctaataggatctttttatggctcacagctgccgggacggattgagagtagcagcaattccctctttttggcctttcgctcagacgcctccgttagcaacgcaggattcgtcatagattataccgagaatccaagagaatcttgctttgatccaggttctattaagaatgggacccgggtcggaagtgacctcaagctgggctcttcagtgacttactactgccatggtggatacgaggtagaaggcaccagcaccctcagttgtatcctgggcccagatggaaagcctgtttggaataaccccaggccggtttgtaccgcaccatgcgggggtcagtacgtcgggtctgatggcgtggtgctctcccctaactatccgcaaaattacacctcagggcaaatttgcctgtatttcgtgaccgttcccaaagactacgtggtcttcggtcagtttgctttttttcacaccgccctgaatgatgttgtggaagtgcatgatggccactctcagcattctcgcctcctgagttctttgtccggcagtcatactggggaaagcctgccattggctacatccaatcaggtgctgatcaagttcagcgcgaaggggttagcaccagcgcgtggtttccatttcgtgtaccaggccgtcccgaggacttccgccacacagtgctcatctgttccggaaccacgctacgggaaacgccttggctcagacttctctgttggcgctatagtgcgcttcgaatgcaattccgggtacgcacttcaaggctctccggaaattgagtgcctgcctgtcccgggagccttggcccaatggaatgtttccgccccaacttgtgtagtcccatgtggtggcaacttaaccgaacggagggggaccatcctgagccccggtttccctgaaccttacctgaacagcctaaactgcgtgtggaagattgtcgtgcccgaaggcgctggcatccaaattcaggttgtgtccttcgtgaccgaacagaattgggattcactggaggtattcgatggggctgacaacacagtgacaatgctggggtcattcagtggcacgaccgttcctgccctgctgaactcaacctccaaccagttgtatttgcacttttatagcgatatctccgtgagcgccgcaggatttcacctggagtacaaaaccgtgggactgagttcttgtcccgagccggcagtgccttccaatggtgttaagacaggagagaggtatttagtcaatgatgtagtgtctttccaatgcgaaccaggatatgccctccaaggtcatgcacacatttcttgcatgccaggaaccgtgaggagatggaactaccctccacctttatgcatagctcagtgtggaggcacagtggaggagatggaaggcgtgattttgtctccagggttccccggaaattacccttccaatatggattgttcttggaagattgccctgcccgtggggtttggggctcacattcagttcctgaacttttcaaccgaacctaaccacgattatatcgagataaggaatggaccctacgagacgagcagaatgatgggtcgctttagtggctccgagctgccttcatcgctcctgagcacgtcacacgagactaccgtgtatttccactctgaccacagccagaaccgcccagggttcaaactagagtaccaagacctcacctatagtcatcaaatctctagctttcttcgcggtttcgatctgtctgagttggagaggaccaacagtacaccgcctgtagcagcctcctacgtctgggaccttgatccaggatgcgaagcctacgagctccaagaatgcccggaccccgagccatttgccaatggaatcgtgcgcggagcagggtacaatgttggtcaatccgttacttttgaatgcctaccaggttatcaactgactggtcatcctgtgctcacgtgccagcatggtacaaatagaaactgggaccacccgctcccgaagtgcgaggtgccgtgcggagggaatattacttcatctaatggcacagtttattcacccggattcccgtcaccatattcctcctctcaggattgcgtctggttaatcacagtgccaatcggccatggagtcaggctcaacctgtcactgcttcaaactgagccctctggggactttataacaatctgggacggcccacaacagacagctcccagacttggcgtgttcactcgatccatggctaaaaaaaccgttcagagctctagcaaccaggtgctgctgaaatttcacagagatgccgcaaccgggggtatcttcgccatcgccttctctgcctatcctctgacaaagtgtcctcctccaactatacttcccaatgctgaagtggtgactgaaaacgaagaatttaatatcggagacatcgtccgttatcgatgcctccctggcttcaccctggtcggtaatgagatcctgacctgcaaactggggacctatcttcaattcgagggaccccctcccatttgtgaggtgcactgtcctacaaacgaattgttgacagactccacaggcgtgattctatcccagtcctacccaggtagctatccccaattccagacttgctcatggcttgtacgcgtcgaaccagattacaacattagtcttactgttgaatactttctgtcagaaaagcagtatgacgagtttgagatctttgacggcccttctggccagagcccactcctcaaagcactcagcggcaactattctgccccactcattgtgacatcaagctccaattctgtgtatctcaggtggtcctcagaccatgcctacaaccggaaaggctttaagatcagatacagtgctccttactgttcccttccaagagccccacttcacggttttatccttggacaaacttctacgcaaccaggaggttccatccacttcgggtgcaacgctggataccggttagtgggacatagcatggcgatttgtacccgccaccctcaggggtaccacttgtggagtgaagccatacccctctgtcaagctctgtcatgtgggctgccagaggcacccaagaatggcatggtgtttggcaaagaatatacagtcgggactaaagcaatgtatagctgcagcgaaggttaccacctacaagctggcgcagaggccaccgccgaatgcctcgatacaggtctgtggtctaacagaaatgttcctccgcagtgtgtgcctgtgacctgcccggacgtaagcagtatttctgtggagcatggcagatggagactgatattcgagacgcaataccagttccaagcccagcttatgctcatttgcgacccgggatattattacaccggacagagagtcatccgatgtcaggcaaatggcaaatggtctctgggcgacagtacccctacttgcaggatcatttcatgtggcgaattgcccataccccctaatggacaccgtatcggaaccctgtctgtctatggcgctactgctattttttcctgcaacagtggctacacgctggtgggctcgcgggtgcgagagtgcatggctaacgggctgtggagcggtagcgaagttcgctgcctggccggacattgcggcacccccgagcctattgtcaacgggcacatcaacggcgagaactatagctaccgagggagtgtggtgtatcaatgtaacgcaggattccgactgatcggaatgtctgtaaggatttgtcagcaggatcaccattggtctggtaaaactcctttttgcgtgttagtgagctgcggccatccaggatcgccaccccatagtcagatgtcaggcgactcttacacagtaggggctgtcgtgagatactcctgcataggaaagaggactctagtgggcaattccacccgaatgtgtggactggacggccattggaccggctcgctcccgcactgctctggaacgagcgtgggcgtctgcggtgatccagggatccccgcacatggaatcagactgggtgacagcttcgacccaggaactgtgatgcgattttcttgtgaggccggtcatgtgttgcgcggatcctccgagaggacttgccaggccaacggaagctggagcggcagccagcctgagtgtggtgttatcagttgtggcaatccagggacaccgtctaacgcccgagtggtctttagcgacggcctggtgtttagcagcagcatagtttatgagtgtcgagaaggttactacgcgactggactgctgagtcgccactgtagcgtgaatggaacgtggaccggtagcgacccagagtgtctcgtcattaattgtggggaccccggaattccggctaacggactgaggctggggaatgatttccgctataataaaaccgtcacctatcagtgtgtccccggatatatgatggaatcccacagagtcagcgtgctctcttgcacaaaggatcgaacatggaacggaaccaaaccagtctgcaaagcactgatgtgtaaacctccacctttgatcccaaacgggaaagtcgttggatctgacttcatgtggggaagtagcgtaacgtacgcctgcctcgaaggttaccaattgtcactcccggctgtgtttacctgtgaagggaacggctcttggaccggagaattgccacagtgtttccctgttttctgtggagatcctggagtgcccagtagaggacggagagaagacagggggtttagctatcgtagctcagtcagttttagctgtcacccacccctggtgttagtcggctctccaagaagattttgccagagtgacggcacttggtctggcacccagccatcatgcattgatccaacactcaccacctgtgccgacccgggtgtccctcaatttgggatccagaataattcacagggctatcaggtggggtcgaccgtgcttttccggtgccaaaagggttatttacttcagggatcgaccacacgcacgtgcctcccaaatctgacatggtctggcacacccccagactgcgtgccccaccattgccggcagcctgagactccgactcacgccaacgttggcgctctagatctgccgtctatgggctatacgttgatctactcctgccaagagggatttagccttaaggggggatctgagcacagaacctgtaaggccgacggatcttggacaggcaaaccgcctatttgtctagaagtgcggccaagtggccgaccaatcaataccgccagggagccgccactcactcaggcactcattcctggtgacgtgttcgccaaaaactccctgtggaagggagcgtacgaatatcaaggaaagaagcaacctgctatgctgcgggttacagggttccaggtcgctaattcaaaagtgaacgccactatgatcgaccactccggagttgagctccatctggctggaacgtacaagaaggaagatttccacttattgctgcaggtctaccagatcacaggacccgtggagatcttcatgaataaattcaaggacgatcactgggcactggacggccatgtttcttctgagtcctccggcgctactttcatctaccagggctccgtgaaaggacaaggatttggacagttcgggtttcagcgcctggatctacgtctgctcgagtcagaccctgagtcgataggccgacacttcgcaagcaattcttccagcgtggcagccgctatcctggtgcctttcatcgctctgattattgccggttttgttctgtacctttataagcacaggagacgacctaaggtgccattcaatggctatgcaggtcacgagaataccaacgttcgagcaaccttcgagaaccctatgtatgacagaaacatccagccaacagacataatggcatccgaggccgagttcacagtctctaccgtttgtacggccgtctaa

SEQ ID NO: 219506 - DNA, 678 bp, synthetic construct
  misc_feature 1..678: note = Description of Artificial Sequence: Synthetic coding sequence
  source 1..678: mol_type = other DNA
atgtgtgatgcccatctcaggggcccatctggaatcataaccagcccaaattttcccatccagtacgataacaacgcacactgtgtatggataatcaccgccctgaacccttccaaggccggaggagatcccggaaatattcagtgcaataaagagggcttgtctgtggaaacgcagtccctgcggctacgaaatagatcctgtctcttgggaaattcaaaagataacggctgttgcgttccaaacccggtccatggcactgggctgcaggtgattaaattagccttcgaggagttcgatctagagcggggatacgataccctcaccgtgggtgacggaggacaggacggggatcagaaaacagtcctgtatattctgactgggacatccgtgccagatcttattgtgtcaacaaaccaccagatgtggctcttgtttcaaactgatggttcaggcagcagcctgggatttaaagccagttatgaagaaatcgagcaagggtcctgcggggacccaggcatacctgcatatgggagacgggagggaagccgtttccatcacggcgatactctaaaatttgaatgccagcctgcattcgaattagtcggccagaaagctattacatgccagaagaataatcagtggtccgccaagaaacctggatgtgtgtgtaagtag

SEQ ID NO: 219507 - DNA, 1281 bp, synthetic construct
  misc_feature 1..1281: note = Description of Artificial Sequence: Synthetic coding sequence
  source 1..1281: mol_type = other DNA
atgttgggatccttctcagggaccacggtgccagccctgctgaatagtaccagtaaccagctttacctccatttctattcagacatctccgtgtcagccgcaggatttcacctagaatataagactgtgggcctctcctcgtgccctgagcccgctgtaccatctaacggcgttaagacgggcgagcgttatctggtcaatgatgtggtttccttccagtgtgagcccggttacgccctgcagggccacgctcacattagctgtatgcccggtaccgtgaggcgctggaactatccgcctccgttgtgtatagcccagtgcggaggcaccgttgaggaaatggaaggagtcatcttatcccctggattcccaggaaattatcctagcaatatggattgttcgtggaaaattgccctccccgtaggcttcggtgcccatatccagtttctgaacttctccaccgaacctaatcatgactatatcgagattcggaatgggccttacgagacgtctagaatgatgggaaggttctctgggagcgagttgcccagttcattgctcagtacttctcacgagaccacagtgtactttcacagcgatcatagccagaacaggcccggatttaagctcgagtatcaggcgtacgagcttcaagagtgcccagatccggaacccttcgctaacggcattgtgcgcggagcaggatataatgtgggtcagtcagtcacattcgaatgtttgcctggttaccaactgactggccatccagttctgacctgccagcatggcaccaaccgcaattgggaccatccccttccaaaatgcgaggtgccatgcggaggcaatatcaccagttccaacggaaccgtatactcccctggattcccatccccttactccagctcgcaggattgcgtttggctcatcaccgttccaattgggcacggcgtaagactcaatctgtccctcttgcagaccgaaccttccggagactttatcacaatatgggacggcccacagcagactgcgccaaggctcggagtcttcacccggagcatggctaaaaagaccgtccagtctagtagcaatcaggtgcttctgaaatttcaccgcgatgcggctacgggagggatattcgccatcgcctttagcgatcactgccggtacttcaatcagaaatctgggaagctggactttaccccctcctccaccctggggcagctgtgtaaaacattacatcgtagtctccctcacctgcgactccagtttttacacctgtag

SEQ ID NO: 219508 - DNA, 3504 bp, synthetic construct
  misc_feature 1..3504: note = Description of Artificial Sequence: Synthetic coding sequence
  source 1..3504: mol_type = other DNA
atggtcatcgtcattcttttccccgctgaatgcggaaactctgtgacgggaactcaggggacactgctgtcgcctaactttcccgtcaactataacaacaaccacgagtgcatctatagcatccaaacacagcctgggaagggtattcagctgaaggcgcgagccttcgaactctctgaaggcgatgtacttaaagtgtatgacggcaataataattcagctcgcctgctgggtgtgtttagccatagcgagatgatgggcgtaaccttaaattcaacgtcgtcatccctctggctcgactttatcaccgacgcggagaatacaagtaaaggtttcgaactccatttttcgagctttgaactgatcaaatgtgaagatcccggtacacctaaattcggctacaaggtccatgacgaggggcacttcgccggatcatccgttagcttttcctgcgatcctgggtattcactccgtggatcggaggaactcctgtgcctctcgggggaaaggagaacctgggatagacccctcccaacctgcgtcgccgagtgcggcggaactgttagaggagaggtgtcaggtcaagtgctgtctccaggataccctgcaccgtacgagcacaacctcaactgtatttggacaatagaggcagaggccggatgcacgataggcttgcatttcctagttttcgatacagaagaagttcacgacgtcttgcgcatttgggacggcccagtggagtccggagttttgctcaaagagctgagcggaccagcactgccgaaggatttacattccactttcaattcagtcgtactgcagttctcgaccgactttttcacgtccaagcagggctttgcgattcagtttagtgtgtcaaccgcaactagttgcaatgatccgggaattccccagaacgggtctcgctctggcgacagttgggaagccggagactccacagttttccaatgtgaccctggctacgcgctccagggatcagccgaaatcagctgcgtgaaaatcgaaaatcgtttcttctggcagcccagccctcccacatgcatagctccttgcggcggagatcttaccgggccaagcggggtcattctaagccccaattaccctgagccctatcctcctggaaaggagtgtgattggaaagttaccgtttctccagattatgtcatagcactggtgttcaatatattcaatctggagcctgggtatgactttcttcatatttatgatggtcgggacagcctgagcccactgattgggtcattctacgggtcacagctgcctggacgcattgagtctagtagtaactcactgttcctagcattccggagcgacgcctcggtttcaaatgccggattcgttatcgactacaccgagaaccctcgggagtcgtgttttgaccctggaagtattaagaacggcaccagggtcggatctgacctgaaactgggctcctccgtgacgtattattgtcacgggggatacgaggtggaagggacttcaacactgtcctgcattctggggcctgatggcaaaccggtctggaacaatccgaggcccgtttgtaccgcaccttgcgggggacagtatgtcgggagcgacggcgttgtcctgagtccgaattaccctcaaaattataccagcggacagatatgcttgtatttcgtgaccgtccccaaggattatgtggtgtttggacaattcgccttcttccacaccgctctaaacgatgtggtcgaagtgcacgacggccattcccagcattctcggctcctaagcagcctgtccggtagccatacaggagaaagcctcccactggctacttctaaccaggtgctcatcaaattcagcgctaagggtttggcacccgctagaggatttcacttcgtgtatcaagccgtcccaagaacgagtgctacacaatgtagtagcgtcccagagcctcgatatggcaagagactcggtagcgactttagtgtgggtgctatcgtgcgattcgaatgcaactctgggtacgccctccagggttctccagaaatcgagtgcctgccggtgccaggcgctcttgcccagtggaacgtatcagcccctacttgcgtggtgccttgtggcggaaacttaactgaacgcagggggacaatcctatcacccggatttccggagccctatcttaatagcttgaattgcgtctggaaaatcgtggtgcccgaaggcgctggtatccagattcaggtggtttctttcgtgacggaacagaattgggactcccttgaggtgttcgacggcgctgacaacaccgtcaccatgttgggctctttttcaggtactactgtgcccgctctgctgaactctaccagcaatcagctgtacctccacttctattcagatatctctgtgtccgccgcaggcttccacctggagtacaaaactgtcggtctgtcttcatgccccgagccagcagtaccgtctaatggcgttaagacaggagagcgctatctggtgaacgacgtggtatcattccaatgcgaacccggatacgctctgcagggccatgctcacatctcctgcatgccaggaacggtccgacggtggaactacccaccacctctatgtatcgcacaatgcgggggtacagtggaggaaatggaaggggtgatcttatctcccggttttccagggaactatccatccaacatggactgcagctggaaaattgcgctgcctgtggggtttggcgcacacattcaattcctgaacttttcaaccgagcccaatcacgattatattgaaattcgcaatggaccctacgaaactagtagaatgatggggagattcagcggcagtgagctacctagctcgttgctgagtacgtctcacgaaacgactgtgtatttccactctgatcacagccaaaatcgcccaggatttaagctagagtaccaagcttacgaactgcaagaatgcccagatccagaacccttcgccaatgggatcgtccgaggggcagggtacaacgtaggacagagtgtgacttttgaatgcttacctggataccagctgaccggccacccagtcctgacttgccagcacggcacaaaccgcaattgggaccatcccctcccaaagtgtgaagtcccatgcggagggaacataactagttctaatggaacagtgtatagtcccggtttcccctctccatattcgtccagccaggattgtgtctggctgataaccgtgcccatcggacacggggttagactgaatctctcccttctacagacagaaccttccggcgacttcattaccatatgggacggccctcaacagactgcccctcgcttaggcgtgttcacacgctccatggctaagaaaacagtacagtcttcatccaaccaagtgttgttaaaattccacagagacgccgcaactggaggcatttttgcaatcgcattcagtgggcacctggccgctgtatgcacactgtag

SEQ ID NO: 219509 - DNA, 10896 bp, synthetic construct
  misc_feature 1..10896: note = Description of Artificial Sequence: Synthetic coding sequence
  source 1..10896: mol_type = other DNA
atgccacggtctcgcggtagagagcttggacgatgcggttgtcctgcgggacgggctcgcggtgagactgggatatctgcactggtcccaggcgcagggagccgctggggccgacctccccctcctaccccacccccactcttgctgttactcggctgcggacttttatcagtgtccgcagcagccggacagaattgcacgtttcagctgcacgggcctaatggtaccgtggagtcgcccggatttccatacggctatcccaattatgccaattgcacatggactatcacagctgaggagcagcaccggatccaactggttttccagtcgttcgctctggaagaagactttgacgtactgtccgtgttcgatggtccaccccagcctgaaaatcttaggactcgcctgaccggattccagctcccagcaactatcgtcagtgctgccaccaccctctctctacgcctgatcagtgactacgcagtatctgctcaagggttccacgccacctacgaagtccttccatcccatacatgtgggaatccaggacgcttgcccaatggaatccagcagggatcaactttcaacctgggcgataaggttagatactcttgcaacttgggttttttcttggaaggccacgcagtgctgacatgtcatgccggtagcgagaatagcgccacttgggactttccgctgccatcatgccgtgcggatgacgcctgtgggggtaccctgcgcggacagagcggcataatttcttccccccactttccttccgaatatcacaataatgctgactgcacctggactattttggcagagctgggcgacactattgctctggtgtttatcgacttccagctcgaggacgggtacgactttctcgaggtcactggtacagaagggtcctcgctgtggttcacgggggcttcactgcctgcaccggttatatcctctaaaaattggctgagattgcacttcacctcagatggtaaccataggcagcgcggattctcggctcaatatcaagtgaaaaaacagatcgagctgaagagtagaggcgtgaagttgatgcccagcaaagacaattcacagaagacttccgttctgactcaggtgggagtttcccaaggtcataacatgtgcccagacccgggaatccccgaacgcggaaagcgcctcggatccgacttcaggttgggatcatccgtccaatttacttgcaacgaaggttatgacctgcagggttcgaagcgcattacttgcatgaaggtttcagatatgtttgcagcttggagcgatcacagacccgtgtgccgtgccagaatgtgtgatgcgcatctccgcggtccctctggcatcattacctcccctaattttccaattcaatacgacaacaacgcgcactgtgtctggatcataaccgctctgaatccttcaaaagtgatcaagctggcatttgaggagttcgacttggagcgaggctatgacactctcactgttggggatgggggacaggacggcgatcaaaagacagtgctgtacatcctgaccggcacttctgtcccagatcttatcgtctcaacgaatcaccagatgtggctactattccagacagatgggagtggaagctccttaggcttcaaggcctcatatgaggagatcgagcagggatcctgtggggatcctggcatcccagcttacggaaggcgcgaggggagccgcttccatcatggagacaccttaaagttcgagtgccagcccgcatttgaactcgtagggcagaaagctataacctgtcagaaaaacaatcagtggtcggccaaaaaacccggatgcgtgttcagctgcttcttcaacttcacttctccaagcggcgtagttttatcacccaattatccggaggattacggcaaccatctgcattgtgtgtggctgattcttgccaggccggagtcaagaattcatctcgccttcaacgacatcgacgttgaaccccaattcgatttcctggtaattaaggacggggcaaccgctgaggcgcctgtgctcgggacttttagcggcaatcagctgcccagctccatcaccagctctggacatgtcgccaggctggagttccagacagaccactccacaggcaagcgcggattcaatattacttttacaacatttagacacaacgaatgtcctgaccccggtgttccggtgaatggcaagcggtttggcgatagtcttcagttggggtcttccatttcttttctctgtgacgagggattcctgggcacccaggggagcgagaccataacttgcgtcttgaaggaagggtccgttgtgtggaattccgcggtccttcgatgcgaagccccatgtgggggacacctaacctccccctccggaactattttgagtcctggctggcctggcttctataaagatgcattaagctgtgcctgggtgatcgaggctcagccaggttatcccattaagatcacatttgatagattcaaaaccgaggtgaattacgacacacttgaagtgagagacggccgtacctattccgccccactaataggcgtctaccatgggactcaggttccacagtttctgatttctaccagcaattacctctacctgctgttcagtactgataagtctcattccgatatcgggttccagcttcggtatgaaaccatcaccttgcagtccgaccattgtctagatccgggaatccccgtcaatggtcagagacatggaaacgacttttatgtcggtgcgctggttacttttagctgcgactccggctacacactttcagatggagaacctctggaatgtgagcccaattttcagtggtctagggccctcccttcctgtgaagccctgtgtggcggatttattcaggggtctagtggcactattctttctcctggtttccctgacttttacccaaataacctgaattgcacatggattatcgagacatcgcatgggaagggcgtgttttttacttttcacacgtttcacctggaatctggacacgactacctgctgatcaccgaaaatggttctttcacccaaccgctgagacagctaaccggatcgaggctacccgcacctatcagtgcaggcctttacggcaacttcacagcccaggtgcgattcatcagtgatttctctatgtcatatgaggggtttaacataactttttctgagtatgatcttgagccgtgcgaggaaccggaggtacccgcttacagcataaggaaggggttacagtttggagtgggtgacaccctgaccttttcctgctttcccggttataggcttgaaggtaccgctagaattacatgtttaggtggacgcagaagactgtggagctccccactcccccgatgtgtggcagagtgtggaaattccgtcactggaacgcagggaacacttttgagtccaaatttcccagtcaactacaacaataaccatgaatgtatatactcaattcaaacccagcctggaaaggggatccagctcaaggcacgggctttcgagcttagtgaaggtgatgtgttaaaagtatacgacggaaataacaactcagctcggctgcttggcgtgttctcccactccgagatgatgggcgtgacacttaactccacgtccagctcactatggttggatttcattaccgatgccgagaacacatccaaaggatttgaactgcacttctcctccttcgaattgatcaagtgtgaagaccctggtaccccgaagtttggctacaaagttcatgacgaaggccattttgccggaagttcagtcagcttctcatgtgaccctggttactcgctgcgtggaagcgaggaattactctgcctgtctggagaaagaaggacctgggataggcccctgccaacttgcgtagcagagtgcgggggtactgtgcgaggggaagttagtgggcaggtgctgtcccccggttaccctgcgccttacgagcacaatctcaactgcatttggaccatagaggcagaggcaggctgcaccataggcttgcatttcctggtcttcgatacagaagaggttcatgatgtcctccgtatttgggatggaccggtcgagagcggggtgctgctgaaggaactatcgggcccagctttacctaaagatcttcatagcactttcaattcagttgtgctgcaattctccacggactttttcacttcgaaacagggcttcgcaatccaattctcagttagcacagccacctcctgcaacgatccaggcattccacagaacggaagtcggtccggggatagctgggaggcaggagactcaaccgtattccagtgcgatccaggctatgccctgcagggaagtgctgagattagctgtgtgaaaatagagaataggtttttctggcagccgtcaccacctacatgcatcgccccttgcgggggagatctgaccggccctagcggagtgattctgtctccaaattaccccgaaccgtaccccccaggtaaagaatgtgactggaaggtcacagtctcgcccgactacgtgatcgctcttgtcttcaatatcttcaacttagaaccagggtacgacttcctacacatctacgatgggagagatagcttgtctccccttatcgggtcattctacggtagccagctgccaggcagaatagagagcagctcaaactctctgtttctggcctttagaagcgacgccagcgttagtaacgctggctttgtgatcgactacaccgaaaatccacgggagtcctgcttcgatccagggtcaattaagaacggcacacgtgtcggctccgatctcaaattaggcagttccgtgacctactactgccatgggggatacgaggtcgagggcacatctactctgtcctgcatcttgggacccgacggcaaaccggtgtggaacaaccctcgtcccgtctgtacagccccatgtgggggacagtacgttggaagcgacggggttgtgttgtctcctaattatccccagaactataccagcggccagatctgcctctatttcgtcaccgttccaaaagattacgtcgttttcgggcaattcgctttcttccatacagccctgaacgatgtcgtcgaggtgcacgacggacatagtcagcatagccgcctactgtcatccctgagtggctcgcacacgggggagagtctgccattggccacatctaatcaggtgctgatcaaatttagtgctaagggcctggcccctgctagaggcttccactttgtctaccaagccgttcctcgtacatccgccactcaatgttcatctgtccccgagcctcggtatggcaagcgcctcgggtctgactttagcgtgggcgctattgttaggttcgaatgtaatagtggttatgccctccaaggaagcccggaaattgagtgcctacctgtaccgggagccctcgcccagtggaatgtcagcgctcccacctgcgtggttccgtgcggcggtaatcttacagaaaggcgcggaacaatacttagtccaggcttcccagagccttatctgaactccctcaactgtgtgtggaagatcgtggtgccagaaggcgcaggaattcaaatccaggtcgtgtccttcgtcacagagcagaactgggacagtctggaggtgttcgatggggctgataataccgtgacaatgctgggtagcttttccggtaccactgttcctgcactgctgaactccacttctaatcagctgtacctccacttctactcagacattagcgtcagtgcagcagggttccacctggaatacaaaactgttggactgagttcatgcccggaacccgcagttccctccaacggcgtgaagacaggggagagatacctggtgaatgacgtggtctcctttcagtgtgaacccggatatgctcttcagggccatgcacatatcagttgcatgcccggaacggtgcgtcgttggaattaccccccaccactgtgcatcgcgcagtgtggaggtacagtggaggagatggagggggtcattttgagtcctggatttcccggaaactatccctctaacatggattgtagttggaagattgcactgccggtgggattcggagcgcatatacagttcctaaatttcagcacagagcccaatcatgactacatcgaaattcgcaacggtccatatgaaacctccaggatgatgggccgtttctccgggagtgagctgccctcaagtctcctcagtacctcacatgaaaccaccgtgtattttcatagcgaccactcacaaaacaggcccggtttcaaacttgaatatcaggcttatgaactgcaagaatgtccagatcctgagccatttgcgaatgggatcgtacgtggggctggctacaatgtaggacagtccgttacgtttgagtgcctcccgggataccagctgaccggacaccccgtcttgacgtgccagcacggtactaatagaaactgggatcaccccttgcccaagtgcgaggtgccatgcggaggaaacattacttccagtaatggtaccgtgtattctcctggattcccctccccttacagcagcagtcaggattgcgtatggctgatcactgtccctatcggacacggcgtccgcctaaatctgtctctcctccagactgaaccatccggggactttattaccatttgggatggtcctcagcagacagcaccaaggcttggcgtgtttacgcgaagcatggccaagaaaactgtgcagtcctcatccaaccaggttcttcttaagttccacagggatgccgctaccgggggaatttttgccattgctttttcggcctatcccctgacaaaatgcccacctcctacaatcctccctaatgctgaagtggtgactgaaaatgaggaattcaatattggagatatagtccgatataggtgcctccctggcttcactctcgttggaaatgagattctaacatgcaaactcggtacctacctgcagttcgagggcccacctccaatctgcgaagtgcattgccctacaaacgagctgttgacagacagcacaggagtcatcctgtctcagtcctaccccggatcatatccacagttccagacttgctcttggctagtgcgcgtcgagccagattacaacatttcgttgaccgtagagtacttcctcagcgaaaaacaatacgatgaatttgagatcttcgatggcccaagcgggcagtcacctctgctgaaggctctctcaggcaattactctgccccactcatagtaaccagctccagtaattccgtctatctgcggtggtcttcagatcacgcctacaatagaaaagggtttaaaatcagatacagtgctccctattgttctctgcctcgggctcccctgcatggattcatacttgggcagacctctacccagcccggaggctctatacactttggctgtaatgctggataccgcttggtgggacacagcatggcgatctgcacacggcacccccagggatatcacctgtggtctgaagctatccctttatgtcaagccctgagctgtggcctgcccgaagcgcctaaaaatggtatggtctttggcaaagagtacaccgtcggaactaaggccatgtacagttgctcggaaggataccatctgcaggcgggagccgaggcaaccgcggagtgcttagataccggcctgtggtctaacaggaatgtcccgccacaatgcgttcccgtcacctgtccggacgtttccagtatatcagtcgaacacggaagatggaggcttattttcgagactcaataccaattccaagcccagttgatgctgatttgcgatcccggatattactataccggccagcgggtgattcgctgccaggctaacgggaagtggtcgctgggagactcaactcccacgtgtcggataatttcctgcggagagttacccatccccccaaacggacaccgaattggcacactgtccgtgtacggcgctaccgccatattttcatgcaatagcggatacacattggtcgggagtagagtgcgggagtgcatggcaaacggactttggtctgggtctgaggtgagatgcctggcaacgcagacaaagctccactccatcttctataaattactcttcgacgtcctctccagcccctcgctgaccaaggctgggcactgtgggaccccggagcctattgtaaatggccatataaacggagaaaactactcctatcggggatcagtagtgtatcagtgtaatgcaggctttcgcttgatcggcatgtcagtgaggatctgccaacaagatcaccattggtccggtaagacccctttctgcgtgcccattacatgtggacatccgggaaatcctgtaaatggtctcacccaaggaaaccagtttaatctgaacgatgttgtgaagttcgtctgtaaccccggttacatggcagaaggcgcagccaggtctcagtgtctggcttcagggcaatggagcgacatgcttccaacctgtaggatcatcaattgtactgatcccggacaccaagaaaatagtgtcagacaggtgcatgcaagcgggccacatcgttttagcttcggcactactgtaagttatcggtgcaaccatggattctacctgctcggcaccccagttttatcttgtcagggcgacggtacctgggataggcctcggcctcagtgcctgctggtcagttgcggtcatccaggtagccctccgcactcacaaatgagtggtgactcttacaccgtgggagcagtcgttcggtattcatgtatcggcaaacgcacattggtcgggaattctacacgcatgtgtggcctggacgggcattggaccggctccttacctcattgcagtggaactagcgtgggtgtgtgtggggatcccggtatcccagcccatggcatccgactcggtgactccttcgaccctggaacagtcatgcggttttcctgcgaggctggccatgtcctcagaggctctagcgaacggacgtgtcaggccaacggcagctggagcgggtcacaacctgagtgcggcgttatcagttgcgggaaccccggaacaccttcaaatgccagagtagttttctccgacggattggtttttagtagttcaatagtctacgaatgccgcgagggttactatgccacaggcctgttgtctaggcactgctctgttaacggtacgtggacaggcagtgaccctgaatgtcttgtaatcaattgcggagatcccggaatcccagccaacggactgcgcctggggaacgatttcaggtataataagacagtaacatatcaatgcgtgccagggtacatgatggagagtcatagagtgagtgtcctgtcttgcaccaaggataggacgtggaatgggaccaaacccgtgtgcaaggccctgatgtgcaagcctccgcctctgattccaaatggaaaagtggtcggatcagacttcatgtggggatcgtctgtgacgtatgcgtgcctcgagggttatcagctgtctttacctgccgtattcacgtgcgaggggaatggctcctggacaggagagttaccgcaatgttttcccgtcttctgcggagatcccggagtgccctctcggggacgacgcgaagaccggggattctcctatcgcagctctgtgtcattctcctgccacccgccactagtgctagttggaagccctcggcgattctgccagtccgacgggacctggagcggaacacagccttcttgcatcgaccctactctcacgacatgtgccgaccctggagttccccagttcggcattcagaataactctcaggggtaccaggttggctccaccgtgctcttccgatgccaaaagggctacctgcttcaaggttcaaccacccgaacctgtttacccaacctgacctggtcaggaactccacctgattgcgttcctcaccactgtagacagcctgaaacccctacccacgctaacgtgggggctttggatcttccctcaatgggatatacgttaatttattcttgccaggagggattctccctcaagggagggtccgagcataggacatgtaaggctgacggctcctggacaggaaaacctccaatttgcctggaagtgagaccatccggacgtcctatcaataccgccagagaacctccactgacgcaagccctcattccaggcgatgtcttcgctaagaattctctctggaaaggagcctacgagtatcaggggaagaaacagcccgcaatgttacgggttacaggatttcaggtggcaaactctaaggtaaatgccaccatgatcgaccattcgggtgtcgaactccatctggcgggtacgtataaaaaagaagatttccatctgctccttcaggtgtatcaaataacaggccctgtcgaaatcttcatgaacaagtttaaggacgaccactgggccctcgatggccatgtcagtagcgagtcctcgggtgcgacttttatttatcagggaagcgtaaagggacaggggttcggccagtttggcttccagaggctagatctacggcttcttgaatctgacccagagtccattgggagacatttcgccagcaatagctcttctgttgccgcagccattttagtgccctttatagcgctgatcatcgccggattcgtgctctacttgtacaaacaccgaagacgtccaaaggttccgtttaacggatatgcaggccatgagaacacaaacgtcagggccaccttcgagaatccaatgtatgacaggaatatccagcccacggacatcatggcaagtgaggccgagttcacagtttctactgtatgtaccgccgtgtaa

SEQ ID NO: 219510 - DNA, 1281 bp, synthetic construct
  misc_feature 1..1281: note = Description of Artificial Sequence: Synthetic coding sequence
  source 1..1281: mol_type = other DNA
atgttgggtagtttttcaggcactaccgtaccggcactgctcaacagtacctcgaaccagctgtacctgcacttctatagcgacatctcggtttcagcggcaggtttccacctggaatacaagacagtgggcctatcgagctgccccgaacctgccgttccttccaatggcgttaagacaggagaacggtatcttgtgaacgacgttgtttccttccagtgcgaacccggttacgctctgcagggccatgcacacattagttgcatgccgggtacagtgcggcgatggaactacccgccacccctctgcatcgctcagtgtgggggaactgtcgaagagatggagggcgtgatcctaagccccggttttcccggaaattacccttcaaacatggactgttcatggaagattgcgctgccggtggggtttggggcacacatccagtttcttaacttttcgacagagccgaatcacgattacattgaaattcggaacggtccatacgaaacgtccagaatgatgggacgctttagtggctccgaactcccctcgtctctcctcagtacctcccatgaaacgactgtgtattttcacagcgatcactctcagaacaggccagggttcaagctggaataccaggcctacgagctccaggaatgccctgaccccgagccgttcgcaaacggaatagttcggggtgccggttacaacgtgggacagtcagtcacctttgaatgtctaccaggctatcagctgacgggtcatccagtgctcacatgccagcacggaacaaacagaaactgggatcacccacttccaaaatgtgaggttccttgcgggggtaacataacatcgtctaatgggactgtctactcgcccggattccccagcccatacagtagtagccaagattgcgtgtggctgatcaccgtgcctattggtcacggtgtgcggcttaacctgtcactgttgcaaacagagccatccggggacttcataacaatttgggacggaccacagcagactgctcccaggctgggagtcttcaccaggtccatggcaaagaaaactgtacagtcttccagcaaccaggtcttgttgaagtttcaccgtgatgccgcaacgggcggaatcttcgcaatcgcatttagcgatcactgtcggtatttcaaccagaagagcggtaaactcgatttcacgcctagtagcacacttggtcagttgtgtaaaacgctgcaccgctctctgcctcacctgagactgcagtttctacacttgtag

SEQ ID NO: 219511 - DNA, 11124 bp, synthetic construct
  misc_feature 1..11124: note = Description of Artificial Sequence: Synthetic coding sequence
  source 1..11124: mol_type = other DNA
atgaaaggcattcgtaaaggagagagcagggccaaggaaagcaagccctgggaacccggaaaacgcagatgtgccaaatgcggaaggctggatttcatcttgatgaaaaagatgggtattaagtcaggcttcaccttctggaatcttgtgttcttattgactgtctcttgtgtgaagggatttatctatacgtgcggaggaaccttaaaagggctgaatggcaccatcgagtctccaggctttccttacggttaccctaatggcgcaaactgcacctgggtcatcattgcagaggaaaggaatagaatccagatcgtcttccagtccttcgctctcgaagaggaatacgactatctctccctgtatgacggccaccctcatcctacgaatttcaggacccgacttacgggcttccacttgcctcccccagtgacaagcaccaagtctgtattctccctgcgtcttacctctgattttgctgttagtgcgcatggcttcaaggtgtactatgaggagcttcagtcctcctcctgcgggaatcctggcgtgcctccaaagggtgttctctatggaacgcggttcgacgtgggagacaaaatcagatacagctgcgttacaggatacattttggacgggcatccccagctcacatgcatagcgaactccgtaaataccgcaagttgggacttcccagtcccgatttgtagagccgaggatgcttgcgggggtactatgcgcggtagctccggaattattagctctcctagttttcccaacgaataccataacaatgccgactgcacttggaccattgtggcagaaccgggtgataccatctctctcatctttactgatttccaaatggaagagaaatacgactatttggaaatcgaaggctctgaacctcccacaatttggctctccggaatgaatattcctccgcctataatatccaataaaaattggcttaggctacactttgtcacagattctaaccataggtaccggggattctcagctccttatcagggaagctccactctgacacataccacttcaaccggggaacttgaggagcataataggacaacgacaggggctatagccgtggcctccactcccgctgacgtcacagtgtcgtctgtgaccgctgtcaccattcatagactcagcgaggagcagcgcgtccaggttacctctcttcgaaactctgggctggatcccaatactagtaaggatggcctgagtccccatccagccgatacccaaagcacacgccgaagaccaaggcacgctgagcaaattgaacgtaccaaggaacttgcagtggtgacccaccgcgtgaagaaagcaatagactttaagtccaggggcttcaaattattccccggtaaagataactctaataagttctctattctgaatgagggcggtatcaagacagcatccaacttgtgccccgacccaggggagcccgagaacggaaaacgtattggctccgatttctctctgggcagcaccgtgcagtttagttgcgacgaggactatgtgctgcagggcgcaaagtcaatcacttgccagagaattgccgaagtgttcgcggcttggtctgatcaccggcctgtatgtaaggtgaagacttgtgggagcaacttgcaggggcctagcggaacgttcacaagccccaattttccattccagtacgacagcaatgcccaatgcgtgtgggtgattaccgcggtcaacacaaataaagtgatccagatcaacttcgaggaattcgacctggagattgggtatgatactctcactatcggcgatggtggggaggtgggggatcccaggactgttctgcaggttctgaccgggagctttgtgccggatctgattgtgtctatgtctagtcagatgtggctccacctgcagaccgatgaatcagtaggatccgttgggttcaaggtgaattataaagaaatcgaaaaagagtcatgcggcgacccaggtacaccgctgtacggaattcgcgaaggtgacggattctccaaccgtgatgtgctccgcttcgaatgtcagtttggtttcgaacttatcggggaaaaatccatagtgtgccaagaaaacaatcagtggtccgctaacattccaatctgtatattcccttgcctgagtaatttcacagcgcctatgggtacggtgttgtcaccagattatccagagggctacggtaacaacttgaactgcatctggactatcatttccgatccgggaagcaggatccatctgtcgttcaatgattttgaccttgaatcgcagtttgactttctggccgtaaaagatggcgattctcctgaaagcccaatcctcggcacttttaccggagccgaagtgccatcccatttgaccagcaactcacatattctacggttggagttccaggcagatcatagtatgtccggacgcggatttaatataacatacaatacattcggacataacgaatgccctgaccctggcattcccataaacgctcgccgatttggcgacaatttccagctcggctccagcatttctgtcatttgcgaggagggttttatcaaaactcagggtactgaaacgattacttgcattctgatggatgggaaggtgatgtggtccgggcttatcccaaagtgcggagctccctgcggtggccatttttcggccccatccggggtgatcctgagtcccggatggccagggtactacaaagattcgctcaattgtgagtgggtcattgaagccgagcccggacattctatcaaaataacattcgaaaggttccagaccgaattgaattacgatgtgctggaggtgcatgatgggcctaatttactatctccattgttggggtcctacaacggaacccaggttccacagtttctgttcagcagctccaactttatctatttgctcttcaccactgacaacagccgaagtaataatgggtttaagattcactatgagagtgtgactgtgaatacatatagctgtcttgaccccggaattccagtccacggtagacgttacggacacgactttagtatcggctcaacggtgagtttcagctgcgactcaggatacagactgtctcatgaagagcctctgctgtgcgaaaagaatcactggtggagccatccactccctacctgcgatgctctctgcgggggtgatgtgagaggaccaagcgggactatcctgtctcctggctaccctgaattttatcccaacagtttgaattgtacatggactgttgacgtaactcatgggaagggggtccagtttaacttccacaccttccacctcgaggatcatcacgactatctgttaatcaccgagaatggcagctttacccaacctctagccagactcaccggatccgatctacctcctacaatcaatgccggactctatggcaacttccgggcacagttgcggttcatcagcgatttcagcataagttatgagggattcaatatcactttctccgaatacaacctcgagccgtgcgaggatccaggtattccccaatacggctcgagaataggcttcaattttgggatcggcgacactctgaccttcagctgctcctctggctaccggctcgagggcacatcagagatcatctgcctgggcggaggacggagggtgtggagcgctccactcccacgttgtgtggccgaatgcggggcatccgccacgaataacgaaggcatcctgttgagccccaactatccactgaattacgaaaataatcatgaatgcatctacagtattcaggtgcaggctggcaaaggcatcaatatcagtgcccgaacgtttcaccttgcccagggcgatgtgctgaaaatttacgacggtaaagataagactacccacctgctgggtgcgtttacaggcgcaagcatgaggggattaacactgtcatcaacttctaatcaactgtggctagaattcaacagcgacaccgaaggaacggatgaagggttccagcttgtatataccagtttcgaactatcgcactgcgaggatcccggaattccccaatttggttacaagatttccgaccagggccatttcgccggatctaccatcatctacggatgcaaccccggatatacccttcacggctctagtctcttgaagtgcatgacaggggaacgcagggcctgggattacccactgccttcctgtatcgccgagtgcggcggacgttttaagggagagtcatcaggacgcattctgagcccgggatatccttttccttatgacaataatctgaggtgcatgtggatgatagaagtcgatcctgggaacattgtttccctccagtttcttgccttcgatacggaagcctctcatgatattctccgcgtctgggatggaccccctgagaacgacatgctgctcaaggaaatctctggatccttgatcccagaggggatccactctaccctgaatatcgtcacaatccagttcgatacagacttctacatcagcaaaagcggtttcgcaatccagttttcctcatccgtggcaacggcttgtagagatcccggtgtgcctatgaacggtacaaggaacggggatgggagggaacctggagacactgttgtgttccagtgtgatcctggttatgaactccaaggggaggaacgaattacctgcatccaagtcgaaaatcggtatttctggcagccttcccctcccgtttgcattgcgccatgtggcggtaacctaaccggctccagcggatttattctgagtccaaatttcccccatccttatccacactcgcgcgattgtgattggacaattaccgtcaacgcagactatgtcataagtctggcattcattagttttagcatagagccaaattacgacttcttgtatatttacgacggcccagatagcaatagccctttaattggttccttccaagactccaagctcccagaacgaattgaatcgtcttcgaacaccatgcacttggcatttcgctctgatggcagtgtatcttataccggattccatctggagtataaggccaaacttcgggaaagctgtttcgaccctggcaatattatgaatggcacacggttagggatggattacaaactcggtagcactgtcacctattattgcgacgcagggtatgtcttacagggctacagtaccttgacctgcataatgggggacgacggacggcctggctggaatagagccctgccctcctgccatgccccttgcggatcgaggtctactggatctgaaggcaccgtgctgtcacctaactatcctaagaattatagtgtgggtcataactgcgtatatagcatcgcagtgccaaaggaattcgtcgtatttggccagttcgttttcttccagacaagtttacacgacgtggtagaagtgtatgacgggcctacccagcaatctagcctcctaagttccctctcaggatcccattctggcgagagcctgccactgtcaagcgggaatcagattaccatcagatttacctctgttgggccaatcacagctaagggattccactttgtgtatcaggcagttccgagaacgagctcgactcagtgctcttccgtccctgagccaaggttcggtcggcgaatcggaaacgaatttgccgtggggagctctgtgttgttcgattgtaaccctggatatatcctgcacggcagtatcgctatcaggtgtgaaacagtgcctaattccctggcccaatggaacgattcgctgcccacctgcatcgttccctgtggcggaatccttacaaagcggaagggcactatcctgtctccaggttaccctgagccatacgataataatcttaactgcgtgtggaaaatcacagtgccggagggtgccggaatccaggtacaggtagtgtctttcgccacggagcataactgggactccctagatttctatgatggtggggataataatgccccaaggctgggatcctacagcggcaccaccataccccacctactaaactctacctccaataacctgtacctgaatttccagtcagatatctcagtgtcggcagctgggttccatcttgaatacacagcaatagggctggactcatgccccgagcctcagacgccaagctcaggaattaagataggtgatcgatacatggtgggagacgttgttagcttccagtgtgatcagggctacagtttgcagggacacagccatatcacatgcatgccgggaccagttcggaggtggaattacccaatcccaatatgtctggcacagtgtggcggtgccatgtcagacttctctggtgttatactctcgcctggctttccaggcaattacccatcgtctcttgattgtacgtggacaattaacttaccgataggattcggcgtacatctgcagtttgtaaacttctcaaccgaaaccattcatgattatctggaggtgcgaagtggatctagcgaaacctctacagtgattggccgtctgagtggcccacagattcccagttctttgttctcaaccactcatgaaaccagtttatacttccactccgattactctcagaataaacaggggtttcatatagtgtaccaggcatatcagctccagtcctgcccagaccctaggccattccggaacgggtttgtaattggtaacgactttactgtgggccaaaccatttccttcgagtgcttccccggttacaccctcataggaaatagtgctctgacatgcctacatggtgtctcccgaaattggaaccatccattacccagatgtgaggccctgtgtggtgggaatatcaccgcgatgaatggcactatctattctcctggctaccccgacgagtatccaaactttcaggactgcttttggctggtgcgcgtgccaccgggtaacgggatttatatcaacttcaccgtgctccagaccgagcctatctacgattttattacagtgtgggacgggccagatcaaaacagcccccaaatcgggcaattctcggggaacacagctttagagtctgtgtattccacaagcaaccaaatcctcatcaagttccacagcgacttcaccacgagcggatttttcgtcctttcttaccatgcctatcagctccgcgtatgccagccacctcctcccgtacccaatgctgaaatcctcactgaggacgacgagtttgaaattggtgatatcatccgataccaatgcctgccaggattcacccttgtaggtaacgctatcttgacatgtcggttgggggagcggctacagatggacggcgctccgcctgtgtgtcaggtgttgtgtcccgctaatgagttgaggctggacagcaccggagtcatccttagtcctggctatccagacagctaccccaacctgcaaatgtgcgcttggtctatatccgtggagaaggggtacaatattaccatgtttgtcgaattcttccagacagaaaaggaatttgacgttctgcaggtgtacgatggcccaaatattcagtcaccggtacttatcagcctgtctggggattactcctcagccttcaatatcacctccaatggacatgaggttttcctgcagtggtctgcagaccatggtaacaacaaaaagggttttcggatcaggtacattgccttctattgctctacaccagagtcgccgcctcatggctacataatatcacagaccgggggtcaacttaacagtgtagttcgatgggcatgcgatcgcggattcagattagtgggaaagtccagcgcagtatgtcgcaagagctcctacggctaccatgcctgggatgcgcctgtccctgcttgtcaggctattagctgcgggatccccaaagccccaaccaacgggggaatactgaccaccgattacctcgtgggcactagggtgacgtacttctgtaacgacggataccgtttgagctctaaggaactgactactgctgtctgccagagcgacggcacctggagtaaccacaataaaacacctaggtgcgttgtcgtaacatgccctagtatcaactctttcatcctagagcacggcagatggagaatcgtgaatgggtcccactatgagtacaaaactaaggtggtatttagctgtgatcccggataccatgggttgggcccagcttccatcgagtgcctgcctaacggaacttggtcgtggcggaacgaaagaccatattgtcagattatctcctgtggtgaactgccaactcctcccaacgggaacaagatcggcactcagacctcctacggtagtaccgcaattttcacctgcgacctgggattcatgctggtaggatctgcagtgcgagaatgtctgtcatccggcctgtggtcagagagcgaaactcgctgtctggccggacattgcggcatccctgaactcatcgttaatggacaggtcattggggaaaattatgggtatcgggatacagtagtctatcaatgcaaccctggctttcgtctgatcggaagctccgttaggatctgccagcaagaccacaactggagcggacaattacccagttgcgtgcccgtttcctgtggccacccagggtcgccaatttatggtcggactagtggcaacgggttcaacttcaatgacgtcgtgacattctcttgcaacatcggctacttgatgcagggtcccacaaaggcccagtgccaggccaatcggcagtggagccatccccctcccatgtgcaaggttgtgaactgttctgatccagggataccagccaatagcaaacgagaaagcaaaattgaacacgggaactttacctacggcacagtggtattctacgattgcaaccctgggtacttcctatttggttcttcagtgttaatctgccagcctaatgggcagtgggacaaacccctacctgaatgcatcatgattgactgcggccacccaggtgtgccgcctaatgccgttttatctggtgaaaagtacacattcggtagtacagtccattactcttgtacaggtaaacgatcgcttctgggccagagtagtcggacctgccagctgaacggccattggtcaggctcccagccgcactgctctggtgatgcaacagggacatgtggtgatcctggtacacctgggcacggatccaggcaggaaagcaacttcaggaccaaatccactgtgagatacgcatgcgacaccggctatatcctccacggaagtgaggagagaacctgtttggcgaatggatcctggacaggtaggcagcccgagtgtaaggccgtccaatgtggtaaccccggaaccactgcgaacgggaaggttttccggatagatgggacaacattctcaagcagtgtgatctacagttgtatggagggctacattctgagcggtcctagcgtgcggcagtgtacagccaatgggacatggtcaggcacacttcccaattgcaccataatttcctgtggagatcccggtatcccagccaacggcttgcggtacggagacgactacgtggtgggacaaaatgtgtcctacatgtgccagcccggatacaccatggagttgaacggctctcgcatccggacgtgtaccatcaacgggacctggtccggtgtgatgcctacttgtagagcggtcacctgtcccacaccgccacagatcagtaatggccgtctggaggggacaaactttgactggggtttctccatctcatacatttgctcaccgggatatgagctgtcatttcctgccgtcttgacatgcgtgggcaacgggacgtggtccggggaagtaccccagtgcttacccaagttctgtggtgaccccggaatcccagcacagggaaaacgcgagggcaagagcttcatttatcagtcggaggtttccttcagctgtaatttcccatttatactggtgggcagtagtactagaatttgtcaggcagacggcacatggtccgggtcttcccctcattgtatagaacccactcagacaagctgtgagaacccaggcgttcctcgccacgggtcccagaacaatacatttggctttcaggtgggcagcgttgtacaattccattgtaaaaaaggccatttactgcaaggttcaacgacacggacctgcctgcccgacctcacttggagtggaattcagcccgagtgtattcctcattcctgtaagcagcccgagactcctgcccacgccaacgtagtgggaatggacttgcccagccacgggtacaccttgatttacacatgccaacccggattcttcctcgcgggtgggactgagcacagagtctgccggtctgacaacacctggaccggcaaagtgcctatctgtgaagctggttcaaaaatcctagtaaaggatcccagacctgcgctcggcaccccgagtcctaaactcagcgtacccgacgacgtctttgcgcagaattacatctggaagggctcttataacttcaagggacgtaaacaaccaatgacactgaccgtgacctctttcaatgcatctacagggagggtgaacgccactctgtccaattctaatatggaattactcttgtctggcgtctacaagtcccaggaagctagattgatgctcagaatctacctgatcaaggtccctgctcacgcatccgtcaagaagatgaaagaggaaaactgggcaatggatggatttgtgagcgccgaaccagatggagcaacatacgtttttcagggcttcattcagggaaaggattatggacaattcggcctacagcggctgggcttgaatatgtccgagggctccaatagctctaaccaaccccacgggacaaatagctcaagcgtggccattgccatcctcgtacctttcttcgcactgatctttgcgggatttggattctacctgtacaaacagcggactgccccaaagacgcagtatactggatgtagtgtgcacgagaataacaatggacaagcagcattcgagaaccccatgtatgatacaaatgccaagtccgtggaggggaaggccgttagatttgaccccaatctgaataccgtgtgcaccatggtatac

SEQ ID NO: 219512 - DNA, 11004 bp, synthetic construct
  misc_feature 1..11004: note = Description of Artificial Sequence: Synthetic coding sequence
  source 1..11004: mol_type = other DNA
atgtggtcttggttcttgtgctggaagcctgtgcagctggataggcagacagcctccggattcatctacacctgtggcggtacactcaaaggtctgaatggaaccatcgagagtcctgggttcccttatggctatccgaacggagccaactgtacatgggtgatcatcgccgaagaacggaatcgtatccagatcgtattccagtcttttgcactcgaggaggagtacgactacttgagcctgtacgatggccacccacaccccaccaactttcgcactcgtttgacagggtttcatctgccaccccctgtgacctcgacaaaaagcgtgttttcactgcgcctgactagcgacttcgcagtgagtgctcatggttttaaagtctattacgaggagctccagagctcgtcttgcggaaatccaggggttccccctaagggggtactgtatggtaccaggtttgatgttggagataagatcagatattcttgtgtgactgggtatattcttgatggccacccacagctgacttgtattgccaactctgtcaacacagcctcttgggactttcccgtgcccatctgtagagcagaagatgcctgtggcggtacgatgcgtgggagtagtggtatcattagcagtccaagtttcccgaatgagtaccataacaacgccgactgcacgtggacgatagtggcggagccaggtgacaccatctctctgatcttcacagatttccagatggaagagaaatatgactatcttgaaatcgaaggatcagaaccgccaaccatatggctgtctgggatgaacattccccctccaattatatccaataaaaactggctgagattgcacttcgtaaccgacagcaaccatagatatagaggcttttcagccccttaccagggatcttcgaccctgacccataccacttccactggagagctcgaagaacacaataggactacgactggagccatcgcagttgctagcacaccagcggacgttactgtgtcatcagtgactgccgtcacaattcacagattaagcgaagaacaacgggtgcaggtgacatccctgaggaatagcggcctagatcccaacacttcgaaagatggattgtcaccccatccagctgatacccaaagcacacgccgtcggccacggcacgctgaacagatagagcggaccaaagaactggcagtcgttacacatagagtgaagaaggctattgacttcaagtcccgcggatttaaattgttcccaggcaaagacaactctaacaaattctcaattctgaatgaggggggaatcaaaacagcttccaacctgtgtccagaccctggcgaacccgagaacggtaaaagaattggctctgatttctctctggggagtaccgtgcagttcagctgtgatgaggattatgtgttacagggagctaagagcattacatgccagaggattgccgaagtgttcgcagcctggtcagaccacaggcccgtgtgtaaggttaaaacatgtggctctaacctacagggccctagtggcacatttaccagtcctaattttccattccagtacgacagcaacgcccagtgcgtgtgggttataactgccgtgaatactaacaaagtcatccagatcaatttcgaggagttcgaccttgagattggctatgataccctcaccattggcgatggcggagaagtaggcgacccgaggaccgttttgcaggtcctgaccgggagttttgtgccggacctgattgtatcgatgagttctcagatgtggctgcatctgcaaactgacgagagtgtaggatccgtgggctttaaggtcaactacaaagaaattgaaaaggaaagctgcggcgacccgggaacgccactatatgggatcagagaaggggacggcttttccaatagggacgtgctgaggttcgagtgccaatttggattcgaactcattggagaaaagtcaattgtctgtcaggagaacaaccaatggtcagccaatattcctatttgcatcttcccatgcctgagtaacttcactgcgcctatgggaacagtgctcagccctgactacccggaagggtacggtaacaacttgaattgcatctggaccatcatttccgatccaggttcccgcatccatctatccttcaatgatttcgacctggaatcccagtttgatttcctggcagtcaaagacggagatagtcctgagtcccctatccttggcacttttaccggagctgaggttcccagtcacctgacaagcaatagccacatccttaggctggagttccaggctgaccatagcatgagtggacggggttttaacatcacttataatacctttggacataatgaatgtcctgacccgggaatccctataaacgccagaagattcggcgataactttcagctggggtctagcatctccgtgatttgtgaggagggcttcattaagacacaaggaactgaaacaattacatgcatactcatggatggtaaggttatgtggtctgggctgattcctaagtgcggggctccatgcggcggacacttctcggcaccttccggagtaatcttgtcgcctggctggccaggatactacaaagacagcctgaactgtgaatgggtgattgaggcagaaccaggacactccattaagatcacattcgagcggttccaaacggaactaaactatgatgtgctcgaagtgcacgatggtcctaacttgctgtcccctctcttgggatcatacaatggtacccaggttccacagtttctctttagctccagcaattttatttacctgctgttcacgactgacaatagtagatccaacaatggcttcaagatccactatgagagcgtcactgtgaatacgtattcgtgcctggaccccggaattcctgtgcatggcaggcggtacggacacgatttctctataggtagcacggtctctttctcatgcgattccggctataggctgtcacacgaggaaccactgctgtgcgagaaaaaccactggtggtcccacccccttcctacatgtgacgccttgtgtggcggagacgtgcggggtccttccggcaccatcctctcaccgggataccctgagttctacccaaactcattgaattgcacctggacagtggatgtgactcatggcaaaggggtccaattcaactttcacaccttccatttggaagatcaccacgactatctcctgattacagagaacggaagcttcacccagcctctggccagactgacaggatccgatctgcctcccactattaacgcaggtttgtacggaaactttcgggctcagctgaggttcatatccgacttctcgatttcctacgaaggctttaacattacgtttagcgagtacaacctcgaaccttgtgaagaccccggaatcccgcagtacgggtcgaggatcggttttaattttggcatcggagacaccctcacatttagctgcagttccgggtacagattggaggggaccagcgagattatctgcttgggcggaggtaggcgggtgtggagtgccccactccccagatgtgtcgcagagtgcggagcctcagcaaccaataacgaagggatcctcctctctcctaactaccccctgaactacgagaacaaccatgagtgtatatactccatccaggtgcaggcagggaagggaataaatatcagcgctcggacgtttcatctcgctcaaggcgacgttcttaaaatctacgacggtaaagacaagactacccacctattaggggcatttaccggtgccagtatgaggggactaaccctgtcgtctaccagcaatcagctgtggctggagtttaactcggacactgaggggaccgacgaaggcttccaattggtgtataccagttttgagctgtctcactgcgaagatcccggaatccctcagtttggttataagataagcgaccagggtcacttcgccggaagtacaataatttacggctgcaaccctggatacacccttcacggatcgtcgcttctgaagtgcatgactggcgagagaagagcttgggattatcccctgccatcatgcatagctgaatgcggaggaaggttcaagggggagagctcggggaggatcttgagtccaggttatccctttccttatgacaacaacctgcgttgcatgtggatgattgaggtagacccaggtaacatagtgtctctgcagtttctcgcgtttgacacagaggcctcccatgatatacttcgtgtgtgggatgggccacctgaaaacgatatgctactgaaggagatctcaggaagcctaatccccgaaggcatacacagcacgctaaacatagtgacaatccagttcgataccgatttttacatttcgaagtccggctttgccattcaattcagttctagcgtggcgacagcttgtcgggacccaggagtgcctatgaacggaacacggaacggcgatgggagagagcccggagacactgtggtcttccagtgcgatccgggatacgaactacagggggaagagcgcatcacatgcattcaggttgagaaccggtatttttggcagccttcaccaccagtctgtatagccccatgtgggggtaatctaaccgggagctcgggctttatactctctccgaatttccctcacccatacccgcattcacgggactgtgactggacgatcaccgtgaacgcagactatgtgatctctctagcctttatttctttctcaatagagccaaattacgactttctgtacatttacgacggtccagattccaattccccattgattgggagctttcaggattctaagctgccggagcgaatagagagcagctcaaacacaatgcacctggcgttccgcagcgatggaagcgttagctacaccggcttccatctggagtacaaagctaagcttagggaatcatgttttgaccccggaaatattatgaacgggacgaggctgggcatggattacaagctgggatctacagttacttactattgcgatgctgggtacgtcttacaaggctacagtacgctgacctgcatcatgggggacgatggtcgaccaggttggaatagggccttgccttcatgccatgccccatgtggttcacgctccaccggatccgaaggcacggtcttgtcacccaattaccccaagaattatagcgttggccacaattgtgtttacagtatagcggtccccaaggaattcgtggtcttcggccagtttgtttttttccaaacgagtctgcacgatgtcgtggaagtttatgatggtcctactcagcaatcaagcctcctgagctctctgtcagggtctcatagtggggaaagtcttccgctgtcaagcggaaaccagatcaccattaggtttaccagcgtcgggcctatcaccgcgaagggttttcactttgtctaccaagcagtccctcgcaccagcagcactcagtgctccagtgtgccagagccccgattcggcaggaggatcggtaatgaatttgcagtgggctcctcagtgctgtttgactgcaatcccggatatatactgcatggaagtattgctatccgctgtgaaacagtgcccaattcgctggcccaatggaatgactccttgccaacatgtattgttccctgcggtggcattctcacaaagagaaagggaaccatcctttccccgggttacccagagccttatgacaataatttgaattgcgtgtggaaaattaccgtaccagaaggggcaggaattcaggtccaagttgtgtccttcgcaactgaacacaactgggatagcctagatttttatgatggtggcgataacaatgctcctcgcctgggttcttacagcggtactactattccacaccttctgaactcgacctccaacaatctgtatttaaattttcagtctgacatcagcgtgtcagcagcaggattccatctagaatatactgccattggtctcgattcgtgcccggagccgcaaactcccagttcagggatcaagatcggcgatagatacatggtaggggacgtcgtctcctttcagtgcgatcagggttactccctacaggggcatagtcatatcacctgcatgcctggccctgtgcggaggtggaactaccctatccctatttgtcttgcccaatgcgggggagctatgtcagacttttcaggggtgatcttatctcccggttttccaggcaactatccttcctctctggactgtacatggactattaacttgcctatcggctttggcgtccacctgcaattcgtgaacttcagcacagaaaccatccatgactacctagaagtgagatctggttccagtgaaacgagtacagtgattggcagattaagcggtccgcaaatcccgtcatctctgttttccacgacccacgagaccagcctatacttccactccgattattcgcagaataagcagggcttccacattgtgtaccaagcttaccaactgcagtcctgtcctgatccgcgaccgttccgaaatggcttcgtaataggcaatgactttaccgtgggacaaacgatctctttcgagtgtttccctggctatacccttatcggaaactccgcccttacttgcctccacggcgtcagtcgaaattggaatcacccactgcctagatgtgaggctttgtgcggtggtaatattaccgcaatgaatggcaccatttactctcctggttatccagacgaataccctaattttcaagattgtttctggcttgtccgggtgcctcccggtaacggcatttacatcaatttcactgtgcttcaaacagagccaatctatgatttcataacagtgtgggatgggcctgaccagaattccccacagattgggcagttctctgggaacacagccctggagtcggtctattctacgagcaaccaaattctgataaaatttcatagcgacttcactaccagcggctttttcgtgctgtcctaccacgcttaccaactcagagtgtgccagcctccccctccggtgcccaacgctgagattctgacagaggatgacgagttcgaaatcggagacataataaggtaccagtgcttgcccggtttcaccttggtgggcaacgcaatcctgacctgtcgtctgggcgaacgtcttcaaatggatggggcacctcccgtttgccaggttttatgtccagccaacgagcttagactcgattccactggggtcatcctgagtccgggatatccggactcctaccctaaccttcaaatgtgcgcatggagtataagcgttgagaagggatataacattaccatgttcgtggagtttttccaaactgagaaagagtttgatgttctccaggtatatgacgggccaaacattcagagtcctgtcctcatcagtttatctggcgactatagctccgcttttaatataactagtaatggccacgaagtgtttctgcagtggtccgctgatcacgggaataacaaaaaaggcttcagaatccgctacatcgccttttactgctccacaccggagagcccccctcacggctacatcatctcccagactggtggtcagctgaacagtgttgtcaggtgggcttgtgaccggggttttcgcctcgtaggtaagtcatcagcagtctgccgaaaaagctcctatgggtatcacgcatgggacgcaccagtacctgcgtgtcaagctatttcatgcgggattcctaaggcgccaactaacggaggaatcctgacgaccgattacctggttggaacaagggtgacatacttttgcaacgatggctacaggttgagctcaaaggaactgaccacagccgtgtgtcagtcagatggcacctggtctaaccataacaaaactcctcgctgcgtggtcgtgacatgtcccagtattaactccttcatcctggaacacggcaggtggagaatagtcaatggaagtcactatgagtataagacgaaggtagtcttcagttgtgaccccggatatcacgggctgggacctgcgagcattgaatgtctgcctaacgggacatggagctggcggaacgagcggccttactgccagatcatttcctgtggcgaattacccaccccgcctaacggcaacaaaatagggacacagacgtcttacggctccaccgcaatctttacatgcgatctgggctttatgttggtgggtagcgctgtcagagagtgcctcagttccggcctctggtccgaaagcgaaaccaggtgtctcgcaggccactgcggcatccctgagctaatcgtgaatggtcaggttatcggggaaaattacgggtatcgcgacactgttgtctaccagtgtaaccctggattccggctaatcgggagttcggtccggatctgtcaacaggaccacaattggagcggacagttgccaagctgtgtgcctgtctcatgtgggcacccaggttcacctatctatggaaggactagcgggaacggatttaattttaatgacgttgtgacattctcatgcaatattggctatttaatgcaaggtccgacgaaagcgcagtgtcaggcaaaccgacagtggtcacacccacctccaatgtgcaaagtcgtaaactgctctgacccaggcattcccgctaattccaagcgggaatcgaaaattgaacatggcaacttcacctatggaacggtggtcttttacgactgcaatccaggctattttctgttcggctcctcagtgttaatctgccaacccaatgggcagtgggacaagccactgccagagtgcatcatgatcgattgcggacatccaggcgtgccacctaacgcggtgctgtctggagagaagtacacattcgggtctaccgtgcactactcctgtaccggcaagaggagcctattggggcagtccagccgaacctgtcagttgaatggacattggtcagggtcacagccacactgctcaggcgacgcaaccggaacctgcggcgacccaggcacccctggccatggttcgaggcaggaatctaactttcgaactaaatcaactgtgaggtacgcgtgtgacaccgggtacatcttgcacggcagcgaagaaaggacgtgtcttgccaacggaagttggactggcagacaacctgagtgtaaagcggtccaatgcggcaacccaggaaccacggcgaacggtaaggtgtttcgcatcgatggtacaacatttagcagctccgttatctattcctgcatggagggatatattctttcgggccctagcgtgaggcagtgtacagccaacggtacctggtccgggactcttcccaactgcactatcatttcttgcggcgaccctgggatccccgcaaatggtctcaggtacggagatgactatgtcgtggggcagaatgtgtcttatatgtgccaacccggatacaccatggagctgaacggtagcaggatcagaacctgtacaatcaatgggacttggagcggggtgatgccaacgtgtcgggcagtgacatgtccaacgccccctcagatttctaacggcagattggagggtaccaactttgactggggcttttccatttcatatatttgcagtcccggttacgagctgtcttttccagccgtgctgacctgtgtaggcaacggaacatggagtggtgaggtaccacagtgcctgccaaagttctgtggcgatcctggcattcccgcacaaggcaagcgggagggcaaatctttcatctaccaaagtgaggtgtccttcagctgtaacttccctttcatattggtagggtcgagcacacgaatatgtcaggcagacggcacttggagtgggtctagcccccactgcattgagcctacacagaccagctgtgaaaatcctggggtcccccgtcacggcagccaaaataatactttcgggtttcaggttggctccgtggtgcagtttcattgcaaaaagggccacctactgcaggggagtactactcgcacgtgtctgcctgacttaacttggtccggaatccagccagagtgcataccccactcttgcaaacagcccgaaacacctgcacatgccaacgttgtcggaatggacctgccatcacatggatacacgctcatttatacatgccaaccgggtttttttttggcaggcggaaccgagcatcgcgtttgtcggagcgataacacctggaccggcaaagttcccatctgcgaggcgggtagtaagatactagtgaaggatcccaggccagctttaggaactcccagcccgaaattgagtgtaccggatgacgtatttgcccagaattacatttggaagggcagttataactttaagggccgtaaacagcctatgactcttaccgtgaccagctttaatgcttcgaccggccgagtcaacgcaactttgtctaatagcaacatggaactcctcctgtcaggcgtctataagagtcaagaagccaggctcatgctcagaatatatctcatcaaagtcccggctcacgcatccgttaaaaaaatgaaagaagagaattgggccatggacggattcgtatcagctgagccggacggggcaacttacgtttttcaggggtttattcaggggaaagactatggacagtttggtctccaaaggctaggcctcaacatgtccgaaggctctaatagcagtaaccaacctcacggtacgaactcctcttccgtagctatagcaatcttggtgcctttttttgccctcatctttgccggtttcggattctacctgtacaagcagcgaacagctccaaaaactcaatacaccggctgcagtgtgcacgaaaacaacaacgggcaggccgcatttgagaacccaatgtatgataccaacgccaagtccgtcgaaggtaaggctgttcggtttgatcccaacctaaatacggtgtgcacaatggtctaa

SEQ ID NO: 219513 - DNA, 10914 bp, synthetic construct
  misc_feature 1..10914: note = Description of Artificial Sequence: Synthetic coding sequence
  source 1..10914: mol_type = other DNA
atgaaggggatcaggaagggggagtccagggcgaaggagagtaagccttgggaacccggaaagcgaaggtgtgctaagtgcggcagactggactttatcctgatgaagaagatgggaataaagtccggatttaccttctggaatctggtctttcttctcactgtaagttgtgtcaagggttttatatacacatgcggcggaactctgaaaggccttaatggtacaatcgaaagcccaggttttccctatggttatcctaatggggcaaactgcacgtgggttatcatcgccgaggagcgcaaccggatccaaattgtgtttcaaagcttcgcgctggaggaggagtatgactacctatccctgtatgacgggcacccccatcctacaaacttcagaacacggcttaccggcttccatctgcctccacccgtaacctcaacaaagagcgtcttctcgctccgtctgacatcagatttcgcagtctcggcccacgggttcaaggtttattacgaggagctccagtcaagtagctgcggaaatcccggtgtgccccctaagggcgttttgtacggtacccggtttgatgtcggagacaaaattaggtatagttgtgttaccggctatatcctggatggacatccccagctgacatgtatcgcaaattccgtcaacaccgcttcatgggattttcccgtccccatttgtcgtgccgaggacgcttgcggtggcacaatgcgagggagcagtggtatcatctcctccccaagcttcccaaacgaataccataataacgccgattgcacttggacaattgtggcggaacccggtgacacgatctcactcatttttactgacttccagatggaagaaaagtatgattacctcgaaatcgagggctcagagccgccaacaatatggttatccggcatgaatattccccctccaattatctcaaataagaattggctcaggctacacttcgtcaccgattcaaaccaccgctacagaggtttctctgccccttatcaggggtcgagcacccttactcacaccactagcaccggcgagcttgaggaacacaatcgcacaaccaccggcgctatcgctgtggcttccacacccgctgatgtgacggtgtcctcggttaccgccgtaacgatccatcgcctcagcgaggaacagcgagtgcaggtgacttcccttcggaactctggtctggacccaaatacttccaaagatgggctaagcccccaccctgcggacacacagtcgacaaggagacggccaagacacgctgaacagatcgagaggactaaggaactggccgtagtgacacacagggttaagaaagccatcgatttcaaatcgaggggattcaaactgtttccaggcaaagacaattccaacaagttctccattcttaacgaaggcggaattaaaacagccagtaacctctgcccagaccccggtgagcctgagaacggaaaacggatcggctccgatttcagtctcggatctaccgtacagttttcatgcgatgaggattacgtgctccagggtgctaaatctatcacttgccagcgtatcgctgaggtttttgcagcttggtcagaccacaggcctgtttgcaaggttaagacctgcggatctaatctgcagggtccaagtggcactttcacctctcccaattttccatttcagtacgattccaacgcacagtgcgtgtgggtcattacggcggttaacacaaacaaagtgattcagataaattttgaagaattcgaccttgagattggttatgacacactaactataggagatgggggagaggttggggatcctcgaactgtgctacaggtactgactggtagttttgtaccagatctgatcgtctcaatgtccagccagatgtggctccacttgcaaactgatgaatcggtgggatctgtggggtttaaagtgaattataaggagatcgaaaaggaaagctgtggcgatccgggtactccgctgtatggcatccgcgagggagacggattctctaacagagatgtgctgcgattcgaatgccagttcggctttgagttgatcggagaaaagtccatagtttgtcaggagaacaaccagtggagtgcaaacatcccaatctgtatatttccttgcctgtccaacttcactgccccaatgggcactgtcctctcaccagattaccctgagggttatggcaataatctcaactgtatttggacaataatctcagacccaggcagcaggattcatctgagtttcaacgattttgatctcgaatctcagttcgactttctggccgtgaaagatggtgactcacccgagtccccgatccttggcacttttacaggagccgaagtcccgtctcacttgacatccaactcgcatattctccgactggagttccaggccgatcattctatgagcgggcgtggctttaacatcacatacaatacttttggtcacaacgagtgccctgatcctggaattcctatcaacgcacggagattcggagacaacttccagctgggcagttccattagtgtgatctgtgaagaaggattcatcaagacgcagggaacggagaccattacttgtatcttgatggacggaaaagttatgtggtccgggctgattcctaagtgcggcgctccgtgcggtggtcacttctctgccccttctggcgtgatactgtctcccggatggccagggtactacaaggattctcttaactgtgaatgggtcatcgaagccgagccaggacacagcataaagataacgtttgagaggttccagaccgagctcaattacgatgtgctcgaagtgcacgatggcccaaatctgctaagtcctctcctcggcagctacaacgggacacaggtgccacagttcctattctcctcttctaacttcatctacctgctgtttacaaccgataacagtaggagcaacaacggctttaaaattcactatgaatcagtcaccgtgaacacatactcttgcctggacccaggcattcccgtgcatggtagaaggtatgggcacgatttttctatcggttctacagtcagcttctcctgtgacagcgggtatcggctctcccatgaggagcccctgctgtgtgaaaagaatcactggtggtcccaccccttacccacctgtgacgctctgtgtgggggagatgtgcgaggaccctccggaaccattctgtccccgggttacccagagttctatcctaattcactaaattgtacatggacagttgatgtcactcatggtaaaggcgtgcagtttaatttccacactttccatctggaggatcaccacgattatcttttaatcacggaaaacggcagctttacccaacccctggccaggctgactggaagcgatctcccacccaccataaacgcaggcctgtacggaaatttccgggcacagctccgctttatttctgactttagcataagttacgagggttttaatatcaccttttctgaatataatctggagccatgtgaagaccccggaattcctcagtatggctccagaataggtttcaacttcggaatcggggataccctgacatttagctgctctagcggttatagactggagggtactagcgagattatttgcctgggaggaggacgcagggtgtggtccgctcccctaccaagatgcgtcgccgagtgcggggcaagtgcaaccaacaatgaaggcatcctgctgtcgcccaattacccactcaactacgaaaacaatcacgaatgtatctattccattcaggttcaagcagggaagggcatcaatataagcgcccgaacattccaccttgcccagggagatgtgctgaagatctacgatggcaaggataagaccacccatctgctgggcgcattcactggggcttctatgcgcggtctgaccctgagtagtacaagcaaccagctctggttggagttcaacagtgataccgaggggacagacgaaggtttccagctggtttataccagtttcgagctctcacactgtgaggacccagggatcccccagtttggttacaaaatcagcgatcagggccacttcgctgggtccacaatcatctatggctgtaatccaggctacaccctgcacggttcgtcactgctgaaatgcatgaccggagaaagaagggcatgggattatcccttaccaagctgcatcgcggaatgcggcggtcgatttaaaggagaatcctccggccgaatcctctcccccggatacccattcccatacgataataacttgagatgtatgtggatgatagaggtggatccaggcaacatcgtgtctctccagtttttagctttcgacaccgaagcgtcccatgatattctgagggtctgggatggaccacccgagaacgacatgctgctgaaggagatttctggaagcctcattccagagggcattcactccaccctgaacatcgttacaatacagtttgacaccgatttctatatcagcaagagcggttttgcaatccaattcagcagtagtgtggctaccgcctgcagagacccgggtgtgcccatgaacgggacaagaaacggcgacgggagggagcccggagacactgtggtgttccaatgtgatcccggttacgaactgcaaggagaggaaagaatcacttgcattcaagtggagaacaggtacttttggcagccttcacccccagtctgtatcgccccttgcggtgggaacctgacagggagctctggttttattctgtctccaaattttcctcatccatacccccactctcgcgattgcgattggaccattaccgttaacgctgactatgttataagtttagcctttataagtttttccattgaaccgaactatgacttcctgtatatctatgatggccctgactcgaattctccactgatcggctctttccaggacagcaagctcccggaacgaatcgagtcctcgtctaataccatgcatctcgccttccggtcagatggaagcgtgagctatacaggctttcacctggagtataaggctaaactacgcgagtcctgcttcgatccgggaaacataatgaacggtacgaggctgggcatggactacaagcttgggtctaccgtgacctactactgtgatgcaggctacgtcctacaggggtattcaacattaacctgcatcatgggcgacgatggtcgacccggttggaatagagcgctcccctcttgtcatgccccttgcggaagcagatctacaggttctgaggggactgtcctctcccctaactatcccaaaaattactctgtcggccacaactgcgtttatagcattgctgtgcccaaagaatttgccgtgccgaggactagctccacccagtgctctagtgtgcctgaaccgagatttgggaggcggatcggaaacgagttcgccgtggggagctcagtgcttttcgactgcaaccctggctatatccttcacgggagcatcgccatccggtgtgaaaccgtacccaactcactggcccagtggaacgattctctgcctacttgtatcgtaccttgcggaggaatcctgaccaaaaggaaagggacgattctgtccccaggctatcccgagccatatgacaacaaccttaattgtgtgtggaagataaccgtgcctgagggcgcaggaatccaggtgcaggttgtatctttcgccaccgagcacaattgggactctttagatttttacgatggcggtgacaacaacgctcctaggctgggcagttacagcggaaccacaatacctcaccttcttaactcaacatcgaacaacttatacctcaatttccaaagtgacatatccgtgtctgcagccggtttccacctggagtacaccgccattggtttagatagctgccccgaaccccagactccatcatctgggatcaaaataggtgacagatacatggttggtgatgtggtttcttttcagtgtgatcagggttactcactgcagggccattcccatattacctgtatgccgggaccagtcagacggtggaattatcctatccccatttgcctcgctcagtgcggcggagccatgtctgacttttctggcgtcattttaagcccagggtttcccggaaattatccctctagcctggactgcacatggaccataaatctgcctataggcttcggcgtccacctccaattcgtcaatttttcaacagaaacgatacacgattacctggaggtcaggtctgggtcgtctgagaccagcacggtgattgggagactttcagggccacagatcccttccagcctgttctctacgacgcacgaaacttccctgtacttccatagtgactacagtcagaacaagcagggattccacatcgtctatcaggcttatcagctgcagtcatgtcccgacccgaggccgtttcgtaacggctttgtaatcggaaacgattttactgttgggcaaacaatatcctttgaatgcttccctggctatactctaatcggcaacagtgctctgacctgcttgcacggagtcagccgcaactggaaccacccattgccccgatgtgaggcactgtgcggtggaaatatcaccgccatgaatggcacgatttattcacctggctatcccgacgaataccctaattttcaggattgtttttggttggtacgggtgcctcctggaaacggcatctacatcaacttcactgtcctacaaaccgagcccatctatgacttcatcacagtgtgggacggaccagatcagaatagcccacagatcggacagttctctgggaatacagcgctggaatctgtgtatagtacttcaaatcaaattctcatcaagtttcactctgatttcaccacctcaggattctttgtgctgtcttatcacgcctatcagctgcgggtgtgccaaccaccaccaccagttcccaatgctgaaatcctgaccgaagacgacgagttcgagatcggagacattatcagatatcagtgcctgcccggtttcactctagtgggaaatgcgatccttacttgcaggctgggggagagactgcaaatggacggtgcacccccagtctgccaggtgctttgtcccgctaacgagcttcgtctggattccacgggggttattctctctcctggttaccctgactcatatcctaacttgcagatgtgcgcttggtccatttccgttgaaaagggttataacatcaccatgttcgtggaattctttcagaccgagaaggagtttgatgtgctacaggtctacgacggcccaaacatccaatcgccggtgctgattagtctgtctggcgattatagctctgcctttaatataactagcaacggacatgaagtctttctccagtggagtgcagaccatggcaataacaaaaagggattccgcatacgatatatcgccttttattgctcgacgccagagtctccaccccatggctacatcatcagtcagaccggaggacagcttaacagcgtcgtgcggtgggcttgcgataggggttttagactcgtggggaagtcttctgccgtttgccggaaatctagttacggctatcatgcatgggacgctcctgtgccagcttgtcaggcgattagctgcgggattcccaaggctcccactaacgggggaatcctcacgaccgactacctagtggggactcgcgtgacgtatttctgtaacgacggttaccggttgagctcaaaggaactgactactgctgtatgtcagtctgacggaacttggtcaaatcataataaaaccccaagatgtgtagtggtcacctgtccgagtatcaactcatttatcctggaacatggccgatggaggattgtaaatgggagccactatgaatacaaaaccaaagtcgtgttctcctgtgacccagggtatcacggcctgggaccagcttcaatagagtgcctgcctaacggcacttggtcctggaggaacgaaagaccttattgtcagattatttcttgtggcgagctgccaaccccaccgaacggcaacaagattggcacccagacctcatatggtagcacagctatttttacctgtgatctgggctttatgctggtgggttccgccgtgcgcgagtgtttatcctctggcttatggtccgagagcgagacaaggtgtctcgcgggtcactgcggtattccagaattgatcgtgaatggtcaagtgatcggtgagaactacgggtaccgggataccgtggtgtatcagtgcaacccaggtttcagactaataggctcctccgtccgtatttgccagcaagatcacaattggtccggtcagctgccctcttgcgtgccagtgtcttgcggccatcccggtagtccgatctacgggcgtactagcgggaatgggtttaatttcaacgacgtggtgactttttcctgcaatattgggtatttgatgcagggcccaacaaaagcccaatgtcaggccaatcggcagtggagccatcccccaccaatgtgtaaagtggttaattgttccgacccaggcattcccgctaattcaaagcgggagagcaaaattgagcacggtaacttcacttacgggacagtggtgttctacgactgtaatcccggatatttcttatttggaagttctgtacttatatgtcagcccaatgggcagtgggataaaccccttcctgagtgcattatgatagattgtggtcaccctggcgtacccccaaacgccgtgctatcaggtgagaagtacacttttggtagcaccgtccactactcatgtaccggtaagcggtctttgcttggccaaagtagtcgaacttgccagcttaacgggcactggtcgggatcacagcctcactgcagtggcgatgctaccggaacctgtggggatccgggtactcccggacatggttctaggcaggaaagcaactttaggacaaaaagcaccgtccggtatgcttgcgatacaggctatattctgcacgggagcgaagagagaacctgcctcgccaatggctcatggactggacgccagccagagtgcaaggcagtacagtgtgggaacccaggaaccacagccaatggtaaggtattccgaatcgacggaaccacattcagctcaagcgtgatatatagttgcatggaaggatatatacttagcgggccttctgtgcgtcaatgcaccgcaaatgggacatggtctggcaccctgcccaattgtaccatcatatcctgcggtgaccctggtataccagcaaacggactgcggtatggggatgactacgttgttggtcagaacgtgagctacatgtgccagccaggctatacaatggaactcaatggttcccggattcggacctgtacaatcaatggcacatggtccggggtcatgccgacctgtcgggctgtgacttgtccaaccccccctcaaatttccaacggcagactcgagggcaccaattttgattggggtttcagtatttcctatatttgttcgcctggctatgagttaagctttcctgcggtccttacatgcgtgggaaatggtacttggtctggagaggtgccacagtgtctccctaaattttgtggagatcctgggattcctgcacagggcaaacgtgagggtaaaagcttcatctatcagagtgaggtgtctttttcgtgtaatttccccttcatcttagttgggagttcgaccaggatatgccaggccgatgggacttggtccggctcaagcccacactgtatcgagccaacacagacaagttgtgaaaatccgggagtacccagacacgggtctcagaacaacacatttggttttcaggtgggcagcgtggtccagtttcattgtaaaaagggccatctactccaggggtcgactactaggacgtgtcttcccgatcttacttggagtgggatccagcccgagtgtatccctcattcttgtaagcagcccgagacccccgctcacgccaacgtcgtcggaatggacttaccctcacacggatataccctgatttatacttgccagccagggtttttcttggccggtggaactgaacaccgcgtgtgtcggagcgataacacgtggaccggaaaggtgccaatctgcgaggcgggaagtaaaattttggtcaaggaccccaggcctgcattgggcacaccgtctcccaagctctcagtacctgatgacgtctttgcgcaaaattacatttggaagggttcctataactttaaagggcgaaaacagccgatgaccctgactgtgacctcattcaatgcctctaccggcagagtgaatgctaccctgagtaactccaatatggagcttttactgtctggtgtgtataaatcccaggaagctcggcttatgctgaggatctatctcattaaggttcccgctcacgcctctgtgaaaaagatgaaggaagagaactgggcaatggacggtttcgtgtcagcggagccagatggggctacatatgtgtttcagggcttcattcagggtaaggattacggccagttcggactccaaagactcggactgaatatgagtgaggggagcaatagtagtaatcagccacatggcactaattccagttcggtcgcaatagctattctggtgcctttttttgcacttatctttgctgggtttggcttctacttgtataagcagaggactgcgcctaagactcagtacactggctgttccgttcacgagaataataatgggcaggccgctttcgagaaccccatgtatgatactaatgctaaatctgtggagggtaaagccgtgcgatttgatccaaacctgaacaccgtgtgtactatggtttac

SEQ ID NO: 219514 - DNA, 10617 bp, synthetic construct
  misc_feature 1..10617: note = Description of Artificial Sequence: Synthetic coding sequence
  source 1..10617: mol_type = other DNA
atgaaaggcattagaaagggggagtctagggccaaggaatccaagccttgggaaccaggtaaaagacgctgcgctaaatgtggcaggctggactttattctcatgaaaaaaatggggattaagtccgggtttaccttctggaatctagtcttcctcttaacggtttcttgcgtgaagggttttatctacacctgtgggggaacccttaagggcctgaacggcacgattgaaagccctggatttccatacggctacccaaacggagccaattgtacgtgggtgatcatcgctgaagagcgcaacaggatacagatagtgttccagtcttttgccttggaggaagagtacgattacttatcgctgtatgatggtcatcctcatcctacaaacttccggactaggctgaccgggtttcaccttccacctcctgtcacttcaacaaagtcagttttctcattgaggctaacaagcgattttgccgtatccgcacacgggtttaaagtgtattacgaagaactgcagtctagctcttgcggtaacccgggagtcccaccaaaaggggtcctctatggaacccgctttgatgtgggcgacaagattcgatactcatgtgttaccggctacatcttggatggtcatcctcagctgacatgcatcgctaactccgtaaatactgccagctgggatttccctgtaccaatctgcagggctgaagacgcctgcggcggtacaatgcggggatccagtgggattatcagcagcccaagcttccctaacgagtaccacaataacgccgattgcacctggacaattgtggcagaacccggtgacacaatatctctgatctttaccgacttccaaatggaagagaagtacgactacctggaaatcgagggctccgagcctccgacaatctggctctctggcatgaatataccacctcccatcatatctaacaaaaactggctgaggctccactttgtaactgactctaaccatcgatatcggggattttctgcaccatatcaggtgaaaaaagccattgacttcaaaagtcggggttttaagctcttccccggtaaagataactctaacaagttcagcatacttaatgaagggggtatcaagaccgcctccaatctctgccctgatccgggagaaccggagaacggcaagcggattgggtccgatttcagcctaggctccactgtgcaatttagttgcgatgaagattacgtgctgcaaggggctaagtccattacttgccagcgaatagccgaagttttcgcggcttggtctgatcacagaccggtgtgtaaagttaagacgtgtggatctaacctccaggggccttctggaacattcacttcccccaatttcccattccagtatgactctaacgcccaatgtgtctgggttataacggctgtgaatactaacaaggtcatacagatcaatttcgaagagttcgatctggagattggatatgacacgttgactatcggcgatggcggagaggttggcgaccccaggaccgtcttacaggttctcaccgggtccttcgtccctgacctgatagtgtctatgtcaagccagatgtggcttcatctccagacggatgaaagcgtgggatcagtgggattcaaggtgaactacaaggaaatagaaaaagaatcttgtggagacccgggtacaccgctatatggcataagggagggagacggtttttctaaccgcgacgttttacgattcgaatgtcagtttgggtttgagttaatcggcgagaagagtattgtatgtcaggagaataatcagtggtcggcaaacatccctatatgcatcttcccttgtctctccaactttaccgcacctatgggcacggtgttaagcccagactacccagagggctatgggaataacctaaattgtatatggacaataatctctgatcccggaagccgtatccatctgtcctttaatgacttcgacctggaatctcaattcgattttttggctgtgaaagacggggacagcccggagtcgcccattctgggaaccttcaccggcgctgaggtgccctcgcatctcacgtctaattctcatatcctgcggctggagtttcaggccgatcactccatgagtggccgagggttcaatattacttacaacacttttgggcacaatgaatgtcctgaccccggaatcccaatcaacgctaggagattcggagacaatttccaactggggtcttcaatcagcgtgatttgcgaggagggctttatcaaaactcaaggtacagaaactattacatgtatcctcatggatggaaaggttatgtggtctggactgattcctaaatgcggcgctccatgcggagggcatttcagtgcgccatcaggcgtgatcttatcacctggctggccaggctactataaggatagcctgaattgcgagtgggtgattgaggcggaaccagggcactccataaaaattacgttcgagcggtttcagacagaattaaattatgacgtccttgaagtccacgacgggcctaatctgctctctccgttactcgggagctataatggtacacaggtgcctcagtttctattcagcagcagtaacttcatctacctcctgttcactacggataattctcgctcgaacaatggctttaagatccattatgaaagcgttactgtcaacacctacagttgcctggacccgggtattccggtccacggcaggagatatggccatgacttttctatcgggtccaccgtgagtttctcttgtgactccgggtatagactaagccacgaggaacccctcttgtgtgaaaaaaaccattggtggagtcaccccctgccgacctgcgacgccctgtgcggtggcgacgtaagaggcccttctggaactatactgtccccgggatacccagagttttatccgaactctctgaactgcacctggacagttgatgttacccacggaaaaggtgtgcagttcaatttccatacattccaccttgaagatcatcacgattatttactcatcactgaaaatggttcattcacacagccattggcacggctcacaggctcagacttaccgcctacaataaacgctggactatacggcaatttcagggcccaactgcggtttatctcagacttctccatatcctacgagggtttcaacattacatttagtgagtataatctcgaaccctgcgaggatcctgggatcccgcagtatggtagccggatcggattcaatttcggtattggggataccctgaccttctcctgttccagcgggtatcgcctggagggcacatccgaaatcatttgcctcgggggaggtaggcgcgtgtggagcgctcccttacccaggtgcgtcgccgagtgcggagcctcagctacgaataatgagggcattcttctcagcccaaactaccccctcaactatgaaaataaccacgaatgtatatattcgattcaggtccaagccggaaagggcattaacatttcggcgaggacgtttcacctcgcgcagggagatgtcctgaagatttacgacgggaaagataagactactcacttactgggcgcttttacaggcgcttcaatgaggggccttactttgagctcgacgagtaatcaattgtggctagaattcaacagcgatacggaaggcaccgacgaagggttccagttggtgtacacctcatttgagctgagtcattgcgaggaccccggtatacctcagttcgggtacaaaatcagcgaccagggccacttcgcgggaagtactatcatctatggctgcaaccccggttatactttacatggcagttctctgctcaagtgcatgactggcgaacgaagagcttgggattacccactcccatcgtgcatagcggaatgcggcggtaggttcaaaggggaatcttcaggaagaatcctgtcccccggttacccattcccatacgataataacttaaggtgtatgtggatgatcgaagtagatcctgggaatatcgtgtccctgcagttcctcgcattcgatactgaagcttctcacgacatccttagggtttgggacggccctccggagaacgacatgttgctgaaagaaatttccggttcactcattcccgaggggatccactccactctcaatattgtgacaattcagtttgacacagatttttatattagcaagtcaggcttcgccatccagttctctagcagcgttgctactgcctgccgcgaccctggggtaccaatgaatggcactcggaatggagacggacgggagcccggtgacaccgtggtcttccagtgtgatcccggatacgagctccagggtgaagagaggataacctgcatacaggtggagaaccgttacttctggcagccatcaccaccagtatgtattgccccttgcgggggtaatttaaccggctcctccggcttcatcctctcacccaactttccccatccgtatcctcactcccgcgactgcgactggaccattaccgtaaacgccgattatgtcattagtctcgcattcataagcttctccatcgagcccaactacgacttcctctatatatacgacggcccagactctaatagccctctgattggatcattccaggactccaaactacctgagcgcattgaatcttcttccaataccatgcacctggcgttcaggtccgacggatcagtgagttacactggatttcatcttgaatataaggcgaagctgagggaatcgtgttttgatccaggcaacattatgaatgggacacgtttaggcatggactacaagctaggaagcacagtgacttactactgcgacgctggatacgtgctgcagggctactccactcttacttgcattatgggcgatgatggacggccaggatggaatcgagccctccctagctgccacgcgccttgcggatctcgttccacggggtcagagggcaccgtgctgagccctaattacccgaaaaattacagtgtggggcacaattgcgtgtactccattgcggtgccaaaggagttcgtagtgtttggccaatttgttttcttccaaacatccctacacgatgtggttgaagtgtacgatggcccaacccaacagagctcgctcttgtcttctcttagcgggtcccactcaggcgaatcactgccactgtcatcagggaatcaaattacaatacggttcactagtgtgggaccaatcacagcaaagggcttccacttcgtgtaccaagcagtgcctagaactagctctactcagtgcagctcagttcctgaacctagatttgggagacgaatcggcaacgagtttgcagtcggctcttccgtgctctttgattgtaatccaggttacattttgcacggatccatcgctatccggtgcgagaccgttccaaactccctcgctcagtggaacgacagtctcccaacttgtatagttccatgcggaggaatcctgaccaagaggaagggaactattctttcccccggatatcctgagccttacgataacaatttgaattgtgtgtggaaaatcacagtgcccgaaggcgcagggatacaggtgcaggtggtgtccttcgcgactgagcacaattgggactcgctagatttctacgatggtggggacaataacgcaccgaggctgggctcatatagtggaacgacgatccctcacctgctgaactcaactagcaacaacctctaccttaatttccagagcgatatttctgtgagcgccgctgggtttcatctggagtacactgccattggcctggacagctgtcccgaaccccagacccctagttccggcattaagattggtgacagatatatggtgggggatgtagtgtcatttcaatgtgatcaggggtacagtctgcagggccactcccatatcacctgcatgcccggaccggttcggaggtggaattatccaattccgatttgtctggcccagtgtggaggtgcgatgtctgatttcagtggcgtaatcctttctccgggattccccggaaactaccccagttctcttgactgtacttggactattaatctacctattggatttggagtccacctccaatttgtaaatttcagcaccgaaacaattcacgactatcttgaggtccggagcggtagcagcgaaacatcaactgtgatcggcaggctgtctggaccgcagataccgtcgtctcttttttctactacccacgagaccagcctgtattttcacagcgactattcccagaacaaacaaggattccacatagtgtaccaggcataccagctgcagagttgtcccgaccccaggccgtttaggaacggattcgtcatcggaaacgacttcacagtaggacagactattagttttgaatgctttcctggttacacgttaatcgggaatagtgctcttacctgcctccacggcgtgagccgcaactggaaccaccctttacctcggtgtgaggcgctctgcggcggtaatatcactgccatgaacggcactatctacagcccgggatacccagacgaataccccaatttccaagattgcttttggctggtacgcgtgccgccaggcaacggcatctatataaattttactgtccttcagaccgagcctatttacgactttattacagtctgggacgggcctgaccagaacagtccacagatcggccagttctccgggaataccgccttggagagtgtttactctacttcaaaccagattttgattaaatttcactctgattttaccacatcgggtttcttcgtgctaagctaccatgcttatcagctgcgagtctgtcagccaccaccgcctgtgcccaacgccgaaattcttactgaggacgatgaatttgagattggtgacattatccggtaccaatgtctgccaggattcacactggtgggcaacgcaatactgacctgtagattgggggagagactgcagatggacggcgcacccccagtgtgccaagttttatgccctgcgaacgaactcaggcttgattccaccggggtgatactgtcgcctggctatcccgactcctatcccaatcttcaaatgtgtgcatggagcatctcggttgaaaaagggtacaacattactatgttcgtggagttcttccaaactgaaaaagagtttgatgtgcttcaggtgtatgatggccctaatatacagtcccccgtgttgatttcactgagtggggactacagcagtgcttttaacattacctccaatggccacgaagtgtttcttcagtggagcgctgatcatgggaacaacaaaaagggattcagaattaggtacattgccttttattgctctacacccgaatccccccctcatggctacatcatctcacaaacgggcggacagctaaactctgtcgtgagatgggcttgcgacaggggatttcggctggtgggaaagtctagcgctgtgtgccgcaagtccagttatggataccacgcctgggatgcccctgtgcctgcctgccaagctatcagctgtggtatcccaaaggctccaaccaatggcggtatcctgactacagactatctcgtgggtacccgtgtaacgtacttttgcaatgatggataccggctcagttcgaaggaactgacaaccgcggtgtgtcagtctgacggaacttggagcaatcacaacaaaaccccccgatgcgtcgtaatcagttgcggcgaactgcccaccccacccaacggcaacaagatcggcacacaaacctcttatggtagtactgccattttcacatgtgacctgggttttatgctagtgggctctgcagtgagagaatgccttagcagcggcctttggtccgagtctgagactaggtgcctggcaggccattgtggcatcccagagctgatcgtgaatggccaggtaatcggggagaactacggctatagagataccgtggtttaccagtgcaatcccggattcaggctgattggatcatctgttaggatctgccagcaggaccataattggtcgggtcagctgcccagttgcgtccctgtgtcttgcgggcatcccggatcccccatctacggtcgcaccagtgggaacggcttcaactttaatgacgtggtcacctttagctgcaatattggatacctcatgcagggcccaacaaaggcacaatgccaagctaatagacagtggtcccaccccccaccgatgtgtaaggtcgttaactgcagcgatcccggaatccccgctaactcaaaacgcgagagcaaaattgagcatggtaacttcacgtatggcactgtggtgttttatgactgtaatccaggatacttcctttttgggtcctccgtgctgatctgtcagcccaatggtcaatgggacaaacccctcccggaatgcattatgatcgactgcggtcatccaggggtgccgcctaacgccgttctatcaggtgagaagtacacattcggcagtaccgtacattattcgtgtaccggtaagcgctctctccttggacagagcagcagaacatgccaactgaacggccattggtctggctcccagcctcactgcagcggcgacgcaaccggcacctgtggcgacccaggcacaccaggccatggcagcaggcaggagtctaatttccggactaaatcaacagtaagatatgcttgtgacactggctatatactccacggatccgaggagcgaacttgccttgccaacggaagctggactggcaggcagcccgagtgtaaggcggtgcagtgtggcaatcctggaacaaccgccaacggcaaagtctttcgcatcgacgggaccacatttagcagcagtgtgatctactcctgtatggagggctatatcctgtccggtcctagcgtcaggcaatgcacagctaacgggacctggagtgggacactgccgaattgcacaattataagctgtggtgatcctggtattcctgctaatggcctccgctatggcgacgattatgtggtcggccagaacgtttcgtacatgtgccaacccggttataccatggagctgaatgggtcaagaatcagaacctgcacaatcaatggcacttggtccggagtgatgcctacttgcagggccgttacctgtcccacacccccacagatttcgaacgggaggcttgagggaacaaatttcgattggggtttctcaatctcctacatatgtagtccaggctatgaacttagttttcctgccgtgttaacttgcgtcggaaatggaacctggtctggggaagtgccacagtgtctgccgaaattttgcggagaccctggaatccccgcacagggtaaacgcgaggggaaatctttcatctatcagagtgaagtgtctttctcctgtaacttccccttcatcctcgttggcagctctactaggatttgtcaggcggatggcacctggagtggtagctcccctcattgcattgaacctacccaaacttcttgtgaaaacccgggagtgccaagacacggatcccagaacaatacatttggttttcaggtgggctctgttgtacaatttcactgcaagaaagggcatttgttacagggctcgactacacgcacgtgcctacccgaccttacgtggtcgggtatccagccggaatgcatccctcactcatgtaaacagcccgaaactcctgcccacgctaatgtggttggcatggacttgccttcccacggctacaccctgatctacacatgtcagcctggcttctttctggccggaggtacagagcacagggtttgtcggagcgacaacacatggacaggcaaagtgcctatatgtgaggccggaagcaaaatcctggtgaaggatccgaggccagcgctgggtacaccctcaccaaagctttccgtccccgatgacgttttcgctcaaaattacatttggaagggcagctacaactttaagggacgaaaacagccaatgacactcactgttaccagtttcaacgcatcgactggcagagtgaacgccaccctgagcaacagcaacatggaattattgctgtccggcgtgtataaatcacaagaggcgcgactaatgctgcggatctacctgattaaagtgcccgctcatgcttctgtcaaaaaaatgaaagaggagaactgggccatggacgggttcgtgtcagctgaaccagacggtgccacatacgtgtttcaggggttcatccaaggtaaagattacggccaatttggtctgcagaggctcggtctgaatatgagtgagggttcaaatagttccaaccagcctcatggtaccaacagcagttcagtcgccatcgcaattctggtgccattcttcgcgctgatctttgcagggttcggtttctacctgtataagcaaaggactgctcctaaaacacaatacaccgggtgctcggtgcacgagaacaataatggacaggccgcttttgagaatcctatgtacgatacaaatgccaaaagcgtggaggggaaggcagttagattcgacccgaatttaaacactgtctgcacgatggtatag

SEQ ID NO: 219515 - DNA, 2511 bp, synthetic construct
  misc_feature 1..2511: note = Description of Artificial Sequence: Synthetic coding sequence
  source 1..2511: mol_type = other DNA
atggcaggactcaattgtggggtatccattgccctcctcggcgtcttgcttctcggtgccgcaaggctgcccaggggagcagaagccttcgagatcgcactaccgcgagaaagcaacatcacagttctgatcaaactcgggactcctaccctgctggctaaaccatgctacatcgttatatccaagcgccacattacaatgctgtcaatcaagagcggtgagcgtatcgtgttcactttttcctgtcagtccccggaaaatcactttgtaattgagatacaaaagaatatagactgcatgagcggtccctgcccatttggagaagtgcagctgcagccctccaccagtctgcttcctaccttgaataggaccttcatttgggatgtcaaagcgcacaaaagcatcgggcttgaactgcagttctccatccctcgtctccgccaaataggccctggcgagtcatgtccggatggtgtgacccattcgatttccggcagaattgacgccactgtggtccgcattgggaccttctgttcaaacggtacagtgtctcggatcaaaatgcaagagggggtgaaaatggccctacacctaccatggtttcacccaaggaacgtctccggcttttccatcgctaaccggtcgagcatcaaacggctgtgtattattgaatccgtgtttgaaggggagggctccgccactctgatgtctgcgaactacccagagggctttcccgaagacgaactcatgacatggcagtttgtggtacccgctcacctgagagcaagcgtttccttcttaaatttcaatcttagtaactgcgagcggaaggaggagcgagtcgagtactacatccctggaagtacgacaaatcctgaggtcttcaaactggaggacaagcagccagggaatatggccggaaattttaacctgtctctgcaggggtgtgaccaggatgctcagtccccagggattctcagactgcagtttcaagtcttggtgcaacatcctcaaaacgagagtaacaaaatttatgtcgtggatctgagcaatgagcgagctatgtctctcaccatagagccgagacccgtcaagcagagccggaaatttgtgcccggatgcttcgtttgtctggagagccggacttgtagttctaatctaacactcacatctggctccaaacataaaatatcatttctctgtgatgatctaaccagactttggatgaatgttgagaaaaccatttcttgcaccgaccacagatactgccagcgcaagagctatagtcttcaggtgccaagcgacattttgcaccttccggtcgagctccatgatttttcatggaaactgctggttcccaaagatcgactgtcactggtgttagtgccagctcaaaagctccagcagcacactcacgagaaaccctgcaataccagtttttcatacttggtggcatcagcgatcccctcccaagatttgtactttggtagcttctgccccggaggcagtataaagcagatacaggtcaagcagaacatctccgtgacactgaggaccttcgcaccctctttccagcaggaagcaagcagacagggattgactgtgtcctttattccttatttcaaagaggagggcgtgttcaccgtaacgccagacacaaagtccaaggtatatctgcgcacaccaaattgggataggggtctgcccagtctgacatctgtcagttggaacatttccgtcccacgagaccaagtcgcttgtctgaccttttttaaggagcggtctggcgttgtttgccagaccggtcgcgcatttatgatcatccaggaacaacgcactagagccgaggagatcttttcgctggacgaggatgtgctcccaaaacctagcttccaccaccattccttctgggtgaatataagtaattgtagtccaacatcaggcaaacagttggacctgttgttttctgtcacccttaccccccgaactgtggatctcactgtgattcttattgccgctgtcggcggtggagtgctgctactcagtgctctggggcttataatttgctgcgtgaaaaagaagaaaaaaaaaaccaataagggccctgctgtggggatatacaacgacaacatcaacaccgaaatgcctcgccagccaaagaaattccagaagggacgaaaggataatgatagccacgtgtatgccgttattgaagatacaatggtctacggacacttattacaggattcttcaggatcatttctgcaaccagaagtggatacatatagaccatttcagggcacaatgggagtttgtccgccttcccccccaaccatctgtagccgagctccaacggctaagctggccactgaagagccacctccacggagccctcctgaatcggaaagtgagccgtataccttttcccatccaaacaacggtgacgtgagcagcaaagacacagatatcccactgttaaacacccaggaaccaatggagccagctgaatag

SEQ ID NO: 219516 - DNA, 1032 bp, synthetic construct
  misc_feature 1..1032: note = Description of Artificial Sequence: Synthetic coding sequence
  source 1..1032: mol_type = other DNA
atggctgggctgaattgcggcgtcagtatagctctcctcggtgtgctcctgctcggtgccgctaggctgcctcggggagccgaagccttcgaaatcgctctccctcgtgaatcgaacattactgtgctaattaagctgggcactcctacgctattagctaaaccttgctacatcgtgatatccaagcgacatataacaatgctgtcaatcaagagtggagagcggatcgtgttcaccttcagctgccagtctcccgagaaccactttgttattgagattcaaaaaaacattgattgtatgtccgggccttgtccatttggggaggtgcagttgcagccaagcacaagtctgttgccaacccttaatcgtacatttatttgggacgtcaaggctcacaagtctattggacttgagctccagttcagcatccctcgactgaggcagataggcccaggtgagtcttgccccgacggcgttacccactccatttcaggtcggatagacgccaccgtggtgcggataggcacattttgttccaatggcactgtgtcgcggatcaagatgcaagaaggagtcaagatggctctgcatttgccatggtttcacccacgtaacgttagtggcttcagtatcgcgaacagatcttctattaagagactgtgtatcattgagtccgtgttcgaaggagaaggctcagcaaccctgatgagcgccaattatccagaaggatttccagaagacgagctgatgacctggcagttcgttgtgccagcacacctcagagcatccgtgtcattcctgaactttaatctaagcaactgcgaaagaaaggaagagagggttgaatactacatccctggtagtaccacaaatcccgaggtgttcaagctggaggataagcagcctggtaatatggccggaaatttcaatctgagcttacagggatgcgaccaggacgcccaatcccctggtatactccggctgcaatttcaagtgcttgtgcagcacccccaaaatgaaagtagcgagtag

SEQ ID NO: 219517 - DNA, 513 bp, synthetic construct
  misc_feature 1..513: note = Description of Artificial Sequence: Synthetic coding sequence
  source 1..513: mol_type = other DNA
atgatgaacatgtcactcccattcctctggtcccttctgactctcctcattttcgcagaggttaacggcgaggctggagagctggaacttcaacgccaaaaacgaagcattaacctgcagcagcctcgcatggctacagagcggggaaaccttgtgttcctcactggttcggctcaaaatattgaattcagaacggggagtttggggaaaatcaaactcaacgacgaggatctgagtgagtgtctccatcagatccagaagaacaaggaggatattatagagctcaaagggtccgccataggattacctcagaacatctcaagtcaaatttaccagctcaacagcaaactcgtggatttagagcgcaaatttcagggactccagcagacagtcgacaaaaaggtttgttcgagcaacccttgccaaaatggtgggacctgtctgaaccttcacgactccttcttctgcatctgtcctcctcagtggaaggtgtcgcacctcctgttcgggtag

SEQ ID NO: 219518 - DNA, 10872 bp, synthetic construct
  misc_feature 1..10872: note = Description of Artificial Sequence: Synthetic coding sequence
  source 1..10872: mol_type = other DNA
atgatgaatatgtctttaccatttctgtggagcctgctgactctcctgattttcgccgaggtcaacggcgaggcgggtgagctggagctccaacgtcaaaagcgatccataaatctgcagcagccccgtatggcaaccgagaggggaaatctcgtgtttctgaccggctcagcccagaatatagaattccggacgggctctcttggcaaaatcaaactgaatgatgaagaccttagcgaatgcctccatcaaattcagaagaataaggaagacataatagagctgaagggcagcgccatcggattgccccagaacataagtagccaaatctaccaactgaatagcaagctcgtggatctggaacggaaattccaggggctgcagcaaaccgtcgacaagaaggtgtgttcaagtaatccctgtcagaacggcggtacttgtttgaatctgcatgactcgtttttctgtatatgcccaccccaatggaagggacctctctgctccgctgacgttaatgagtgcgagatttatagtggaacccccttgtcctgtcagaatggtggaacctgtgttaacactatggggtcatacagttgccattgcccccctgaaacatatggaccccaatgtgccagcaagtacgacgattgtgaaggaggctccgtggctaggtgtgtgcacggtatttgcgaggaccttatgagggagcaagccggagaacctaaatattcatgcgtttgcgacgctgggtggatgttttcacccaactctcctgcttgtaccctcgatagggacgagtgttcatttcaacccggaccatgttcgactctcgtgcaatgcttcaacacacagggcagcttttattgtggggcatgccctactggctggcaaggcaatgggtacatctgcgaagatattaacgaatgtgagattaacaatgggggttgcagcgtggcccctccagtggagtgtgtgaatactccagggtccagccattgccaagcatgtcccccaggctaccagggagatgggagggtttgtacgttgaccgacatctgctcagtgtcaaatgggggatgccatcccgatgcttcctgttcctctacattagggagcctcccattgtgtacatgtttgccgggatacactgggaacgggtatggtccaaatgggtgcgtgcaacttagcaacatctgcctctcacatccctgtttgaacggccaatgcatcgatacagtaagcggctatttttgtaagtgtgactccggatggacaggtgtgaactgcacagagaatatcaatgagtgcttgtcaaatccctgcctgaatggcggtacctgtgtcgatggcgtcgactcgttctcttgcgagtgcacccggctatggactggtgccctgtgtcaggtgccacagcaggtgtgcggggaaagtctgtctgggattaatgggtcgttctcatacaggagcccagatgtaggctacgtgcacgatgtcaattgcttttgggtgatcaagacagagatggggaaagttctgagaattactttcacgtttttccgtctggagtcaatggacaactgcccacatgaatttctgcaggtgtacgacggggattcctcatcggccttccaactggggagattttgtggatcaagcctgccccacgaactgctgagtagtgacaatgcgctgtactttcatctgtattcagagcacctgaggaacggaagaggttttaccgtgcggtgggagactcaacagccggagtgcggtggcatactgaccgggccatatgggtcaatcaagtcccctggttacccagggaactaccccccaggacgcgactgcgtgtggattgtagtgacaagtcccgatttgctggtcacatttacattcggcactttatccttggaacaccatgatgactgcaacaaagattacctagaaatcagagatggtccactttaccaggaccctctgctggggaagttttgcactaccttttcagtccctcccctgcaaactactggtccctttgcgcgtatccattttcattccgatagtcaaattagcgatcaaggatttcacattacctatcttacatctccctccgatctacggtgcggcggaaactatacagatccagaaggtgagttatttttgccggaactgtccggtccttttactcacactcgccagtgcgtgtatatgatgaagcagccacagggcgagcaaattcagatcaattttacccacgtggaattgcagtgccagtcagacagctctcagaattatattgaagtgagagatggagaaacgctactaggaaaggtgtgtggaaatgggacgatctctcacattaagtccattacaaacagcgtgtggatccgttttaaaattgacgcgtcggtggaaaaagctagtttccgcgcagtttaccaagttgcgtgcggtgacgagctgacaggcgagggtgttattcgcagcccctttttccccaacgtctacccgggagagcgcacctgtagatggacgatccaccaaccccagagtcaagttatcctgcttaactttaccgtgtttgagatcggtagctctgctcactgtgaaacagactacgtggagattggttccagttcaattttaggaagtccggagaacaaaaagtactgcggtaccgatattccctctttcattacttcagtctacaattttctatatgttacctttgtgaagtcgtccagtaccgagaaccacgggttcatggcaaaattttcagccgaggatctagcttgtggggaaatactgaccgaatcaactgggaccatccagagcccaggccaccccaacgtgtacccacatggcatcaactgtacatggcacattctcgtccagcccaaccacctgatacatcttatgttcgaaacgtttcatcttgagttccactataattgcacgaacgactacttagaggtttatgacactgatagcgaaaccagcctagggcgttattgcggaaagtccatcccaccatcactcacctcttccggaaattcgctgatgctggtgtttgtgaccgactccgatctcgcgtacgaaggtttccttataaactacgaggcaatttccgcagcgacagcatgtctgcaggactatacagatgatctgggaacttttacctcaccaaacttccccaacaactatccgaacaactgggaatgtatctacaggattacggtgcggactggacagctcatagccgtacacttcactaatttttccttggaggaagcaatcgggaactactacaccgactttttagaaatccgagacggcggttacgagaaatctccactgttggggatcttctacggttccaatcttcccccaactattattagtcacagtaataagctctggctgaaattcaagagcgaccagatcgacacccgctctgggtttagcgcctactgggatggaagctctacggggtgcggcggaaatctcaccaccagcagtggcacttttatcagtcccaactaccccatgccctattatcattcctcagaatgctactggtggctgaagagttcccatggaagcgccttcgagcttgagtttaaagatttccatcttgaacatcacccgaattgcactctggactacctggccgtctatgatggcccttccagcaactcccatctgctaactcaattgtgcggcgacgagaagccacctctgatccgctcatctggggattcaatgttcatcaaactccgcacagacgaaggacagcagggcaggggatttaaggcagaatatagacagacttgtgagaacgtggtaatagtaaaccaaacgtacgggatactagagagtattggataccctaatccatactctgagaaccagcactgcaattggacgatccgggctacaacgggcaacaccgtgaattacacctttctcgcattcgacctggagcaccacattaactgttccacggactatctcgagctttacgacggcccaaggcaaatgggccgttattgcggggtggatctaccccctccgggatccaccacaagttcaaaactccaagttctcctgttgacggatggagtcggtcgcagggagaagggtttccagatgcagtggtttgtctatggatgcgggggagaattgagcggagccactgggtccttctcctcacccggttttcctaaccggtacccaccaaataaggagtgtatttggtacatcagaaccgatccaggttcctcaatccagctgacaattcatgacttcgacgtcgagtaccactctcggtgtaacttcgatgtccttgaaatttacggcggtccagactttcacagtcctcggatcgctcaattatgtacacaaaggagccctgagaacccgatgcaagtatccagcactggaaatgagctagccatcagatttaagactgatctgtccattaacggcaggggctttaatgcatcctggcaggctgtcaccggcggttgcggcggaatttttcaggcaccatccggcgaaatccactccccaaactacccctctccatataggagcaataccgactgctcatgggtgatccgggtcgatcgcaaccaccgcgttctgctcaatttcaccgatttcgacttggagccccaggattcctgcataatggcctatgacggattgtcatctacaatgtcccggctagccaggacctgcggaagggaacagctggctaaccctatcgtgtcctccggaaattctctgtttctgcgattccaatcaggtccctctcgccagaacagaggctttagagctcaatttcggcaagcatgtgggggacacatccttaccagttccttcgatactgtttcttctcctagatttcctgcaaactatcccaacaaccagaattgctcatggattatacaggcccagcccccattgaaccatatcaccttgtcattcacgcacttcgagttggagcggtccacaacttgtgcccgtgatttcgtggagatactggacggagggcacgaggacgctcccctgagaggaagatactgcggaacagacatgcctcatcctattacttctttcagttctgccctgactctgcgctttgtcagtgattcatcaattagcgccggtggcttccatactacagttactgcctcagtcagcgcatgcgggggaaccttttatatggcggaaggcattttcaatagccctggctatccggatatctacccccctaacgttgaatgcgtgtggaatatcgttagtagcccagggaataggctgcagctctcctttatctcatttcaattggaagactcccaggattgcagtagagacttcgtcgaaattagggaaggtaacgcaaccggtcacctggtcggacgctattgtgggaactcttttcccctcaactatagctctatcgtgggccatacgctttgggtgcgattcatctcagacggttcggggtccggaaccggttttcaggcaacatttatgaagatctttggtaacgacaatattgtggggacacatgggaaggtcgctagtccattctggcctgagaactacccccacaactccaattaccaatggacagttaacgtgaatgcttcccacgtggtgcatgggaggatattagaaatggacatagaggaaatccagaactgctactatgacaagctgcggatttatgatggtcccagcattcacgccaggctgatcggtgcctattgtggaacgcagacggaaagttttagctccacaggaaactccctgacatttcacttctacagcgattccagtatttccggcaaagggttcctgcttgagtggtttgctgtcgacgctccagacggggtcctccccaccatcgcccctggcgcttgcgggggttttctcaggacaggtgacgcccctgttttcctcttcagtcccggttggcctgattcttattctaacagggtcgactgcacctggttgatccaggccccagacagtaccgtcgagctgaacatcctgtccctcgacatagaaagtcaccggacgtgtgcctacgattcactggttataagggacggtgacaataacttggcacagcagcttgcagtgctgtgcggcagagaaattcccggacccatccgctccactggagagtatatgttcataagatttacaagcgactcaagtgtgactcgggctggatttaatgctagttttcacaaaagctgcgggggttacctccatgctgatcgcggtatcattacatcccccaagtacccagaaacttaccccagcaacctaaactgcagctggcacgtcctcgtccaatcaggcttgactattgcagttcacttcgagcagccgttccaaataccaaatggcgattcatcatgtaaccaaggagactacctggtgctgcgcaacggaccagatatctgctcaccaccactgggaccacccggaggaaacggccatttctgtggctcacacgcatcaagtacgctatttacctctgacaaccaaatgtttgtacaattcatctcagatcacagcaacgagggccaggggttcaagattaagtatgaggccaagagcctggcatgtgggggtaatgtgtatatccatgacgcagactcagctggctacgttaccagccctaatcaccctcacaattaccccccacacgctgactgtatctggattctggcggcaccaccagaaacacgcattcaactgcaattcgaggaccgctttgatatcgaggtaacaccgaattgtacttcgaattatctcgagttacgagacggggtggattccgacgcgccaatcttgagcaaattttgtgggacgagtctgccctcttcgcaatggtcatccggtgaggtgatgtacttacggttccggtcagataattcacccacacatgttggctttaaagcaaagtatagcatcgcccagtgtggcggaagggtccctggacaatcaggagtagtggaatcaattggccatccgaccctgccgtatagagataacctcttttgtgaatggcaccttcagggactgagtggccattatctgaccatcagcttcgaggattttaacctgcagaattcaagcggctgcgaaaaagattttgtggagatctgggataatcataccagtgggaatattcttggtcgctactgcggtaataccatccctgactccattgatacctctagcaatactgcggtggtgcgattcgtaacagacggcagcgtgaccgcgtccggtttccggctccgtttcgaatccagtatggaggagtgtggcggagatctgcaagggtctattggaactttcacgagccctaactatcccaatcccaatcctcatgggagaatctgtgagtggagaattaccgcccctgagggccgacggatcacactgatgtttaataatctgcggctcgccacgcatccctcctgtaacaatgaacacgtgatcgtcttcaatggtatcaggtcaaactctcctcagctggaaaaattgtgttcttctgtaaacgttagtaacgagattaaatcatctgggaacactatgaaggtgattttctttactgatggctctagaccttatggcggatttaccgcaagttacactagttcggaggacgccgtctgtggcggtagtctccccaatacccccgaggggaatttcactagtcctggctacgacggagttcgcaactacagccgcaacttgaactgtgaatggactttatctaaccctaatcagggaaattcttcaatttccatccacttcgaagatttttacctagagagccatcaggattgtcagttcgacgttctggaatttcgggtgggcgatgctgacggacctctaatgtggcggctctgcggtccttccaagcccacactgcccttggtcatcccgtattctcaggtgtggattcacttcgtcacaaacgaacgggttgagcacatcggattccatgctaaatacagctttaccgattgcggaggcattcaaattggggatagcggggtgatcacatctcctaactatcctaatgcttatgattcccttacgcactgctccagccttctggaggccccacagggtcatactattaccctgacattttctgacttcgacatagagccacacacgacctgtgcgtgggactcggtcactgtgcggaacgggggatccccggagtcacctatcatcggccagtactgcggaaactcaaacccccgtacaattcagagcggaagtaatcagctcgtggtgacttttaatagcgaccactccctgcagggcggaggattttacgccacctggaacacgcagaccctgggttgtggaggcatctttcattccgataacggtaccatccgttctccccactggccacagaattttcctgaaaattccaggtgtagctggacagcaatcacacacaagagcaagcatctggagataagttttgacaacaatttcctaatccccagcggtgatggacagtgccagaattcgttcgtgaaagtttgggccggaactgaagaagtcgataaggcactcctcgccaccgggtgtggtaacgtggctccaggacctgttatcactccaagcaacacattcacggccgttttccagtcacaggaggccccagctcaaggtttttctgcatcattcgtgtctcgctgtgggtctaactttactgggccatcgggctacataatcagccctaactaccctaaacagtacgacaataacatgaactgcacctacgttattgaggccaatccattatcagtggttttactgaccttcgtgtcttttcacttggaagcccgtagcgctgtgaccggttcctgtgtgaatgatggggtgcatatcatacggggatactcggtaatgagcacacccttcgccactgtttgcggggacgagatgcctgcaccacttactattgccggaccggtacttcttaacttttacagtaatgagcagatcacagactttggctttaaattttcttatcgcatcatcagttgtggcggagtttttaatttttcctcagggatcattacaagccctgcttactcctacgcggactatccgaatgatatgcattgtctctataccattactgtgagtgacgataaggtcattgagctgaaattcagcgatttcgatgttgttcctagtactagttgctctcatgattacctggcgatatacgatggagccaacacttccgatcctctgcttggcaagttttgtggttctaaacgccctcccaacgtgaagtcttcgaacaattccatgctgctggtctttaagacagattcctttcaaacagcaaaaggatggaaaatgtctttccgtcagacactcggccctcagcagggctgcgggggatacctgactggcagtaataacacattcgcgtcacctgattccgatagtaatggcatgtacgataaaaatctcaactgcgtgtggatcatcattgcacctgtgaataaggtaattcatctaacgttcaatacttttgcgttggaggccgcttccacccggcagaggtgcctgtatgactatgtcaaactctacgatggtgactccgaaaacgcgaatctcgccggtacgttctgtggtagcaccgttccggctccattcataagctctggcaactttctaactgtgcagtttatttctgacttgacgcttgaaagggagggctttaacgccacctacaccataatggacatgccatgcggcggtacttacaatgccacctggactccccagaacatttcatcaccaaactcatcagatcccgacgtacctttttccatctgtacatgggtcattgactctcctccacaccagcaggtgaaaatcactgtgtgggctctgcagctcacctcacaggattgcactcaaaactacttgcaactgcaggacagtccacaagggcacggcaattctaggtttcagttttgcgggaggaatgcaagcgcagtgcctgtgttttacagctcaatgagcacggccatggttatcttcaagagtggggtcgtcaatagaaatagtcggatgtcgtttacataccaaattgcagattgcaaccgggactatcacaaggctttcggcaacctgcggtcaccaggttggcctgacaactatgacaatgacaaagattgcacagttacattgaccgccccacagaaccacacaataagccttttctttcattctttagggattgagaacagcgtggagtgcagaaatgacttccttgaagtccgcaatgggagtaattctaacagtcccttgctcggtaagtactgcggcacgttgttgccaaatcccgtgtttagccagaacaatgagttgtacttgcggttcaagtcggatagcgtcaccagcgatcgcggatacgagatcatatggacatcttctccctccggctgtgggggtaccctctacggagatagggggagtttcacgagtccaggctacccagggacctatcccaacaatacttactgtgaatgggtgctggttgcacccgctggacgcctggtgacaattaatttttattttatatctatcgacgaccctggagactgcgtacagaactacttgaccctgtacgatggcccaaacgcgtctagccccagcagcgggccatattgtggcggagatacttcaatcgcaccgttcgtggcttccagcaaccaagtctttatcaagttccatgcagattacgccaggcgccctagtgcctttaggctgacatgggattcatac

SEQ ID NO: 219519 - DNA, 318 bp, synthetic construct
  misc_feature 1..318: note = Description of Artificial Sequence: Synthetic coding sequence
  source 1..318: mol_type = other DNA
aattccaagctggtggatttagagcgcaaatttcagggactgcagcaaaccgtcgataaaaaggtgtgcagtagcaatccctgccagaacggaggaacctgtttgaatctccatgattctttcttttgtatatgtcctccacagtggaagggcccactatgttcagccgacgtcaatgaatgcgagatctattccggcactcccttgagctgccagaacggtggtacctgcgtgaacactatggggtcctataggaacccctgcagcaatataccaaaagagccagaagagggttcacgggattggcatcgcgagtag

SEQ ID NO: 219520 - DNA, 267 bp, synthetic construct
  misc_feature 1..267: note = Description of Artificial Sequence: Synthetic coding sequence
  source 1..267: mol_type = other DNA
tctacaggcaacgagctcgctattcggtttaagaccgatctttcaatcaacgggaggggctttaacgctagttggcaggccgtgacggggggttgcggcggaattttccaggccccttcaggtgaaatccacagccctaactatccaagtccctacaggagcaacaccgactgtagctgggtgatcagagtcgacagaaatcaccgcgttttgctcaacttcactgatttcgacttggagccgcaggactcatgtatcatggtgtag

SEQ ID NO: 219521 - DNA, 1395 bp, synthetic construct
  misc_feature 1..1395: note = Description of Artificial Sequence: Synthetic coding sequence
  source 1..1395: mol_type = other DNA
atgtcccactcgtggaacgtgctctggctgactttctgtagtgactccaatgggatgtatgataagaatctgaattgcgtttggatcattatcgcccctgtgaataaggtgattcatttgacgttcaacaccttcgccctcgaggccgctagcacaagacaacgctgtctgtacgactatgtgaaactctacgacggggactctgagaatgccaaccttgctgggacgttctgcggctctacagtccccgcaccattcatctcttcaggcaacttcctgacagtgcagttcatttccgatctgacactggagcgcgaaggctttaatgcaacctatacgattatggacatgccctgtgggggtacgtacaacgctacgtggacgccccagaatatttcctcgcccaatagcagcgatcctgatgtaccttttagcatctgcacctgggtgattgacagcccgccacaccaacaggttaagatcactgtgtgggctctgcagttaacctctcaggactgcacacaaaactatctgcagctccaggatagccctcagggacacggtaattctaggtttcagttttgcggacgtaacgctagcgcagtccccgtcttttactcctccatgagtaccgctatggtcatctttaagtcaggagtagtgaatcggaatagcagaatgtctttcacttaccagatcgctgactgcaacagggattatcataaggcttttgggaaccttaggtctcccggttggcctgacaactacgataatgacaaggactgcacggtgaccctgaccgcgccacagaatcacactatttccctctttttccatagccttggtatcgagaatagcgtggagtgcagaaatgacttcttggaagtaaggaacggatcgaactccaactcacccttgctggggaaatactgcggtactctcttaccaaatcctgtcttctcccagaataatgagctgtacctgcgtttcaaatccgattctgtgacctcggatagaggatacgaaattatttggacgtcctccccgtctggttgtggcggtacactgtacggcgatcgtggatctttcacgagccccggatatcccggaacgtacccaaataacacgtattgtgaatgggtgctggtggcccctgctggcagactggtgaccattaacttctactttatctccatagatgatcctggagactgtgtccagaactatctgacgctatatgatggccctaatgccagttctccttcttcaggcccttattgcgggggagatacgtctatcgcccctttcgttgccagcagcaatcaggtgtttataaagtttcatgccgattacgctcggcgtcctagtgcgtttaggctgacttgggattcttag

SEQ ID NO: 219522 - DNA, 864 bp, synthetic construct
  misc_feature 1..864: note = Description of Artificial Sequence: Synthetic coding sequence
  source 1..864: mol_type = other DNA
atggagttagaacgaatcgtgtcagccgcacttctcgcgttcgttcagactcatctgccagaggcagacctctctggattagatgaggtaatctttagctatgttctgggcgtgctcgaggatctaggcccaagcgggccttcagaagaaaacttcgatatggaagcgtttacagagatgatggaagcgtacgtacccggttttgctcatatacctcgaggtacaatcggtgatatgatgcagaaactttccgggcagctgtctgacgccaggaacaaagaaaacctccaaccccagtctagtggcgtgcagggacaagtgcctatctcacctgagccgctgcaacgcccagagatgctcaaggaagagacccgctcgagcgcagctgcagcggcagatacacaggacgaggctaccggagccgaggaagagctgttgcccggagtcgatgtgctgcttgaggtctttccaacttgcagtgtggaacaggctcagtgggtgctggccaaagctagaggggatctcgaggaggccgttcagatgttagtggagggcaaggaagagggacctgctgcttgggagggtcctaaccaggatttacctaggcggctgcggggacctcagaaggatgaactgaaatcatttattcttcagaagtacatgatggttgattccgcagaggaccagaagattcatcgtcccatggcaccgaaagaggcacctaaaaagcttattcgctatatcgataatcaggtagtgagcaccaaaggggaacgcttcaaagacgtccgaaaccctgaagcagaggagatgaaagcaacatatatcaacttgaagcccgcacggaagtaccggttccattag

SEQ ID NO: 219523 - DNA, 1365 bp, synthetic construct
  misc_feature 1..1365: note = Description of Artificial Sequence: Synthetic coding sequence
  source 1..1365: mol_type = other DNA
atggccgctgctccaggtgggtcagcccagccggcaggtcctgggccacgcctggggttttccaccgccgactcaggggtgggaatgtcgggcctcaatccaggaccagctgttccaatgaaggaccacgacgctattaagctgttcgtgggtcagatcccgcgtggcctcgacgaacaggatttaaagcccttattcgaagaatttggcagaatctacgaactcacggtcctgaaggatcggttaacaggtctgcacaagggttgcgcttttctaacttactgtgcaagagattccgcactgaaagcacagagcgcgctgcatgaacaaaaaaccctccccggaatgaacagacccattcaggtaaaacctgcagctagcgaaggcagaggagaagaccgcaagttgtttgtgggcatgttgggcaagcagcagggcgaagaagacgtcagacggctctttcagccatttggccacattgaggagtgtactgttttgcgttcaccggacggtacatctaaagggtgcgcattcgtgaaattcggctcacagggtgaggcacaggctgctatcaggggacttcacgggtcacggaccatggccggtgcttcctcgtcgctggtggtcaagttagccgacaccgaccgagagcgcgcactgcgcagaatgcagcagatggcaggccatctgggcgcattccatccagcgcctctgcccctgggcgcttgtggagcatacactacggcaatcctgcagcatcaagccgctctcctggctgcagcccagggtcctggcctcgggcctgttgctgctgtggctgctcaaatgcagcatgtggccgcattctcattggtggctgccccactgcttcctgctgccgctgccaacagtccccctgggagcgggcctggcacgcttcccggacttccggctccaataggggtcaacggctttggacctcttacgcctcagacgaacggacagccaggaagcgacaccctttataataatggactctctccctacccagcccagtcgcccggagtggccgacccgcttcagcaggcgtatgctggcatgcatcactatgccggacccgaaggatgtaatctgtttatttatcacctgcctcaggagtttggcgatgccgaactgatccagacgtttttacccttcggagctgtggtttccgctaaagtttttgtggaccgcgctactaatcagagcaaatgcttcggtttcgtatcgtttgacaaccctacctctgctcaaaccgccattcaagccatgaacggctttcagattggaatgaaaaggctgaaggtccagctgaaaagacccaaagatgcaaatcggccttactag

SEQ ID NO: 219524 - DNA, 1398 bp, synthetic construct
  misc_feature 1..1398: note = Description of Artificial Sequence: Synthetic coding sequence
  source 1..1398: mol_type = other DNA
atgaaggagcctgacgccatcaagctgttcgtcggccagattcccagacacctggaggaaaaagacttgaagcctatctttgaacaatttggacggatcttcgagctgactgtaataaaagacaagtacacaggcctgcataaaggctgtgccttcttgacttactgcgcaagagactcagccctgaaagctcagtctgctctgcatgaacagaagactttacccggaatgaatcgaccaattcaggtcaagcctgctgacagcgaatcaagaggtgaggatagaaagttgtttgtgggcatgctgggcaagcagcagacagacgaggatgttcggaaaatgttcgagccctttggtactattgacgaatgtactgtcctccgcggacccgatgggacctcaaaaggctgcgcttttgtaaagttccagacccacgccgaagcgcaggcggcaatcaataccctacactcttcacgcactttgcccggagcctcgtcgagccttgtggttaaattcgcagacacagagaaagagagaggtctgcgtaggatgcagcaggttgcaacacagctgggaatgttctcccccatagcactgcagtttggcgcttattccgcctacacacaagccttaatgcaacagcaggcagctcttgtggctgctcattccgcctatctgagtcccatggctaccatggcggctgtccagatgcagcacatggccgctatcaatgccaacgggctcattgcaacaccaatcaccccttcgtcaggaaccagcacacccccagcgattgctgccacgcccgtatcagctatcccagcagctctcggtgtgaacggttactctcctgtgcctacccagccaacagggcagcccgctcccgatgcactgtatcccaatggagtgcatccatatcccgcacagagcccagcagcgccagtggatccccttcagcaggcttacgccggtatgcagcactacacagccgcatacccagcagcatattcactagttgccccagcttttccgcagccacctgcactggttgctcagcagccaccaccgccaccccagcagcaacagcagcagcaacagcagcagcagcagcagcagcaacgggaaggcccagatggctgcaatatcttcatctaccacctcccccaggagtttacagacagcgagattcttcagatgtttgtgccgtttggccatgtaataagcgcaaaagtatttgtagaccgcgctaccaaccaatcgaagtgttttggatttgtctcctttgataaccccgcatcagcccaggctgctatccaagcaatgaatggtttccaaataggaatgaagcggctgaaggtacagctgaagcggcctaaggatgcaaaccgcccatactag

SEQ ID NO: 219525 - DNA, 1248 bp, synthetic construct
  misc_feature 1..1248: note = Description of Artificial Sequence: Synthetic coding sequence
  source 1..1248: mol_type = other DNA
atgaaagagcctgatgccatcaaactgtttgtgggccagatccccagacacctcgaagaaaaagacctaaagcccatctttgagcaatttggcagaatttttgaacttacggtgataaaagacaaatacacagggttacacaaaggatgtgccttcttgacttattgcgccagagatagcgctcttaaagcccagagcgctctgcacgagcaaaagacccttcccggtatgaacagacctatccaggtcaagcccgctgattctgaatcacgtggggaagataggaagctgttcgtggggatgcttggcaagcagcagaccgatgaagacgtgcggaagatgttcgagccttttggcaccatcgacgaatgtactgtcctgcgcggtcccgatgggactagcaagggttgtgccttcgtcaaattccagacccacgccgaagctcaggctgcaataaatactctccattcctcacgaactctgccgggagcgtcatcatccctcgttgtgaaatttgctgataccgagaaagaacgaggacttcggcgtatgcagcaggttgccacccagcttggcatgttctccccgatcgctctccaattcggagcgtactctgcatacactcaggcgctcatgcaacagcaggctgcgttggtagccgcacactctgcttacttgagccctatggccacaatggccgcagtgcagatgcagcatatggctgctattaatgctaatgggctcattgctacccctatcacgcccagttctgcccagtcaccagccgcaccagtggaccccttgcagcaggcctatgcgggaatgcagcactatacggctgcgtatcctgcagcttacagtctagttgctccggcatttccccaacctcctgctctcgtggcccagcaacctccccctccaccacagcagcagcagcagcagcaacagcagcaacagcagcagcagcaaagagaggggcctgatggctgcaacatttttatataccacctgccccaagagtttactgactccgaaatcttgcagatgttcgtgccattcggacatgtcatctccgccaaagtgtttgttgatcgggctacaaatcaaagcaaatgttttggatttgtaagttttgacaatccagctagcgcccaggctgcaattcaagccatgaacgggttccagattggaatgaagcgcctcaaagttcaactcaaaagacccaaggatgccaatagaccctattag

SEQ ID NO: 219526 - DNA, 900 bp, synthetic construct
  misc_feature 1..900: note = Description of Artificial Sequence: Synthetic coding sequence
  source 1..900: mol_type = other DNA
atgaaggagcctgacgctatcaaacttttcgtgggacaaataccacgtcacctggaagagaaggaccttaaaccaatattcgaacagtttgggcgtatcttcgagcttactgtgattaaggacaagtatactggactgcataaaggctgtgcttttctaacgtactgcgcgagagactctgccctcaaagcccaatcggctctccatgaacagaagactctgcccggaatgaatcggccaatccaggtaaagcccgctgacagtgaatcacggggagaccgcaagctgtttgtcggaatgcttggaaaacagcagacagacgaagacgtccggaagatgttcgagcctttcggcactattgacgaatgcacagttttgcgcggaccggacggtacctccaaaggctgcgcatttgtcaaattccaaactcatgccgaagctcaggccgctatcaatacacttcactccagtcgcaccctgcccggtgcctcttctagcttggtagtcaagtttgcagatactgaaaaggaacggggacttagaaggatgcaacaggtagcaacccagttaggtatgttcagccccatcgccctgcagtttggcgcatattcggcttatacccaggctctcatgcagcagcaggcagccttagttgcagcccactctgcttacctctccccgatggctactatggctgccgttcaaatgcagcacatggctgccataaacgccaacggcctgattgctacacccattaccccctcctcagccaagggacacggatatgccagtcttgccccacgcgcacacttcttgctcgacgccttactcgctttcgttagagaacgaggaacaggttccaaagctcccggatacttgccatccgccggtctgttgtag

SEQ ID NO: 219527 - DNA, 783 bp, synthetic construct
  misc_feature 1..783: note = Description of Artificial Sequence: Synthetic coding sequence
  source 1..783: mol_type = other DNA
atgcagcaggtcgccacacaattagggatgttcagcccgattgcccttcagtttggagcatactccgcttacacacaggcactgatgcaacaacaggccgcactagtggcagcccatagtgcgtacctgtcgcccatggccacgatggctgccgtgcagatgcaacacatggccgcaattaatgccaacgggctcatcgccacacctatcacaccttccagtggcacctctacgccacctgccattgcggcaacaccggtgtcggccatcccagctgcgctgggggttaatgggtatagtccagtgcccacacagcccacgggccagcctgcacctgatgctctataccccaatggagtacacccgtaccccgcagcctacccagccgcatactctttggtagcacctgcctttcctcagccccctgcactagttgcacagcagccccctcccccaccgcagcagcagcagcagcagcaacagcagcagcaacagcagcagcagcgcgagggacctgatggatgcaatattttcatctaccacctccctcaggagtttacagatagtgaaatcctccagatgttcgtaccctttggacacgttatctccgccaaggtgttcgtcgaccgcgcaacaaaccagagtaagtgtttcggttttgtgagcttcgataatcccgcaagtgcccaggctgcgatccaagccatgaacggatttcagattggcatgaaacgactgaaggttcagctgaagaggcccaaagacgccaaccggccttattag

SEQ ID NO: 219528 - DNA, 1401 bp, synthetic construct
  misc_feature 1..1401: note = Description of Artificial Sequence: Synthetic coding sequence
  source 1..1401: mol_type = other DNA
tgagtcgaggagagcgccgctggagaacagtcatccggaacgcagatacccagacaccttgaagaaaaggatctgaaacctatcttcgagcaatttggcaggatcttcgaattgacggtgatcaaggataaatacactggtctgcataaaggctgcgctttcctgacctattgcgcacgcgacagtgccctcaaagcccagagtgcactgcacgagcagaagacattgccagggatgaatagacctattcaggtcaagcccgctgattccgagagtcggggtgacagaaagctgtttgtggggatgctgggcaaacagcaaaccgatgaggacgtgcggaagatgtttgaaccctttggcactatcgacgagtgtacagttctccggggtcccgatggaacctcgaagggttgtgcttttgttaagttccaaactcatgcagaagctcaagcagcgatcaacaccctgcactcttctaggaccttgcccggagcatcctcatcactggtagtgaaattcgctgacactgagaaggagcgcggacttcgccgaatgcagcaggtcgctacccaactcgggatgttttcccccattgcattgcagtttggcgcatatagtgcctacacgcaggctctcatgcagcagcaggctgcccttgtcgccgcacactctgcgtacctatctccaatggccacaatggcagccgtgcagatgcagcatatggctgccattaatgccaacgggctgatagccacccctattacccctagtagcggcaccagcactcccccagctattgctgccacacccgtcagtgccattcccgcagccttgggcgttaacggatattctccggttcctacccagcccacaggtcagcctgcgcctgatgcattataccccaatggcgtgcacccctatccggctcagtcacctgctgccccagtggaccccctccagcaggcctatgccggtatgcagcattatacagccgcttatccggcagcttacagtttggtcgcaccagcttttccccagccacccgctttggtggcgcagcagcctcctccgcctccccaacagcagcaacagcagcagcaacaacaacagcaacagcagcagcgtgaaggtccagacggttgtaatatctttatctaccacctgcctcaagaattcaccgactcagaaattcttcagatgttcgtaccattcgggcacgtgatatccgcaaaggtgttcgtggatcgcgcaactaaccagagcaagtgctttggatttgtctcattcgacaaccccgcttcagcccaggccgcaatccaggccatgaacgggtttcagatcggcatgaaaaggctaaaagtccagctgaaaaggcccaaggacgcaaatcgcccttattag

SEQ ID NO: 219529 - DNA, 1347 bp, synthetic construct
  misc_feature 1..1347: note = Description of Artificial Sequence: Synthetic coding sequence
  source 1..1347: mol_type = other DNA
atgtacatcaagatggctacccttgcgaatgggcaagctgacaacgcttcactctccactaacggactgggctcctcaccagggtccgcaggacacatgaatggcttgagccatagtccagggaacccaagcactattccaatgaaggaccacgatgcaatcaaactttttatcggccagatcccacgaaacctggacgaaaaggatcttaaaccgctgtttgaggaattcggcaaaatctacgagctgacagtgctcaaggatcgattcacaggcatgcacaagggctgtgcgtttttaacttactgtgagagagagtctgctctgaaagcccagtccgctctccatgaacaaaagacactgcccggtatgaatagaccgattcaagtcaagcctgctgactcagagtctcgaggtgaagataggaaactgttcgtgggcatgctgaataagcaacaatccgaggatgatgtgcggaggctcttcgaagcattcgggaatatcgaagaatgcacaatcctccgaggtccagatggtaacagtaagggctgcgctttcgtcaagtatagttctcatgcggaggcccaggcggctataaatgcgttacacgggagtcagactatgccaggcgcttcgtcatccctggtagttaaattcgctgacacagataaagagcgcacaatgcggagaatgcagcaaatggccggtcagatgggcatgtttaaccctatggctattccttttggggcatatggcgcttacgctcaggcgctgatgcagcagcaagctgcactgatggcatcagtggcccaggggggatacctcaatccaatggccgctttcgcagccgcacagatgcagcagatggccgctcttaatatgaacggtctggctgccgctccaatgactcctactagcgggggtagcacacccccagggatcacggctccggctgtccccagtatcccgagtcctattggtgttaacggctttaccgggttgcccccacaagctaatgggcagcccgcagcggaagcagtgttcgctaacggaattcacccctaccccgctcaatctcctactgccgcagatcctctgcagcaagcgtacgccggagtgcagcagtacgcaggtccagccgcttaccccgcagcttatggtcagatatcgcaggctttccctcagccacctccaatgatccctcagcagcagcgtgaaggtttcgttagtttcgataacccagcaagtgcccagactgccattcaggcaatgaacggatttcagatcgggatgaagcggcttaaagtacagctgaagcgaccaaaagatgccaaccgtccctattag

SEQ ID NO: 219530 - DNA, 639 bp, synthetic construct
  misc_feature 1..639: note = Description of Artificial Sequence: Synthetic coding sequence
  source 1..639: mol_type = other DNA
gttagcgcggagggcccagaaagagccgcacgggctgaggactccgctcgggatgagccggctgaccctggagaggcatgcgggcagcgggagccaaaagatcggaagctcttcgtgggcatgctaaataaacagcagtccgaggatgacgtgagacgcctctttgaggcctttgggaatatcgaggaatgcactatcctgagaggaccagatgggaactccaaaggatgtgcatttgtgaagtatagctctcatgcagaggcccaggccgcaatcaacgctctgcatgggagtcaaacaatgcctggtgcttcaagctcactcgtggtgaagtttgcagacaccgataaggaaaggacaatgcggaggatgcagcagatggccggtcagatgggaatgttcaatcctatggccatacccttcggtgcttacggggcttacgcgcaggccttaatgcagcagcaggcagctctgatggcgtccgttgcgcaggggggatacttgaacccgatggctgcattcgcagcggcacaaatgcaacagatggctgctctgaatatgtggcctggaggtagaacatatgacccgaacctcagatggcaacacccttctggacatcactgtacttctagagcttag

SEQ ID NO: 219531 - DNA, 1461 bp, synthetic construct
  misc_feature 1..1461: note = Description of Artificial Sequence: Synthetic coding sequence
  source 1..1461: mol_type = other DNA
atgtacattaaaatggcaacactggccaatgggcaagcggataatgcttctctcagcaccaatgggttggggagttccccaggctccgccggacatatgaacgggctgagccattccccagggaatccttccactatacccatgaaagaccacgatgccattaaactattcatcgggcagatccccagaaatcttgatgaaaaggatctgaaacctctctttgaggaatttggaaaaatctacgaactcacagtcttgaaagaccgctttacaggtatgcacaaaggctgtgcgttcctcacgtattgtgaaagagagagcgccttgaaagcgcagtcggcgctgcatgagcagaaaacactgccgggtatgaatagacctatccaggtgaagccagccgacagcgagagcaggggagggtccagctgcctgcggcagcctccttcgcaggaccgcaaactgttcgtgggcatgctgaacaagcagcagtccgaagatgatgttaggagactatttgaagcattcgggaatatagaagaatgtaccatcctgcgtggccctgacgggaattccaagggttgcgcctttgtgaaatacagctctcacgcagaggctcaggccgcaattaacgctctgcacgggagccagaccatgcctggagcttcttcttccctggtagtgaagttcgccgataccgacaaggagcgcacgatgcggaggatgcagcagatggcagggcagatgggtatgtttaaccctatggcaatcccctttggcgcttatggggcttacgcgcaggcactgatgcagcagcaggctgccctaatggcctcagtcgcgcaaggcggttatctgaaccctatggccgctttcgcggcagctcaaatgcaacaaatggccgctctgaatatgaatggtttggcagcagctcccatgacacccactagcggcggaagcactccaccaggaattactgccccagccgttcccagtattccctctccaatcggggtcaatgggttcacgggcttgccaccccaggcaaatggccagcctgcggctgaagctgtattcgcgaacggcatccatccataccctgcgcagagccccacagctgccgatcctttgcaacaggcgtacgccggtgttcagcagtatgccggtcccgcagcgtaccccgctgcctacggccagatcagccaggcatttccacaaccccctcctatgatcccgcaacagcaacgcgagggccctgaaggatgcaatttgtttatttaccacctgcctcaggaattcggggatgcggaattgatgcagatgttcctcccatttggcttcgtgagtttcgacaaccccgcaagtgcgcagacagccattcaggcaatgaacgggtttcaaattggaatgaaacgtctcaaagtacaactgaagcggcctaaggacgcaaataggccatattag

SEQ ID NO: 219532 - DNA, 1458 bp, synthetic construct
  misc_feature 1..1458: note = Description of Artificial Sequence: Synthetic coding sequence
  source 1..1458: mol_type = other DNA
atgtatatcaagatggctacattagccaacggacaggccgacaacgcctcactgagtacaaacgggctgggtagttcgcctggttcggcagggcatatgaacggtttgagtcacagcccaggcaacccttccactatccccatgaaagaccacgatgccattaaactttttattggacagatcccaagaaatttagatgaaaaggacctgaaacctttatttgaggaattcggaaagatctacgagctgacagtgctgaaggacaggttcactggaatgcataaggggtgtgcattcctcacctactgcgagagggaaagtgctctcaaagcccagtcggccttgcacgagcagaagacactacccggaatgaaccggccaatccaggtcaagcccgctgactcagagagccggggtggttcctcttgcttgagacagcccccttcacaggaccgaaagttgttcgtcggcatgcttaacaagcaacagtcagaggatgacgtgcggcgtctctttgaagccttcggaaatatcgaagagtgcacgatcctgcgcggaccagatggcaattctaaaggctgtgcatttgtcaaatattcatcacatgctgaggcacaggcagccataaatgctcttcatgggagtcagacaatgccaggcgcaagttcttctctcgttgttaagttcgctgataccgacaaagagaggaccatgcgaagaatgcagcagatggcaggacagatgggtatgtttaatcccatggcaatcccgtttggggcttacggcgcttacgctcaggctatgcagcagcaggcagcactcatggcatctgtggcgcagggaggctacctaaatcctatggcagccttcgcagccgctcagatgcagcagatggcggctctgaacatgaatggcttggcagccgctcccatgacaccgacgagcggtggttctactccacctggaattactgctccagccgtcccatccatcccatctcccatcggcgtgaatggatttaccggtcttccacctcaggctaatggacagcctgcagccgaggccgtgttcgccaatggaattcatccataccctgctcagtctccaaccgcagctgaccccttgcaacaggcgtacgccggagttcaacagtacgcgggacccgcagcttatccggcagcgtatggacagatcagtcaggcctttccccagccaccaccaatgatcccccaacagcagagggaaggacccgaggggtgcaatttattcatctaccacctaccgcaggagttcggtgacgccgagttaatgcagatgttcctgcccttcggattcgtgagctttgataaccccgctagcgcccagacagctatccaggctatgaacggattccaaatcggaatgaaaaggttgaaggtgcaactgaagcgtccaaaggacgccaacaggccatactag

SEQ ID NO: 219533 - DNA, 1455 bp, synthetic construct
  misc_feature 1..1455: note = Description of Artificial Sequence: Synthetic coding sequence
  source 1..1455: mol_type = other DNA
atgtatatcaagatggccacattggcaaacggacaagctgacaatgcatccctgtctacgaacgggctgggctcctccccaggaagtgcgggacacatgaatggcctgtcccactccccaggcaatccgagcaccatacccatgaaggatcacgacgctattaagctgttcatcgggcagattcctcgcaacttggatgagaaggatctgaaacccctgttcgaggaatttggtaaaatatatgaattgaccgtacttaaagacaggttcaccgggatgcataaggggtgtgcattcttgacatactgtgaacgagagagtgctcttaaagctcagagtgctctccatgagcaaaagactttgccaggcatgaacagacctatccaggtgaagcccgcagacagtgagtcacgtggtggatctagttgcctgcgacagccaccatctcatcggaagctgtttgtaggaatgctgaataagcagcaaagcgaggacgatgtccgcaggctctttgaggcctttggtaatatcgaggagtgcacgatactcagagggcctgacggaaattcgaagggctgtgcatttgtgaaatacagctctcatgccgaggcccaagccgcaatcaatgccctacacggaagtcaaaccatgccaggtgcctccagcagcctcgtcgtcaagttcgccgatacggacaaagagcgcaccatgcgaaggatgcagcaaatggccggacaaatgggaatgttcaaccccatggcaatccccttcggcgcatacggcgcatatgcacaggcgatgcagcagcaagcagccttgatggcctctgtagcacagggaggctaccttaatcccatggctgctttcgcagcagctcagatgcagcagatggccgctctgaacatgaatgggctggccgcagcacccatgaccccaaccagcgggggttccacaccgcctggcatcaccgcccctgcagtgccaagtatcccgtctcccatcggcgtaaacggcttcactggtcttccacctcaggctaatggtcagccagctgccgaggccgtcttcgccaacggcatccatccttatcctgctcagagtcccacagccgcagatccactccagcaggcctatgccggagtgcaacaatacgcaggccctgccgcatatcccgcagcgtacgggcagatatctcaagcattcccccagccacctcctatgataccccagcaacagcgtgaagggccagaaggctgcaacctcttcatataccacctgccacaggagtttggggatgctgagctaatgcagatgttcctgccgttcggttttgtgagtttcgacaacccagcctctgcccagaccgccattcaggctatgaacggctttcagattggcatgaaaagactgaaggtccagcttaagcgaccaaaggacgctaatcgcccatactag

SEQ ID NO: 219534 - DNA, 1458 bp, synthetic construct
  misc_feature 1..1458: note = Description of Artificial Sequence: Synthetic coding sequence
  source 1..1458: mol_type = other DNA
atggcgaggctcaccgaatctgaagctcggcgacagcagcagcagctcttgcaaccgagaccctctcccgtggggtccagtgggcctgagccaccgggagggcagccagatggaatgaaggacttggacgccatcaagcttttcgtaggccaaatccctcggcacctggacgaaaaagacttaaagcctctttttgagcagttcggccgaatttacgagctgacagtactcaaagacccatacaccgggatgcacaaaggctgtgccttcctcacctactgtgccagagacagcgccatcaaagctcaaaccgctctgcatgagcagaagacgttgcccggtatggcaagacccatccaagtcaaaccagcagactccgaaagtcggggagggagagatcgaaagctctttgtggggatgttgaataagcaacagagcgaagaggacgttctgcgcctattccagccctttggagtgatagatgagtgcaccgttctgcggggtccagacgggtcctccaaggggtgcgcctttgtcaaattttcatcccatactgaggctcaggcagccatccacgcactgcacggttcccagactatgccaggagcaagcagcagtttggtcgttaaattcgccgacaccgacaaagaacgtaccttgcgcaggatgcagcaaatggtggggcagctgggcattcttaccccatccctgaccttacccttttccccttattccgcttatgcccaagccttaatgcaacagcaaactaccgtcttgagcacttcagggtcttacctttctccaggtgtcgcgtttagcccctgtcacatacaacagattggagccgtgagtctgaatggcctgccggcaacccccatagcccctgcaagcggacttcacagccccccactgctgggcacaacagctgtccctggcctggtggcaccgatcacaaacggcttcgcaggtgtcgtccctttccccggaggccatccggcactggagacagtgtacgctaacggacttgttccctaccccgcacagtctcccacagtcgctgaaactctccacccagccttcagcggcgtgcaacagtacactgccatgtatcctaccgcagctattaccccaattgctcacagcgtacctcagccccctcccctgctgcaacagcaacagcgagagggcccagagggctgtaatctcttcatttatcatctgccacaagagttcggagatacggagcttacacagatgtttcttcctttcgggaatataatctcaagcaaggttttcatggacagggctacaaaccagtcgaagtgcttcggattcgtgtctttcgataaccctgcctcagcccaggcagctattcaagccatgaatgggttccagattggaatgaagcggcttaaggtgcaactgaagcgtcccaaagatcctgggcacccatattag

SEQ ID NO: 219535 - DNA, 963 bp, synthetic construct
  misc_feature 1..963: note = Description of Artificial Sequence: Synthetic coding sequence
  source 1..963: mol_type = other DNA
atggctagacctatccaagtgaaacctgctgactccgagagtagaggcggaagagaccgaaagctgtttgtgggcatgttgaacaagcagcagtcagaagaagacgtcctgaggctgtttcagccctttggcgtcattgatgagtgcacagtgctccggggaccagacggcagctcaaaaggatgtgctttcgttaaattttcctcccacaccgaagcgcaggcggctatccacgccctacatggatctcagacaatgccaggtgcttcctccagtttagtggtaaagttcgcagacacagacaaagaacgaactctgcgcagaatgcagcagatggtgggtcagcttggaatcctgaccccttctttgacattgcccttctcaccatacagtgcttacgcacaggctctcatgcagcagcagactaccgtgctgtcaaccagtgggagttatcttagccccggagtggcattctccccctgtcacatccaacagattggcgctgtcagcttaaacggactaccggcaacaccaatcgctccagcttccgggctacattctcccccattgcttgggaccaccgcagtccccggactcgtggctcccataacaaatggctttgccggagtggtcccttttcccggagggcaccctgcccttgagacggtgtacgcgaatgggctggtgccgtaccccgctcagtccccaacagttgctgagacattacaccccgcattttcaggagtccagcagtataccgccatgtatcccaccgccgctatcactcctatagcccactccgtgccacaacctccccctctgcttcaacagcagcaaagagagggcgtgtggcggcatggcgctgatgccgatgtgccaactctgagacagtaccattttttgcagggggtttacggttcatcataccagcccgagcaggtctttcggctgagagagttgtag

SEQ ID NO: 219536 - DNA, 1230 bp, synthetic construct
  misc_feature 1..1230: note = Description of Artificial Sequence: Synthetic coding sequence
  source 1..1230: mol_type = other DNA
atggcacgtctaacagaatccgaggctcgccgacagcaacagcagctcctgcagccccgtccctcccccgtcggttcttctggtcctgagccccctggtgggcagcccgatggcatgaaggatctggatgccatcaagctctttgttggacagataccacggcacctcgacgaaaaagacctcaaacccctcttcgagcagttcggccgtatctatgagctgaccgtgctgaaggacccgtacaccggaatgcacaagggttgtgctttcctcacttattgtgccagggacagcgctattaaggctcaaaccgctctgcacgaacaaaaaactctgcccggtatggccaggcctatccaagtcaagccagccgattctgagagtcggggaggaagagaccgcaagctgttcgtcggtatgctgaacaaacagcagtcggaggaggacgtgcttagacttttccagccgttcggcgttattgatgagtgcaccgtgctccgtggccctgatggaagctcaaagggctgtgcctttgtcaaatttagcagccacactgaggcccaggccgcaatccacgccttgcacggcagccagaccatgcctggtgcctcatcgtcactcgttgtgaagtttgccgacacagataaagaacgcactttgagaagaatgcaacagatggtgggacagttagggatcctgactccctccctaacactgccttttagtccatattcagcatacgctcaagctctgatgcagcagcaaaccaccgtactgtctaccagcggttcatatttgagtcccggagtggcctttagcccgtgtcatatacagcaaattggagccgtgtctctgaacggcctacctgccacgcccatagctccggcttcaggagtggtcccttttccgggagggcaccccgctctagaaaccgtctatgccaacggactagttccctacccagctcagagcccgacagtcgcagagaccctacatcccgcattctcgggagtgcaacagtataccgccatgtatccaaccgccgctatcacccctattgctcactcagtcccccagccacccccactgctccagcaacagcagagagaaggagtgtggcgtcatggtgccgatgccgacgtacctacactgcgacaatatcacttcctgcaaggagtctatggctcctcctatcagcctgagcaggtctttagactcagagaactgtag

SEQ ID NO: 219537 - DNA, 1446 bp, synthetic construct
  misc_feature 1..1446: note = Description of Artificial Sequence: Synthetic coding sequence
  source 1..1446: mol_type = other DNA
atggctgctgctcccggtggctccgctcaacctgccggtcctggccctcgcctgggctttagtactgctgattccggcgtgggaatgagtgggctaaatccagggccagccgtccctatgaaggatcacgacgccattaaactgtttgtcggacagattccccgaggcttggatgaacaggacttaaagcccttgtttgaggagttcgggagaatctatgaattaaccgtgttgaaggataggctgaccggcctccataaggggtgcgcattccttacctattgcgctagagatagcgccctgaaggcccagagtgcactccatgagcagaaaaccttgccgggtatgaatcgacccatccaggtcaagccggctgcgagcgaggggaggggagaggaccggaaactgttcgttggcatgctgggcaagcagcaaggtgaggaggacgtacgccgattattccaacctttcgggcatattgaagaatgcaccgtgctgcgtagcccagatggtaccagtaagggatgcgcgtttgtgaaatttgggagccagggcgaagctcaggctgctattcgcggactacacgggtcgagaacaatggccggagcaagttcctctttggtggtgaagctcgcagacacagacagagagagagccctgaggaggatgcagcagatggcaggccacctgggggcatttcatcccgctccattaccactcggagcatgtggtgcatacaccactgccatccttcaacaccaggctgccctactcgccgcagcccaggggcctgggttaggccctgtggctgctgtggccgcacagatgcagcacgttgcagccttctccctggtggccgcaccactgttgccagccgctgccgcaaatagcccccctggctccggccctggtaccttgccaggactgcccgctcccatcggggtaaacggtttcggccctctcaccccccagaccaatggccaacccggatccgacaccctttataacaacggactatccccctaccccgctcagtcgcctggcgtggcggacccactgcagcaagcatatgccggtatgcatcattatgccgcagcatatccatctgcatatgcgcctgtcagtaccgcatttcctcagcaaccatctgccctgccccagcagcagcgggagggtcctgagggatgtaatttgtttatctatcacctgccccaggaatttggcgatgccgagctgatacagaccttcttgccttttggggcagtagtatcagccaaggtctttgtcgacagggccacgaaccagtcaaagtgcttcggtttcgtctcttttgacaatccaacaagcgctcaaaccgccatacaggcaatgaatggcttccagattggaatgaaacggctgaaagtgcagctgaagcggccaaaagatgccaaccggccatactag

SEQ ID NO: 219538 - DNA, 1107 bp, synthetic construct
  misc_feature 1..1107: note = Description of Artificial Sequence: Synthetic coding sequence
  source 1..1107: mol_type = other DNA
atgatctcagatcctcccagcaacaacagttggaactccgttctgtacctgctggaggacaggaaactctttgtggggatgttgggtaaacagcaaggggaggaagacgtccggcgactattccagccattcgggcacattgaagaatgtacggtgttgcgatcccctgacggcacaagcaaaggctgcgcatttgtaaaatttggctctcaaggggaagcacaagcggctattagaggcctgcacgggagccgaacgatggccggagccagcagttcactggttgtgaagctggcagacaccgatcgagagcgggcactaagaaggatgcagcagatggcgggacaccttggcgcattccatcccgcaccacttcccctgggggcttgtggtgcttacactacagcgatcttgcagcatcaggccgctttgctcgcagccgctcagggcccaggactcggccctgtcgccgcagtggctgcacagatgcagcatgttgccgcatttagtctcgtcgctgctccactactgcccgcagcggcagctaacagtccacccggtagtgggcctggcacactgcccggtctgcccgctcccattggtgtgaatggattcgggccacttactccccagactaatgggcagcctgggtcagacaccctgtataataatgggctgtccccatatcccgcacagagccccggagtcgctgatccactccagcaggcatacgcagggatgcaccattatgctgccgcatacccgtcggcctatgccccagtgagcactgcctttccccagcagcctagtgcactcccacagcagcagcgcgaaggacccgaaggatgtaacctgttcatttaccacctcccacaagaatttggggacgcggagctgatccagacattcctaccctttggcgctgtggtctctgctaaggtgtttgtggaccgcgctaccaatcagagcaagtgctttggttttgtgtcctttgacaaccctacgtccgcacagactgcaattcaggctatgaatggctttcaaatcggaatgaaacgactaaaagtgcagctgaaaaggccgaaagatgcaaatcgaccatattag

SEQ ID NO: 219539 - DNA, 1365 bp, synthetic construct
  misc_feature 1..1365: note = Description of Artificial Sequence: Synthetic coding sequence
  source 1..1365: mol_type = other DNA
atggccgcagcccctgggggatctgcgcagcccgcagggccaggtccaaggctggggtttagcacagcagacagcggcgtggggatgagtggtcttaaccccggtccagcagtgcctatgaaggatcacgatgccattaagctgttcgttggacagatccccagaggtcttgacgaacaagacctcaagccactctttgaagaattcggccgaatatatgagttgactgtactgaaggatcggctaactggtcttcataaaggctgtgcctttctgacatactgtgcccgtgactcagcactgaaagctcagagtgctttacacgagcagaagaccctccccggtatgaaccgccctatccaagtcaaacctgccgcaagtgaaggcaggggggaggatcggaagctgttcgttggaatgttgggaaagcaacagggcgaagaagatgtgcgaaggttgtttcagcccttcgggcacattgaggaatgtactgtactgaggagccctgatggaacctccaaaggctgcgcctttgttaaattcggatcgcagggggaagcacaggctgcaattagagggttacacggatctcgcaccatggcaggtgctagtagctcgctcgtcgtaaagttggccgatacagatcgtgagcgagccctccgaagaatgcagcagatggctggccatctaggagcatttcatcctgcccctcttcctctaggagcttgcggcgcatacacaacagctatccttcagcatcaagcagctttgttggcagctgctcaggggccaggtttgggaccagtagctgctgtggccgctcagatgcagcacgttgcagcttttagtcttgtggccgctccgttactacccgcagccgcagccaacagtcctcctggttcaggccctgggacactccccggtttacccgcacccattggagtgaacggtttcggcccactaacccctcagacaaacggccagcctggatctgatacgttgtacaacaacggcctgagcccctacccagcacaatcccctggagtcgccgacccacttcagcaagcctacgcgggaatgcaccactacgcaggcccagaaggttgcaacctgttcatctatcacctacctcaggagttcggtgacgctgaactgatccagacgtttttacctttcggcgctgtcgtttcggcaaaagtgttcgtggacagggcaacaaaccagtcaaagtgtttcggattcgtatcgtttgacaacccaacgtccgcacagacagccatccaggccatgaatggcttccaaataggaatgaaacgcctgaaggttcagctcaagagacccaaggatgcaaataggccttattag

SEQ ID NO: 219540 - DNA, 1029 bp, synthetic construct
  misc_feature 1..1029: note = Description of Artificial Sequence: Synthetic coding sequence
  source 1..1029: mol_type = other DNA
atgcttggtaaacagcagggcgaggaggacgtccggagattgtttcaaccattcggacacattgaggagtgtactgtcctgagatcaccagatggcactagtaaagggtgcgcttttgtaaaattcggatctcagggagaggcccaggcagccatccgtggcttgcatggatcccggacaatggcgggtgcttcctccagccttgtcgtcaagcttgccgacactgacagagagagagctctgcgcagaatgcagcagatggcaggccatctgggggcattccacccagcacccttgcccttgggcgcttgtggggcttatactacagccatattacagcatcaagccgcactgctagccgcagctcaaggacccggtctgggtcccgtggcagccgtcgccgctcagatgcagcacgtggccgctttttcactggtggccgcacctctgcttcctgctgctgccgcaaacagtccaccgggatctgggccaggaacacttccgggacttcccgctcccattggcgtgaacggtttcggccctctaaccccccagaccaacggtcagcctggctctgatactctctataacaacggcctctctccatacccagcccagagccccggagtggctgatcccctgcagcaagcctacgcaggtatgcatcactatgcagcggcttaccccagtgcttatgccccagtctctactgcattccctcagcaaccttctgccctcccacagcaacagagggaaggcccagaggggtgcaacttgtttatctaccaccttcctcaggaatttggggacgccgagctgatacagacctttttaccatttggcgcagtggtgtcagcgaaagtatttgtggacagggccacaaatcagtcaaagtgttttggttttgtaagtttcgacaaccctacctccgctcaaactgcaatccaggctatgaatggattccagataggaatgaagagactgaaggtgcagctgaagcggcctaaggatgctaaccgcccatactag

SEQ ID NO: 219541 - DNA, 1035 bp, synthetic construct
  misc_feature 1..1035: note = Description of Artificial Sequence: Synthetic coding sequence
  source 1..1035: mol_type = other DNA
atgaaccgcccaattcaagtcaagcccgctgcttcggaaggcaggggggaggaccggaagcttttcgtggggatgctgggcaagcagcagggcgaggaagatgtaagacggctatttcagccgttcgggcacatcgaagagtgtaccgtcctcagatccccagatggtacatccaagggctgcgcatttgtaaagttcggaagtcaaggagaggcccaggctgctattcggggactacacggctccagaacgatggctggcgcttcttcgtcattagttgtcaagttagctgataccgatagagagagggcactgcgcagaatgcagcagatggctggtcatctcggcgcattccaccccgctccgttgccccttggagcatgcggtgcctacactacagccatcttacaacaccaggccgctctgctcgccgctgcgcagggacccggactgggacccgttgcggctgtcgccgcacagatgcagcatgttgctgccttttcactggtagccgctccactccttccggcagccgcaaattcccctcctggctccgggcctggcactctgccagggctgcctgccccaatcggtgttaacgggtttggaccactcaccccacagacaaatggacagcccggtagcgataccttatacaacaacggcctctctccgtacccggctgcatatccatccgcctatgctccagtctccaccgccttcccccagcagccatctgcgctcccgcagcagcagcgcgaaggtccagaagggtgtaacctcttcatttatcacctgccacaggaattcggtgacgcggagcttatccagacatttctccctttcggagccgttgtatcagcgaaagtgtttgtggacagagccaccaaccagagtaaatgctttggcttcgtgagcttcgacaacccaacaagtgcccaaacggctatccaggccatgaatggcttccagatcggcatgaaaagactgaaggtacagctgaagcgtcctaaggatgccaaccgcccttattag

SEQ ID NO: 219542 - DNA, 1980 bp, synthetic construct
  misc_feature 1..1980: note = Description of Artificial Sequence: Synthetic coding sequence
  source 1..1980: mol_type = other DNA
atgctctacaagcagctgcggcaggcatgcgaagaccacgtgcaggctcagatccttcctttccgggaggactcgctggacagcgtactattcctgaaaaaaattaacacatgttggcaggatcattgccggcagatgattatgatccgcagcatattcctattcctggatagaacgtacgtgctgcagaacagtacactccctagcatctgggatatgggtctggagctgtttcgtactcatatcatcagcgataaaatggtgcagagcaagacaatcgatgggatcctcctattaattgaaagggaacggagcggggaggctgtggacagatcgcttcttcgcagcctcctgggcatgctttctgatcttcaggtttacaaggattcattcgagctcaaattcctcgaggaaaccaattgtctatacgcggcagaaggtcagcgacttatgcaggagcgggaggtgcctgagtatctgaaccatgtgtccaaacgacttgaggaggagggagacagggtcattacttatctggaccactcgactcagaaaccgttgattgcttgcgtcgaaaaacaattgctgggcgaacacctgacagcaatcctgcagaagggactggatcacttgctggacgaaaatcgggtccctgacttggcgcagatgtatcaactgttcagccgagtgcgcggtgggcagcaagcgctgctgcagcattggtccgagtatattaaaactttcggtaccgcaatagtgatcaacccagaaaaggataaggacatggttcaagatctgctggatttcaaagataaagtggaccacgtcattgaagtttgtttccaaaaaaatgaaagattcgtcaatcttatgaaagaatcatttgagacctttataaacaaacgaccaaataaaccggcagaactaatcgcaaagcatgtggatagcaagctccgcgctgggaacaaagaagcaaccgacgaagagctggagaggacacttgataagataatgatcttatttagattcattcatggaaaagacgtgtttgaggccttttacaaaaaggacctggccaagagactgttggtcggaaagtccgcttccgtggatgccgagaagtcaatgctgtcaaagctcaagcatgaatgcggcgctgcgttcacctcgaagttggagggcatgtttaaggacatggagctgagcaaggacatcatggtacattttaaacagcatatgcagaatcagagcgatagcgggccaatcgacctaactgtaaatatcctgaccatgggttactggcccacctacacccccatggaagtgcacttgacacccgagatgatcaagcttcaggaagtcttcaaggccttctatctcgggaaacatagtggtcgcaaattgcaatggcagacgacgctgggccatgctgtcctcaaggcggagtttaaggagggtaaaaaggaattccaagtatcattatttcaaactctggttcttctgatgttcaatgagggcgatggctttagcttcgaggagataaagatggcgacaggaatcgaagactctgagctgaggaggaccctccaaagccttgcctgcggcaaagctcgagtgcttattaagtctcctaagggaaaagaggtcgaggatggggataagtttattttcaatggtgaatttaagcataagctctttagaatcaagattaatcagatacaaatgaaagagactgttgaggaacaggtttccacaacagaacgggtctttcaagacagacagtaccagattgacgccgcaatcgttagaattatgaagatgcggaagactctggggcataacctattggtcagcgaactgtacaaccagttaaaattccccgtcaagcccggtgacctgaagaagcggatcgagtcccttatcgacagagactacatggagcgagataaggataacccgaatcaatatcactacgtcgcatag

SEQ ID NO: 219543 - DNA, 2280 bp, synthetic construct
  misc_feature 1..2280: note = Description of Artificial Sequence: Synthetic coding sequence
  source 1..2280: mol_type = other DNA
atggcagatgaggcccctcgtaagggatcattcagcgcattggtgggccgtacaaatgggctgactaagcctgcagccttggctgccgctcccgctaaaccaggaggtgctggcggatccaagaagttagtgatcaagaatttccgagatcgcccaagactgcccgataattacacacaggatacgtggagaaagctacacgaggccgtacgcgcagtgcaaagctcaacatccattaggtacaacctggaggaactgtaccaggcagtggaaaatctctgttcacataaagtgagcccgatgctatacaaacaattgagacaggcatgcgaggaccatgtgcaggcacagatcttgccttttcgggaggacagcttagatagcgtgctttttttgaagaaaattaacacctgttggcaggatcactgtcggcagatgatcatgattcggtctattttcctctttcttgaccgaacctatgtgctccagaactcaacattgccatcaatctgggacatggggcttgagttgttcaggacccacatcatctccgacaagatggtgcagagcaagaccattgatggaattcttctgctcattgagcgagagcgcagcggcgaagcggtggaccgctcactgctccgatcattacttggcatgctcagtgacttgcaggtatataaggactctttcgagttgaagtttttggaagagaccaattgcttgtatgctgccgaaggacagaggctcatgcaggagagagaagttcctgagtatctgaaccacgtgtctaagcggctggaggaggagggagatcgcgtgataacatacctggaccacagcacacagaaacccttgatcgcctgcgtggagaagcagctgcttggcgagcatctcacggccatcctgcagaagggactggaccacctgctggacgagaatcgcgttcccgacttggcgcagatgtaccagctgttcagtcgcgtgcgtggcggacagcaagcactgttgcaacactggagcgagtacatcaaaacctttggaactgccatagtgatcaatcctgagaaagataaagatatggttcaggacctgctggatttcaaagacaaagtggaccatgtcattgaggtttgtttccaaaaaaacgaacggtttgttaatctaatgaaagaatccttcgaaactttcattaataagagacccaacaagccagcagagctgatcgccaaacacgtggactccaagcttcgcgcaggtaacaaagaagctaccgacgaagagctggaaaggacgctagataaaatcatgattctttttcggtttatccacggaaaagatgtgttcgaggcgttttacaaaaaggacctcgctaagcgcttattggtaggaaagagcgcatctgttgacgcagagaaatctatgctctcaaagttgaaacacgagtgcggcgctgcatttacttccaaactcgagggcatgttcaaggacatggaattgagcaaagatataatggttcactttaaacagcacatgcagaaccagagcgatagtgggcctatcgaccttactgtgaatatactgacaatggggtactggcctacgtacacacccatggaggtgcatctgacccctgaaatgatcaagctgcaggaggtctttaaggccttttatctgggcaaacactcagggcgaaagttgcagtggcaaaccaccctgggtcatgccgtgctgaaggcagagtttaaggagggtaaaaaggaattccaggtgtctctatttcagaccctggtactgctaatgttcaacgagggcgatggattcagcttcgaggagattaagatggccacaggcatcgaagactctgaattgcggcgtactttacaatccctcgcctgtggcaaggctagagtgctgataaaaagcccaaagggcaaggaggtagaggatggagacaaattcatctttaatggagagtttaaacacaagctgtttagaattaagattaaccaaattcaaatgaaggagacagttgaggagcaggtctcaacgacagaacgcgtgttccaggataggcagtatcagatcgatgcagcaatagtccgcatcatgaagatgcgcaaaactctcggacacaacttattggtcagtgagctgtataaccagctgaaattccccgtcaaaccaggagacctcaaaaagcgtatcgagtccctgattgaccgcgactacatggaaagagataaggacaacccgaaccagtaccactatgtggcttag

SEQ ID NO: 219544 - DNA, 1980 bp, synthetic construct
  misc_feature 1..1980: note = Description of Artificial Sequence: Synthetic coding sequence
  source 1..1980: mol_type = other DNA
atgttgtacaagcagcttcgtcaggcgtgcgaggatcatgtgcaagcccagatcctacctttccgcgaggacagcctggacagcgtcctattcttaaaaaaaatcaatacatgttggcaagaccactgtcggcagatgattatgatccgaagtattttcttgtttcttgatcggacgtacgtccttcagaacagtactcttccatcaatatgggatatggggctcgagttgtttaggactcacatcatttctgataagatggttcagtccaagacgatcgatgggatcctgttgcttatcgagcgcgaacggtccggggaagccgtcgatagatcacttcttcggtcgctcctgggcatgctctcggatttgcaggtgtacaaggattctttcgaactaaaattcttggaggagacaaattgcctgtatgccgcagagggacagcgccttatgcaggaaagagaggtgccagagtacttgaatcacgtgtctaaaaggctggaggaagaaggagaccgagtcatcacatatctggaccactccactcagaagcctctgatcgcttgcgtcgaaaagcagctgctgggcgagcaccttacagcaatactgcagaagggtctcgaccatctgctagatgagaatagggtgccagatctagcccagatgtaccagttgttctctcgtgtacgcggagggcagcaggcactcttgcagcattggagcgagtacatcaagacttttggcaccgcgatcgttatcaacccagagaaggataaagatatggttcaggatctgctcgactttaaggacaaggtagaccatgtgatagaagtttgtttccagaagaatgaaaggttcgtaaatctgatgaaggaaagctttgaaacatttattaacaaaagacctaataagcccgcagagttgatcgccaagcacgtcgactctaagctgcgggcaggcaacaaagaagccaccgacgaagagcttgagcgcactctggacaaaatcatgatcctgttcagatttatccatgggaaagacgtattcgaggccttctataagaaagatctggcgaagcgccttctcgtggggaaatccgcttcagtggatgctgagaagagtatgctgtccaaactcaagcacgagtgtggagccgcattcacctcaaaactcgaaggcatgtttaaggacatggaactctctaaggacatcatggtgcacttcaagcagcacatgcagaatcaatcagacagcggacccattgatctcacagtgaatatcctcactatgggctattggcctacctacacacccatggaggtgcacctgacgcccgagatgattaagctccaggaggtatttaaggccttttacttggggaaacattccggtaggaagttgcaatggcagacaaccttgggccacgccgtgctgaaggcagagttcaaagagggcaagaaggagttccaggtgtcgctgttccagaccttggtcttgctcatgttcaacgagggagacggcttcagctttgaagagatcaagatggctacgggcatcgaggattctgaactgcgtaggacactgcagagtctggcttgcgggaaagcccgagtgctcatcaagtcccctaagggaaaagaggtagaagacggggataaatttatctttaacggcgagttcaagcataaactgtttcgcatcaaaatcaaccaaatccaaatgaaggaaaccgtcgaagaacaagtgtcgaccacagaacgagtttttcaagatagacagtaccaaatcgatgccgcaatcgtgcggatcatgaaaatgaggaaaacactcggccataacctgctggtctcagagctgtacaaccagctaaagttccccgtgaagcccggagatttaaagaagcggatagagagcttaattgatcgggactacatggagagagacaaggataatccaaaccaataccactacgtagcttag

SEQ ID NO: 219545 - DNA, 1980 bp, synthetic construct
  misc_feature 1..1980: note = Description of Artificial Sequence: Synthetic coding sequence
  source 1..1980: mol_type = other DNA
atgctgtataagcaattgcgtcaagcgtgtgaggaccatgtccaggctcaaattctgccctttagagaagattctctcgactccgtcctgttcctgaaaaagatcaacacttgctggcaggaccattgtaggcagatgatcatgatccgatcaatcttccttttcctggatcggacatacgtattgcagaatagcacattacctagcatctgggacatgggcttagagctctttagaactcatatcatcagcgacaagatggtccaaagtaaaacgatcgatgggattctgctactcatcgagagggaaagatccggagaggctgtggatcgcagcctgctgagatccctgcttggaatgcttagcgacctgcaagtctataaggattcctttgaactgaagttcctggaggaaaccaattgcctatacgctgcggagggacaacgtctaatgcaggagcgcgaggtgcccgagtatctcaaccacgtttccaaacgccttgaggaggagggcgaccgagtgatcacctatttggatcacagtacccagaagcccctgattgcatgcgtggaaaagcagcttttgggggaacacctgaccgccatcctccaaaaaggcctcgaccacctactggacgaaaatcgggtccctgacctggctcagatgtatcagctgttttcacgagtacgtggcggacagcaggcccttttgcagcattggagtgaatacatcaagacatttggaacggctattgtcattaaccctgagaaagacaaggatatggtgcaggatctactagattttaaggataaggtcgatcacgttattgaagtgtgtttccaaaaaaacgagcgttttgtgaatcttatgaaagaatcttttgagactttcattaataaacgccctaataagcccgcagagctgatagctaagcatgtagactctaagctccgagccggaaacaaagaagcgactgacgaagagctggaaagaacattggataagattatgatcttatttcggtttatccatggtaaagatgtgttcgaggccttttataagaaagacctggccaaacggctgctggtgggcaagagcgccagcgtcgatgctgagaagagtatgctgtctaaactgaaacatgaatgtggcgcagcattcacatcaaagcttgagggcatgtttaaagacatggagctctcgaaagatatcatggtgcactttaagcagcatatgcaaaaccaatcggacagcggccctatagatctgacggtgaatatcctcactatgggttattggcctacatacactccaatggaggtgcatctgactcctgagatgattaaactgcaagaggtgtttaaagctttttatctggggaaacacagtggccgtaaacttcagtggcaaaccaccttgggacacgcagtccttaaggccgagtttaaagaagggaagaaagagtttcaagttagcctgtttcagaccctggtgctcttgatgttcaacgaaggggatggattcagcttcgaggaaattaagatggccacaggaatcgaggacagtgaactaaggagaaccttacaaagcctcgcatgtggcaaggcacgcgtcttgatcaaaagtcccaagggtaaagaagtggaggacggagacaaatttatcttcaatggggaatttaaacacaaactctttcgaattaaaattaatcaaatacaaatgaaggaaacggtggaggagcaggttagcactaccgagcgggtcttccaagatcggcagtatcaaattgatgccgctatcgtacggattatgaaaatgcgaaagaccctgggacataatcttcttgtgtcggaactgtacaaccagttgaaatttcctgtgaagccaggagatctgaagaaacgcatcgaaagtctaatcgaccgagattacatggagcgtgacaaggataaccccaaccagtaccactacgtcgcttag

SEQ ID NO: 219546 - DNA, 2703 bp, synthetic construct
  misc_feature 1..2703: note = Description of Artificial Sequence: Synthetic coding sequence
  source 1..2703: mol_type = other DNA
atgaaatctgtatgccccgttacttcgggcttctcgtctccaagcccaagcgcagcagccgctgctcaagaagttcgtagcgccactgacggcaatacaagcaccacaccgcctacttctgcaaagaagagaaagctgaattcttcctccagcagttcaagtaatagcagcaatgaacgggaagactttgattccactagtagctcaagctctactccacctctgcaacctagagacagcgcgtccccaagtacaagctcattctgcttaggtgtgagtgtcgccgcttcttcccacgttcccattcaaaaaaaactcagattcgaggacactcttgagtttgtgggctttgatgctaaaatggccgaagagtccagttcttcgtcaagcagttccagcccaactgctgcaacttcccaacagcagcagctaaagaataaaagtatcctcataagtagcgttgcatctgtccatcacgcaaatggcctggctaagtcctcaactacagtgagctcgttcgctaattcaaagcctggctctgcgaagaagctggtgatcaagaacttcaaagataagcctaaactacctgagaattatacagatgaaacttggcaaaagctgaaggaagccgttgaggcgattcaaaattctaccagcattaagtacaacttggaggaactttaccaggctgtcgagaatctgtgtagctacaagattagcgccaacttgtataaacagcttcgacaaatatgtgaggaccacattaaggcacagattcaccagtttagggaggacagcctcgatagcgtgctgtttctcaaaaaaattgacaggtgttggcagaaccactgcagacagatgatcatgatcaggtcaattttcttgttccttgataggacatacgtgctgcagaactctatgctccccagcatttgggatatgggcttagagttgttccgtgcacatatcatatccgatcagaaagtccagaacaagaccatcgacggaatactgctgttaattgagcgcgaaaggaacggcgaggccattgatcggtcactgctacgctcgctactcagtatgctgtcggacttgcagatctaccaggatagctttgagcagcgctttttggaagagacaaaccgattgtacgccgctgagggccagaaattgatgcaagagcgggaggtgcctgagtacttgcaccacgttaataagcggcttgaagaggaggcagaccgcctaataacctatctagaccagactacccagaaatctctaatagcaaccgtggagaagcagttactgggcgaacacctgacagctatacttcagaaaggcctgaataacctcctggacgaaaatcgcatccaggacctgtctctgctataccagctgttctctcgggtgagggggggagtccaggtgctgttacagcagtggatcgagtatatcaaggccttcggctctacaatcgtaattaatccagaaaaagacaagactatggttcaggaactccttgattttaaagacaaggttgaccacataatcgacatttgtttcttaaagaatgaaaagtttatcaacgctatgaaagaggcattcgaaaccttcattaacaaaagacctaataagcctgccgaactgatagcgaaatacgtcgacagtaagctgagggcaggcaataaagaagcgacagatgaagaactggaaaagatgctcgacaaaattatgatcatattccgtttcatttatggtaaagacgtgttcgaagctttctataagaaagatctggctaaacgcctgctagtgggtaagagtgcatctgttgacgccgaaaaaagcatgctgtcgaaactaaaacacgagtgcggagctgcgttcaccagcaaactggaaggtatgtttaaggatatggagctctccaaggatatcatgatacagtttaagcagtacatgcagaatcagaacgtgcctggaaacattgaattaaccgttaacatactcacaatgggatattggccaacatacgtccccatggaggtccatctgcctcctgaaatggtgaagctgcaggaaatcttcaagaccttttatcttggtaaacacagtggacgaaaactgcagtggcagtcaacgctaggccactgcgtgcttaaggcggaattcaaggagggcaaaaaggaactgcaggtgtcgttgtttcagaccctagtattgctgatgttcaacgagggggaagagttttccctagaagaaatcaagcaagccacagggatcgaagatggtgagctgaggaggactcttcagtctctggcttgcggtaaagcccgtgtgctggctaagaacccgaaagggaaagacattgaagatggcgacaaattcatatgtaatgatgatttcaagcataagctatttcgcatcaaaatcaatcagattcagatgaaagagactgtggaggaacaggctagcactaccgaaagggtcttccaggataggcagtatcagattgatgccgcaattgtccgcatcatgaaaatgaggaagaccctgagccataacctattagtgagcgaagtgtacaatcagttaaaattccctgtgaagcccgctgacctaaagaaaaggatagagagcctgatcgaccgagattacatggagagggataaggaaaatcccaatcagtataattacatcgcatag

SEQ ID NO: 219547 - DNA, 2688 bp, synthetic construct
  misc_feature 1..2688: note = Description of Artificial Sequence: Synthetic coding sequence
  source 1..2688: mol_type = other DNA
atgttccctactgggttctctagtccgagcccttctgcggcagccgcagcccaagaagtgaggtcggccacagacggaaatacttccaccacccctcccacatcagccaagaaaagaaagttgaattcttcttcatccagctcctccaatagttccaatgagagggaagactttgattctacatcctcctcttcctcaacacccccattgcagcctcgggattctgccagcccgagcacgagctctttttgccttggagtgagcgttgcagcttctagccatgttccgattcagaaaaagttgcgctttgaggatacccttgaattcgtggggttcgatgccaagatggccgaggaatcatcctcgtccagcagttcctcaagccccacggcagccacttcccagcaacaacagctgaaaaataaaagtattcttatcagcagtgtcgcttctgtacaccatgcaaacggactggctaaaagctcaactactgtttcttcatttgcaaattccaagcctgggtctgcaaagaaattggtgatcaaaaattttaaagacaagcctaaactccccgagaattacaccgacgagacatggcaaaagctgaaggaggccgtggaggcaattcagaacagcaccagtattaagtataaccttgaagaactctaccaggcggtcgaaaacttgtgtagctacaagatttccgctaatctttataagcagctgcgacagatctgtgaggaccacatcaaggcccaaattcaccaattcagggaagatagcctggactcagtactcttcctgaaaaaaatcgaccgctgttggcagaaccactgccggcaaatgatcatgatccgcagcatctttctttttttggaccggacatatgtgctacaaaacagtatgctgccgtccatctgggacatgggcctggaactgttccgcgctcatatcatctctgaccaaaaagtgcagaataagactatcgatggcatcttactgctcatcgaaagagaacggaatggtgaggcaatagatcgctcgcttcttaggtctctgctgagcatgttgtccgatcttcagatctaccaggactcgttcgaacagcgctttttggaggaaaccaaccggctgtatgccgctgaggggcagaagcttatgcaggagagggaggtccccgagtacttgcatcacgtgaacaagcggctggaggaagaggcggatcgattgattacatatctggaccagacaactcaaaaatccctaatcgcaactgtcgagaaacagctgctgggcgaacatttgacagctatcctacaaaaggggctgaataacctgttggacgagaaccgcatccaggaccttagcctcctgtatcagcttttctctcgagttcggggaggcgttcaagtgttgctccaacaatggattgagtacataaaagcattcggatcaaccatcgtgattaaccccgagaaggacaagacaatggtccaagaactgctggattttaaggataaagtggatcacattatagatatctgttttctgaagaacgagaagtttattaacgccatgaaagaagcctttgagacgttcataaataagcgtcccaataagcccgcagaattaatagctaaatacgtcgacagcaaactgagggccggtaacaaagaggcaactgacgaggagctcgaaaaaatgctggacaaaatcatgatcatcttcaggtttatctacggcaaagacgtgtttgaggctttttacaagaaagaccttgctaaaaggcttctggtgggaaagtcggcctcagtggatgcggagaagagtatgctgagcaagctcaagcacgagtgcggagctgcatttaccagcaaactggaaggcatgttcaaagatatggagctttcaaaggatattatgatacaattcaaacagtatatgcagaatcagaacgtccccggaaacattgagctgactgtcaatatcctcacaatggggtactggccaacttacgtccccatggaagtgcatcttccacctgagatggtcaaactgcaagagatctttaaaactttttacctcggaaagcactctggaagaaaactgcaatggcagtcaacccttggtcattgcgtgctgaaagcggagtttaaggagggcaaaaaggagttgcaggtttcgctgtttcagaccttggttctgctaatgtttaacgaaggcgaggaattctcactcgaggaaataaagcaggcaacgggcatcgaagatggtgaactgcggcgaacactgcagtctctggcctgtgggaaggctagagtactggcgaagaaccctaagggaaaggacattgaagatggagataagttcatttgcaacgacgattttaagcataaactgttccgaattaaaatcaatcagatccaaatgaaagagacagtggaggagcaggccagcacaaccgaaagggtcttccaggatcggcagtaccagattgatgcagcaatcgtccggattatgaaaatgaggaaaacgctgagtcataatctgctggtgtccgaagtgtacaaccaacttaagttcccagttaagcctgctgatcttaagaaaagaattgagagtctcattgatcgagactacatggagcgtgacaaggagaatccaaaccagtacaattacatcgcctag

SEQ ID NO: 219548 - DNA, 705 bp, synthetic construct
  misc_feature 1..705: note = Description of Artificial Sequence: Synthetic coding sequence
  source 1..705: mol_type = other DNA
atgatagacccagactttgctgacaaacctaaactccctgagaattacacggacgagacctggcagaagctcaaggaggccgtagaagctatccagaattctacatccatcaaatataaccttgaggagttataccaggcagtggagaacctgtgttcttataagatctccgccaacttatataagcagctgcgccagatatgcgaagatcatattaaggcccaaatccatcagttccgggaggacagtctcgacagcgtcttgttcctcaaaaagatcgatcgatgttggcagaaccattgcaggcagatgataatgatccgctccatctttctcttccttgaccgcacctatgtactacagaattcaatgttgcccagcatctgggatatgggacttgagcttttcagggctcacatcattagtgatcagaaggtgcaaaataagaccatcgacggcattctgctactgatcgaacgcgagaggaatggggaggcaatagacagatctctactgcgttcgctgctgtcgatgttgtccgatcttcaaatataccaggactcttttgagcagcgtttcctggaagagacaaatcgcctatacgcagccgaagggcagaaattgatgcaggagcgcgaggtgccagaatatctccaccacgttaacaagcgtctcgaagaagaggctgaccgtcttataacctag

SEQ ID NO: 219549 - DNA, 2742 bp, synthetic construct
  misc_feature 1..2742: note = Description of Artificial Sequence: Synthetic coding sequence
  source 1..2742: mol_type = other DNA
atgatgagccaatcctccggctcaggtgacggaaatgatgatgaggcaacgactagcaaagatggtggcttttcctccccttctccctcggctgccgcagcggctcaggaggtgcggtctgccactgacgggaacacctctacaactccgcctacttccgccaagaaaaggaaactcaattcttcctcatcaagttcctccaatagcagcaatgagagagaggactttgattctacatctagcagtagcagtacccccccacttcagccaagggatagcgccagtccctccacctcctccttttgcttgggagtcagcgtcgccgcttcctcgcatgtgccaatccagaagaaacttcggttcgaagatactctcgaattcgtggggtttgacgctaaaatggccgaggagagtagttcatctagttcttcctcttcacctaccgccgcaacgtcccagcagcagcagttgaaaaataagtcaatactgatttcctccgtcgcctccgttcaccatgcaaacggtctcgccaagtcgtcgacgaccgtgagcagttttgcaaactcaaagcctgggagcgcaaagaaattggttatcaagaacttcaaggataagccaaaactgccagagaattatacagatgaaacatggcagaaattaaaagaggcggtagaggctatccaaaatagcacttctatcaagtataacctagaggaactttaccaggctgttgagaatttatgttcctacaagatctccgccaatttgtataagcagctgcgtcagatctgcgaggaccacattaaagcacagatccatcagtttagagaggatagcttggatagcgttctgtttctcaagaaaatcgaccgatgttggcaaaatcactgtcgacagatgatcatgatccggtcaatttttctcttcctggacaggacttacgtgctgcagaattctatgctgccttcaatctgggacatgggactggaactttttagagcgcacattatatctgaccagaaggttcaaaacaagacaatagatggtattctgttgctcatcgagagagagcggaatggagaggccattgataggagtctactgcggtcgcttctctctatgctatcagacctgcagatttaccaggattcatttgagcagcggtttctagaggaaaccaacagactatatgccgcagaagggcagaagcttatgcaggagcgggaagtacctgagtatttgcaccacgtgaataagcggttagaggaagaagccgacaggttaattacgtatctcgatcaaaccacccagaaatctttgatcgccaccgtggagaaacaactcttgggagagcacctcacagctatcttacagaaagggctcaacaatcttttggacgagaaccgcatccaggacctcagcctcttgtaccaactcttttctcgtgtccgaggcggagttcaggttctgttgcagcagtggatcgaatacatcaaagcctttggtagcacgattgtcatcaacccagagaaggataagaccatggttcaggaacttctggatttcaaggataaagtcgatcacattattgacatatgtttccttaaaaacgagaaatttattaatgccatgaaagaggcgtttgaaacatttatcaataagcgtccgaacaagcctgccgaactgattgctaagtacgtggacagtaagctccgcgctggaaacaaggaagctactgacgaggaactcgaaaagatgctggacaagattatgataattttccggttcatttatggcaaggacgtgtttgaagctttctacaaaaaagaccttgcaaaaaggctgctggtgggaaagtcagcttctgtcgacgccgaaaagagtatgctgtccaaattgaagcacgaatgtggagccgcattcacctcaaagctagaagggatgtttaaagatatggaactctccaaggacattatgattcagtttaaacagtacatgcaaaatcagaacgtgcccggtaatatcgagttaacagttaacatcctgactatgggttactggcctacatacgtgcctatggaggtacacttgcccccagagatggttaagcttcaggaaatcttcaaaaccttttaccttgggaagcactccggacgtaagctgcaatggcagtctactctgggccattgtgtgctcaaggctgagtttaaggaaggtaaaaaagaactgcaggtgagtctgtttcagaccttggtgctgctgatgttcaatgagggggaggaattcagcctagaggaaatcaaacaggcaaccgggatcgaagacggcgagctcagacgcacactgcaatctctggcttgtgggaaggctcgggttctggctaagaatccgaagggcaaggacattgaggacggagataaattcatttgcaatgacgacttcaagcacaagcttttccgaatcaagatcaaccagatccagatgaaagagactgttgaggagcaggctagcaccaccgagcgcgtgtttcaggaccgacagtatcagatagacgctgccatagtgaggattatgaagatgcgcaagaccctctctcataatttacttgttagcgaggtgtacaatcagctcaagttcccggtcaagcctgctgaccttaagaagcgaatcgagtctttgattgacagagactacatggagcgagataaagaaaatcccaatcagtacaattacatcgcgtag

SEQ ID NO: 219550 - DNA, 2343 bp, synthetic construct
  misc_feature 1..2343: note = Description of Artificial Sequence: Synthetic coding sequence
  source 1..2343: mol_type = other DNA
atggccacctctaatctcctaaagaacaaaggctccttgcagtttgaggataaatgggattttatgcgaccgatcgtccttaagcttctcaggcaggagtcagtgactaagcaacagtggttcgacctctttagtgatgtgcacgctgtgtgcctttgggatgataaaggccctgctaagatccaccaagctctaaaggaggacatcctcgagttcatcaagcaagcgcaggcgagggtcctcagccatcaggacgatactgccctgctcaaggcttatatagtagagtggcgcaaattttttacccaatgtgatattctgcctaagccattttgtcagttggagatcacactcatgggaaagcagggttctaacaagaaatcaaacgtcgaagactcaattgtaaggaagctgatgctggatacatggaacgagagcatcttcagcaacattaaaaatcgactacaggattctgccatgaaactcgtgcacgccgagaggttaggagaggctttcgatagccaactggtaatcggcgtgcgggaaagctatgtcaacctctgttcaaaccccgaggacaagctacagatttaccgcgataacttcgaaaaggcgtaccttgacagcaccgaaagattctaccggacacaagccccaagttatctccagcagaatggggttcaaaactacatgaagtacgctgacgctaagctgaaagaagaagaaaaaagagccctgcgctacctcgaaacacggagggagtgtaatagcgtggaagctctcatggaatgctgtgttaatgccttagtcacctccttcaaagagaccatcctcgccgaatgtcagggtatgattaagaggaatgagactgaaaaattacacctgatgttttcattgatggataaggtccccaatggcatcgagcctatgctcaaggacctggaagagcacattattagcgcgggtctggcggacatggtcgccgcagcagaaaccatcaccaccgactctgagaaatacgtagaacaactcttaaccctattcaaccggttcagcaaactcgtgaaggaggctttccaggatgatcctagatttttaaccgctagagataaggcctacaaagccgtggtcaacgacgctacaatctttaaactggagctccctctaaagcagaaaggcgtcggtctgaagacgcagccagaaagcaagtgccctgaactgctcgcaaattactgtgatatgctgcttagaaaaacccccctgagcaagaagctaaccagtgaggagatcgaagccaaactgaaggaagtcctcctagtcctcaagtacgttcaaaacaaggatgtcttcatgaggtatcataaggcacacctgactcggcgacttatcctggatatcagtgctgacagcgagattgaagagaacatggtcgagtggttgcgcgaagtgggaatgccagcagattatgtcaataaactggccaggatgttccaggacatcaaggtttccgaagacctgaatcaggcctttaaagagatgcacaagaataacaagctggcattgcctgctgacagcgtgaacattaaaatactgaacgccggagcttggtcccggagcagcgagaaagtgtttgtctccctaccgacggagctcgaggatttgatacccgaggtcgaggaattctacaagaaaaaccacagcggcagaaagctgcactggcaccatttaatgtcaaatgggattattactttcaaaaatgaggttggacagtacgatctggaagtcacaactttccagttggcagtgctattcgcctggaatcagagacccagagagaagattagcttcgaaaacttgaaactggccaccgagctgccagacgcagagctgcggaggaccctctggtctttggtcgcttttccaaaactgaagcggcaggttctactctatgagccccaggtgaactctcccaaagactttacagaggggacacttttttcggtgaaccaggagttcagcctgatcaagaacgctaaggtccaaaaacggggaaaaatcaatctgattggtaggctgcagctcaccacggagcggatgagagaggaagagaacgaagggatagtccagcttcggatcctgagaacacaggaagctatcatccagattatgaaaatgcggaagaagatctctaatgctcagctccaaaccgagcttgttgagattctcaagaacatgtttcttccacagaaaaagatgatcaaagaacagatagaatggctgatcgagcacaagtacattcgacgagacgagagtgacatcaacacattcatctacatggcttag

SEQ ID NO: 219551 - DNA, 2343 bp, synthetic construct
  misc_feature 1..2343: note = Description of Artificial Sequence: Synthetic coding sequence
  source 1..2343: mol_type = other DNA
atggcaacttcgaatcttcttaaaaataaaggctccctgcagtttgaagacaaatgggatttcatgcgaccaatcgttctgaagcttctgaggcaagaaagtgtgactaaacagcagtggtttgacctgttcagtgacgtgcacgctgtctgcctttgggacgataagggccctgccaaaattcatcaggcccttaaggaagacatcctggagttcataaagcaggctcaggcaagggttctgagccatcaggacgacaccgccctccttaaggcttacatcgtggagtggagaaagttcttcacccaatgtgacattttgcctaagccgttctgccaactggagattacactcatgggaaaacaaggtagcaataagaagtctaatgtggaggattccattgtccggaaactcatgctggatacttggaacgaaagtattttcagcaacatcaaaaacaggttgcaggatagcgctatgaaactagttcacgctgagcgtctcggcgaggcattcgactcccaactggttatcggggtgcgcgaatcatatgtaaacctgtgcagtaatcctgaggataaattacagatctaccgagataactttgagaaagcatacctggatagtactgaaaggttctataggactcaggccccaagttatctgcagcagaatggcgtccagaattacatgaaatatgccgacgccaagttgaaagaagaagagaagcgcgcattgcggtacttagaaactaggcgcgaatgtaattctgtagaggcattgatggagtgctgcgttaatgccttggtcacttcctttaaagagacgatcctggccgagtgtcagggcatgattaagcgcaatgaaacagagaaacttcacttgatgttttcattgatggataaagttccaaacggcatcgaacctatgcttaaggacctcgaagagcacatcatctcagcgggactggcggacatggtggcagccgcagaaacaatcactactgactctgaaaagtatgtcgagcagctgctcactctctttaaccggtttagtaagctcgtgaaggaggccttccaggatgaccctcggttcctaacagcaagggataaggcctataaagccgtggtaaatgacgccactatattcaagttagaactgcctctgaaacagaaaggtgtgggccttaaaacccaacctgagtcgaagtgccctgagctgcttgccaattactgcgacatgctcctccgaaagacccccctgtcaaagaaactgacatcggaggagatagaggccaagctgaaagaggtgctgctcgtgcttaaatacgtgcagaacaaagacgtatttatgcggtaccacaaagcccatctcaccaggaggctgatactggacatctccgcggactccgaaatcgaggaaaacatggtggagtggctccgagaggtgggaatgcctgcggactacgtcaataaactcgcccgaatgttccaagacataaaagtgtcagaagatctcaatcaggcatttaaggagatgcacaaaaacaacaaactggccctaccagctgattccgtcaatatcaagatactaaacgcgggagcctggtcgcggtcctccgaaaaggtatttgtatcccttccgactgagctcgaagatctaattcctgaggttgaagaattctacaaaaagaaccactccgggagaaagctgcattggcatcatctgatgtcgaatggaatcatcaccttcaaaaatgaggttgggcagtatgatctggaagtaacgacatttcaactggccgtactgttcgcgtggaaccagaggccaagagaaaaaatatcatttgaaaatttgaagcttgccacagaactacccgacgcggagctacgcagaactctatggagcctcgttgccttcccaaaactgaaacggcaagtcctgctgtatgagccccaggtgaattccccaaaggatttcaccgaaggaacactgttctctgttaatcaggagttcagcctgattaagaatgcgaaggtgcagaagagggggaagattaacctcatcggccgactccaactgacaacagaaaggatgagagaggaggaaaacgaaggcatcgttcaacttcgcattctgcggacacaggaggctattatccagatcatgaagatgcggaagaaaatttccaatgcgcagctccagacagaattggtcgaaattctgaaaaacatgtttctgccccaaaaaaaaatgataaaggaacagatcgagtggttgatcgagcataagtacataaggagggatgaatcggacatcaataccttcatatatatggcatag

SEQ ID NO: 219552 - DNA, 5097 bp, synthetic construct
  misc_feature 1..5097: note = Description of Artificial Sequence: Synthetic coding sequence
  source 1..5097: mol_type = other DNA
atggtaggggaattacgctaccgggagttcagagtgcctttaggacctgggctccacgcgtatccagacgagttgatccgccagcgagtaggtcacgatggacacccggagtatcagatccgttggctcatcctgcggcgtggcgacgagggtgatggtggcagcggacaagtcgactgtaaggccgaacacatcctgctgtggatgagtaaggacgagatttacgcaaattgtcataaaatgttaggcgaagacgggcaagttatcggcccttctcaagaatcagccggtgaagtcggtgccctcgataaatctgttttggaagagatggagaccgacgtgaaaagcctgattcagagggcgctcaggcagttagaggaatgcgttgggactatcccccctgccccactgttgcacaccgtccacgtgctgagtgcctacgctagcatcgagccactcactggagttttcaaggatccaagggtactggatcttctcatgcatatgctgtctagccctgactaccagatccggtggagcgcaggtaggatgatacaggccctgagctcacatgacgccggtacccgtacccaaatcctcctatcgctcagtcagcaggaggctattgagaagcatttagactttgatagccgctgcgcactgctcgccctctttgcacaggcaaccctgagtgagcatcccatgtcctttgaggggatacagctgccacaggtcccaggtcgcgtgctgttctccctcgttaagcgctacttacacgtcacctcccttctagatcagctgaatgatagcgccgctgaacctggggcacagaatacaagcgctccggaggaactgtcaggagagcgcggacagttagaacttgaattttccatggcgatgggcaccctgatttcagaactcgtgcaagccatgcggtgggaccaggcgtcagaccgccctagaagttctgcaagaagtcctggatccattttccagccacaactggccgatgtctctccgggtttgcccgcagcgcaggcacagccctcctttcggaggagcaggcggtttaggcccagatccgagttcgcaagcggtaatacctacgcgttgtacgtacgtgatactttgcagcctggaatgcgcgtgcggatgctcgacgactatgaggagatatctgctggcgatgagggcgagttcaggcagagtaacaatggggtgccacccgttcaggtcttctgggagtctactggtagaacctactgggtccattggcacatgcttgagattctgggcttcgaggaggacatcgaggatatggtcgaggccgacgagtaccagggcgcagtggccagccgcgtgctgggcagggccttgccagcatggcgctggcggccaatgacagaactctacgccgtcccatatgtactgccggaagatgaagatacagaggaatgtgagcacctgactcttgccgagtggtgggagctgctgtttttcataaagaagctagatggtcccgatcaccaggaagtgctgcagatcctgcaagaaaacctcgatggcgagattcttgacgacgaaatccttgctgagctggcggtccccatagagctggcccaagatctccttctgactctgcctcaaagacttaatgactccgctttacgagatctgataaactgtcacgtctacaaaaaatatggacccgaagcactggcgggaaatcaggcatacccgtctctgcttgaagctcaggaagacgtgttgctgttggatgctcaggctcaggcaaaggatagcgaggacgcggcaaaggtggaggccaaggagccccctagccagtccccaaacacccccctgcagcgcttggtagagggttacggacccgcagggaaaatccttctcgatctagaacaagctctttcttcagaaggtacccaggaaaataaggttaaaccattgctgcttcagctgcaacggcagccccaaccgtttttggcattgatgcagtctctggacactccagaaacaaatcggacactgcatctgacagttctccggattctgaaacagctggtggacttccctgaggccttactcttgccctggcatgaagcagtcgacgcatgcatggcttgtctgaggtctccaaataccgaccgggaggtgttgcaggaactgatttttttccttcatcgcctaacatccgtgtcccgcgattacgccgtagtccttaaccagctgggcgctagggacgccatcagcaaagcactagagaaacacctggggaagctagaactcgcccaagagctgcgcgacatggtgttcaaatgtgaaaagcatgcacacttgtaccgtaagctgattaccaatatcctcggcggatgcattcagatggtccttgggcaaatagaagatcacagacggacacaccagcccattaatattccgtttttcgatgtgttccttaggtacctgtgccaaggttcttccgtcgaagttaaggaagataagtgttgggagaaagtcgaggtctcctctaacccacatcgagccagcaagctgactgaccacaatcccaaaacctactgggaatcaaacgggtcagccggttcacattacattacactgcatatgcggagagggatcctgatcagacaactgactctcctcgtggctagtgaggattccagctacatgcctgcacgggttgtcgtctgcggcggagacagcacttcttctcttcacacggagcttaactcagtcaacgtaatgccgagcgctagcagagtgatcctgctggaaaatctcacccgcttttggcccataattcagatcagaatcaagagatgccagcagggtgggatagacacccggatccgcggactcgagatcctcgggcctaaacccactttctggccagtgtttcgggaacagctgtgtaggcacactcgtttgttctatatggtccgcgctcaagcttggagccaggacatggccgaagatcggcgatcactcctacacttatcatcacgtttgaacggagctcttcggcaggaacaaaatttcgctgacagattcttgcccgacgatgaggccgctcaggcattgggcaaaacctgttgggaggccctagtgagccccgtggtacagaatataacatctccagatgaggatggtatatcgcccctcggctggctcctggaccagtatctggagtgtcaagaagcagtgttcaatcctcagagccgcggaccagcctttttttctcgtgtgcgcaggctcactcacttgttagtccatgtagaaccatgtgaagctccgccaccagtggtggccacgccacggccaaagggtcgaaaccggagccacgactggtcctctttggctactaggggactgccttcatctataatgcgtaacctcactaggtgctggagagctgttgttgagaaacaggtgaacaacttcctcacttcgtcctggcgggacgatgacttcgtccccagatactgtgagcactttaatatcctgcagaactcctcaagtgagctgttcggccctcgcgcagcttttcttttggcactgcagaacggatgcgcgggagccctgctgaagttacctttcctgaaagccgctcacgtctctgaacaatttgccagacacattgaccagcaaatccaaggcagccgaatcggcggagcccaggagatggagcggctcgctcagctgcagcaatgccttcaagctgtgctcatcttttcgggactggagatcgccaccacattcgagcactattaccaacactatatggccgaccggcttcttggggtggtaagcagctggctggagggcgcagtgctcgaacagataggaccatgttttcccaataggttgccccagcagatgctgcagtcactcagcacatcaaaagaacttcaaaggcaatttcacgtgtaccagcttcagcaactggatcaagagctccttaagctggaagacactgaaaaaaagatccaggtcggacttggcgcaagtggcaaggaacataaatccgaaaaagaagaggaggccggagccgcagctgtggtggacgtggccgaaggcgaggaagaagaggaggagaacgaggacttgtactacgagggcgcaatgcccgaggtgagtgttcttgtcctgagtcggcactcatggcccgtggcaagcatctgccatacattaaacccacgcacatgcctccccagctacttgaggggcaccctgaatcgttacagtaacttctacaataaatcccagtctcacccagctcttgagcggggaagccagagacgcctccagtggacatggctggggtgggctgagctgcaattcggcaaccagactcttcatgtgtccaccgtgcagatgtggctgctgctgtacctcaacgacttgaaagccgtttcggtcgagtccctgttggcgttctctggactgagcgcggacatgctgaatcaggccattggccctctgactagctcacgaggccctcttgacctccatgaacagaaagacatacctggaggagttttgaaaattcgggatggttcaaaggaaccacggagtcgctgggatattgtgcgactaattccaccacagacgtatttacaagctgagggtgaagacgggcagaatttggaaaagcgcaggaatctcttaaattgcctgatcgtaagaattcttaaggcacatggcgacgagggtttgcacatcgaccagttagtgtgtttagttttggaggcgtggcagaagggtccgtgtccgcctagaggcctggtgagctccttggggaaaggatcagcctgcagttctacagacgttctctcctgcatccttcacctgttaggtaagggtactctgcgcaggcacgacgacaggccccaggtgctgagctatgctgtgccagtgaccgtcatggagccgcatacagaaagcttgaatccaggatcctcaggccctaacccaccactgacgtttcacaccctgcagatccggagccgaggcgtgccttatgcatcatgcaccgccacacagtctttcagcactttccggtag

SEQ ID NO: 219553 - DNA, 5348 bp, synthetic construct
  misc_feature 1..5348: note = Description of Artificial Sequence: Synthetic coding sequence
  source 1..5348: mol_type = other DNA
atgtccagagggttctggttggccgaaccccttgcaggcacagggcctcatccagcacctgttgccgcagattcccgtgggtgctcctcagttccgcgtaggcacgccccatccagattgagcgtcagcacgccctctcggggtccgggtgccaggatggtgggggaattgagatatcgcgaatttcgggtgccactggggcctggcctgcatgcctaccctgatgagctgatccgacagcgggtgggacacgatggccatcccgagtatcagattcgctggttgattctgaggaggggggacgaaggagacgggggatctggtcaggtggactgcaaggctgagcatatcctgctgtggatgtccaaagatgaaatatacgcgaattgtcacaagatgttaggagaggacggacaagtgataggacccagccaagagagcgcaggcgaagtgggggctcttgataagtcagtgctggaagagatggagacagatgttaagagtctgatccagagggcgctgcgccaactcgaggagtgcgtcggcaccattccccctgcaccactcctgcacacggtgcacgtgctgtctgcctacgccagcatagaaccactgacaggggtctttaaggatcctagggttctggacctgttgatgcacatgctgtcatccccagactaccagattagatggtcagccggacgaatgatccaggccttatcatcgcatgacgccggtgaggggcagtgtggtgaagaaggcaaagctggggaaggacttggcaggctgagagattcgcaggacacagtggctggggcaagcgacctaatcaggaccaggacccaaatcctcctctccctgtcccagcaggaagcgatagaaaagcaccttgacttcgacagcaggtgcgccttgcttgctctgttcgcccaggccacccttagcgaacatcccatgtcatttgagggaatccagcttccacaggtgcctggcagggtcttgttttccttagtgaagagatacctgcatgtcaccagcctactggatcagttaaatgattctgcagccgagcccggagcccagaatacaagcgccccagaagagctcagtggcgagcgtggacagctcgaacttgagttctccatggccatggggacactcatttcggaactcgtgcaggccatgcgttgggaccaagcttccgacagacccagatcttcagctagaagccctggctctattttccagccccagctggctgatgtgtcacctggcctgcccgctgcccaggcacagccgtccttcagaagaagtagaaggttccggcctaggtccgagtttgcgagtggtaacacttacgccctttatgtgcgcgacacactgcagcccggaatgagagtccgcatgctggatgactacgaggagatcagcgccggtgacgagggcgagttccgccaatctaacaatggagttcccccagtgcaggtgttttgggagtctaccgggcgaacttattgggtccactggcatatgctggagatcctgggattcgaggaagatatagaagatatggtggaggccgacgagtaccagggcgcagtggcttcaagagttctggggcgtgcccttccagcatggcgttggaggcccatgacggaactgtatgctgtgccgtatgttctgccagaggacgaggacaccgaggagtgtgagcatctaacactggcggaatggtgggaacttctgtttttcatcaaaaagttagacgggcctgaccaccaggaagtcctccagatcctccaagagaaccttgacggggagattcttgatgacgaaatactagctgaactggccgtgcccatcgaactggcccaagacctgttgctaaccttgccccagcgcttgaatgacagcgcattgcgcgatcttataaactgccacgtgtacaagaaatatggtccagaggctctggccggaaaccaggcttatcctagcctgcttgaggcacaggaagacgttctcctgctcgacgctcaagcacaggccaaggattctgaggatgcagcaaaggtggaggccaaggaacccccaagccagagccctaacacacctctgcagaggctggtggaaggatacggaccggcagggaagatactgctcgaccttgagcaagctctctctagcgaaggaactcaggagaataaagtgaaacccctgttgctgcagcttcagcgccagccacagccgttcttggcgctcatgcagagcctagatacccctgagaccaatcgaaccctgcacctgacagtactccgcatattgaaacagttggttgattttcctgaggcactcttgctgccatggcatgaggcggttgacgcttgtatggcctgcctgcggtcccccaacacagaccgagaagtgctacaagagctgatcttcttcctgcatagactgacgagcgtttcacgagattatgctgtcgtgctcaatcagttgggcgcaagggatgctatttcgaaagccctggagaagcacctcggaaaactggagctcgcgcaggagcttcgggacatggtgttcaaatgcgagaagcatgcacatttataccgcaagctcattactaacatattaggaggttgcatacagatggtcctcggtcagatcgaggaccaccgccgaacccaccagccaataaacatacccttctttgacgtttttctgcggtatttgtgccagggttctagtgtcgaggtgaaagaagacaaatgttgggaaaaggtggaggtgtcttcaaatcctcacagagcaagtaagttgaccgatcacaatcccaaaacatattgggaatcaaatggttccgccggatcccattatattaccttgcatatgcgccgtggaatcctcattcggcagcttaccctgctggtggcgtccgaagactcatcttacatgcctgcacgggtcgtggtgtgtgggggtgactcaacctcctccttacatacagagctcaactctgtgaatgtaatgccatcggcttcacgggtaatcctgttggaaaacctcacccgtttctggccaatcatccagattaggatcaagcggtgtcagcagggcggaatcgatacccggattcggggactggaaattctgggcccaaagcctacattttggccggtttttcgcgaacagttgtgccggcatactaggctcttttacatggtgcgggctcaggcttggtcacaagacatggccgaagacaggcggagtctcttacatctcagctctcggctgaatggggcactcaggcaggaacagaatttcgcagaccgctttttaccggacgatgaggcagcccaggccctgggtaaaacctgctgggaggccctggttagcccagtcgttcagaacattacgagcccagacgaggacggcatatctccgcttggatggttgttggaccaatacttggagtgccaggaggctgtatttaacccacagtcgcgcggacccgcatttttttctcgggtaagacggctcactcatctgctcgtacacgtggaaccatgcgaggcccctcctccagttgtggctacaccgagacctaaaggaagaaatagatctcacgattggtcttctctggcaacgagaggactgccttcttcaatcatgcgaaatctaaccagatgttggcgagctgtagtggagaagcaggtgaacaacttcctgacctcctcatggcgcgatgatgactttgtcccgaggtattgcgaacatttcaacattctgcaaaacagtagctcagagctctttggcccaagggcggcatttctacttgccctccagaatgggtgtgccggagctcttcttaagctcccttttttgaaagctgcacacgtgagtgaacaatttgcacgacatattgaccagcagatacagggatctaggatcgggggagcccaagaaatggagcggttagcccagttacagcagtgcctgcaggctgttttaatattcagcggccttgagatagctactacctttgagcattattatcagcactacatggcggaccgcctactgggggtggtcagcagctggcttgaaggtgctgtgctagaacagattggcccatgtttccccaatcgtctgccccagcagatgctccagtctctttccacttccaaagagcttcagcgccagttccacgtgtatcagctacagcaactggatcaggaactgcttaaactggaagacactgagaagaagatccaagtgggtctgggagcatccggcaaggagcacaaatccgagaaggaggaggaggccggagcagctgctgtcgtggatgtggcagagggcgaagaagaggaagaagaaaatgaggatctctactatgaaggggcaatgccagaggtgagcgtgctcgtgctatccagacattcttggccagtcgcgtctatctgccatactctgaacccacggacgtgcctgccgagctatcttagaggaacgctcaatcgttattcgaacttctacaacaagtcacagtctcatccagccttggaacggggatcacaaaggaggctgcagtggacttggctgggatgggctgaactacaatttggaaatcagacactccatgtttcgacagtccaaatgtggctcctgctctatttaaatgatctaaaggcagtatcagtagaatctctgctggccttcagtggactcagcgcagatatgttgaaccaggcaatcggtccattaacgtcttctcgtggtccactggatctgcatgagcagaaggacattccaggcggagttctgaaaattcgtgacgggtccaaggagcctcggtctaggtgggacatagtacgtctcatccctccccagacatatctgcaggctgaaggggaggacggtcagaacttggagaagcgccgtaatttgcttaattgcctcattgtccgtatattaaaagcccatggagatgagggactgcacatcgatcagttggtgtgcctggttctggaggcatggcagaaagggccttgtccacctcgaggccttgtttcatctttggggaaagggtcagcttgttctagtacagatgtgttgtcttgcattctgcacctgctgggcaagggaacgctacggcgacatgatgatagaccccaagtactctcctatgctgtccccgtgacagtgatggaaccacacacggagagccttaatcccggaagttccggaccaaatccacctcttactttccatactctgcagattcgctcccgtggcgtcccgtacgcctcctgtacagcaactcaaagcttcagcactttcagata

SEQ ID NO: 219554 - DNA, 435 bp, synthetic construct
  misc_feature 1..435: note = Description of Artificial Sequence: Synthetic coding sequence
  source 1..435: mol_type = other DNA
atgggagttctgcaggtagtgaaacagagtgtccaaatcccagtattcgtaatgattagacccaggggcggagactttttgtacagcgatcgtgaaatcgaggtaatgaaagcagacatcagactggcaaaactatatggagccgacggcctcgtgtttggagcgctgacggaagacggacatatagacaaagaactctgtatgtcactaatggcgatctgtcgtcccctgcctgttacattccatagagcctttgatatggtgcatgacccaatggcggctttggagaccctgctgacacttggtttcgaacgcgtgttgaccagcggctgcgattcttccgccctggaggggcttcccctgatcaaacgactgattgagcaggccaagggtcgcattgttgtcatgcccggaggtggtattaccgatcgatag

SEQ ID NO: 219555 - DNA, 822 bp, synthetic construct
  misc_feature 1..822: note = Description of Artificial Sequence: Synthetic coding sequence
  source 1..822: mol_type = other DNA
atgaaacggcagggagctagctccgagcgaaaacgcgctcgaatcccttcagggaaggccggagccgcaaacggctttctcatggaggtctgtgtcgattcggtggagtctgcagtgaacgccgagcgtggtggggcagatcggattgaactgtgctcagggctttccgagggcggaacaacacctagcatgggcgttctgcaggtcgtgaaacagtctgtacagattccagtgttcgtgatgattcggcctcggggaggagacttcctgtatagcgatagggaaatcgaggtaatgaaggctgacatcagactggccaaactttatggggctgatgggttggtgttcggtgcacttacagaggacgggcatatcgataaggagttatgcatgagcttgatggctatctgtcggccactgccagtaaccttccacagagcctttgacatggtgcacgatccaatggctgcactagagacgctgctgaccctgggtttcgagagggtactgacttctggttgcgactcatccgctctggaggggctcccactcatcaaacggttgattgagcaagccaaaggcaggatcgtggtgatgcctggcggaggaattaccgaccgcaacctccagagaatcctggagggatccggcgcaaccgagtttcactgttccgcgagaagcacccgcgactctggcatgaagtttcggaatagtagcgtagccatgggcgcttcactcagctgctctgagtatagcttgaaggtgacggacgtgacaaaggtgcgtacgctgaacgccattgccaagaacattctggtatag

SEQ ID NO: 219556 - DNA, 1122 bp, synthetic construct
  misc_feature 1..1122: note = Description of Artificial Sequence: Synthetic coding sequence
  source 1..1122: mol_type = other DNA
atgtcattactcctcctcctgttacttgtttcctactatgtaggaactctcggaactcacaccgaaatcaaacgagtggccgaggaaaaagtgacattgccttgtcaccaccagcttgggctgccggaaaaagatacgctggacatcgagtggctgctcacagataacgaggggaatcaaaaagtcgtcattacctactcaagcaggcatgtctataacaatcttaccgaggaacagaaaggaagagtggcattcgccagcaactttcttgcgggtgatgcttcgctgcagatcgaaccgctaaagccgagcgacgaaggaagatacacctgcaaggtcaagaacagtggacgctacgtgtggtcacacgtcatcttaaaggtgcttgtcagacctagcaagcccaagtgtgaactggagggagagttaaccgagggtagcgatttgactttacagtgtgaatcttccagcggtactgaaccaattgtctactattggcagcggatcagagagaaagagggggaggatgagagactgcccccaaaatctagaatcgattacaaccatcctggcagggtcctgcttcagaatctgactatgagctactctggcctgtaccagtgtacggctggtaatgaagcaggtaaggaatcctgcgtggtgagggtaacagttcagtatgttcaatctatcggaatggtggctggcgctgttactggcatcgtagcgggagcattgctaattttcttgctggtgtggcttctgattcgccgaaaggataaagagagatacgaagaagaggagcggcctaacgagatccgcgaagatgcggaggctcctaaagctcgtctcgtaaaaccttccagctcctccagcggctcccgaagcagccggtcgggcagttctagcacccgatccaccgccaactctgcttcgagaagtcagcgcacactgtcaactgacgcggctccccagcctggtttggcgactcaggcttactctctggtgggccctgaggtgagggggtccgaacctaagaaggtgcaccatgctaatctgacgaaagccgaaacaaccccatcgatgataccatctcaatctcgggcatttcaaacggtatag

SEQ ID NO: 219557 - DNA, 597 bp, synthetic construct
  misc_feature 1..597: note = Description of Artificial Sequence: Synthetic coding sequence
  source 1..597: mol_type = other DNA
atgcaccacagaaatgacagtcagcggttaggtaaggctgggtgtcctcccgaaccaagcctccagatggccaacaccaatttccttagcactttgtcccccgagcattgccgccctctcgccggtgaatgcatgaacaaactgaaatgtggggctgctgaagctgaaataatgaacctccccgaaagggtgggaactttcagcgccatccccgctctgggaggcataagcctgccccctggcgttatagtcatgacagccttgcatagcccagccgcagcgagcgccgcagtcacggactccgcttttcaaatcgcaaatctggcagactgcccccagaatcatagctcctcctcttccagttcaagcgggggagcaggaggtgctaacccggcaaaaaaaaaacgaaaaagatgcggcgtatgcgtcccctgcaagcggctgataaattgcggggtgtgttcctcctgcagaaatagaaaaaccggacatcagatttgtaaattccgaaagtgcgaggaacttaaaaaaaagcccggtacctcgcttgaaagaacccccgtcccatccgccgaagccttcaggtggttcttttag

SEQ ID NO: 219558 - DNA, 597 bp, synthetic construct
  misc_feature 1..597: note = Description of Artificial Sequence: Synthetic coding sequence
  source 1..597: mol_type = other DNA
atgcaccaccgaaacgacagtcagcgcctggggaaggctggatgtccgccagaaccttcgctacagatggccaatacaaactttctgtcgacgcttagcccagagcactgccgtcccctcgcgggtgaatgcatgaataaactgaaatgcggcgcagccgaggccgagatcatgaatcttccggaaagagttggtacgttttcagcaattccggcattaggtggcatttcacttccccctggtgttattgtgatgactgctctgcattctcctgcagcagcttccgctgctgttacagactcggcgttccagattgcgaacctcgccgattgccctcagaatcactcatcgtcttcatcatcctccagcgggggagccggtggggcaaatcctgcaaaaaaaaagaggaaacggtgcggggtttgcgtgccttgcaagcgattgattaattgcggggtctgctctagttgtagaaatcggaaaacaggccaccagatttgcaagtttcgcaagtgtgaggagttgaagaaaaagcccggtacgagtctggaaaggaccccggtgcctagcgccgaggcctttcgatggtttttctag

SEQ ID NO: 219559 - DNA, 969 bp, synthetic construct
  misc_feature 1..969: note = Description of Artificial Sequence: Synthetic coding sequence
  source 1..969: mol_type = other DNA
atgagcagcctcggcggaggttctcaggatgctggtgggtcctcttcttctagtaccaatggaagcgggggtagtggatcttcaggtcccaaggcaggcgcagccgataaatcagccgtggtggcggcagccgctcctgcatccgttgccgatgacacccctcctcccgaaagacgtaacaaaagcgggattatttccgagcccttgaacaagagcctgcggagaagtcggcctctgagtcattacagttcatttggatcatccggcggtagcgggggtggtagcatgatgggtggtgaatcagcagataaagcaactgctgccgcagctgctgcatcactgctcgccaatggtcacgatctggccgcagccatggccgtcgataagagcaatcctacaagcaagcacaaaagcggtgccgtggcctctctgctgtcaaaggcggagcgggctaccgagttggctgcagagggacagctgactctccaacagtttgctcagagtacagagatgctaaaacgcgttgtgcaagagcatctgcccctgatgagcgaagctggcgctggacttcccgacatggaggccgtagccggagcagaagccctcaatggacagtctgacttcccttacctgggagccttccctatcaacccagggctgttcattatgacacctgctggcgtgtttctggctgaaagtgcgctgcatatggctggattggcagaataccccatgcaaggagaattggctagcgccatcagttccggaaagaagaaaaggaagaggtgcgggatgtgtgcgccatgtaggcgcaggatcaattgtgagcagtgctcatcctgtcgcaaccggaagaccggacaccagatttgcaaatttaggaaatgcgaagaactcaaaaagaagccctccgcagcactggaaaaagtgatgctgcccaccggcgcagcgttccggtggtttcagtag

SEQ ID NO: 219560 - DNA, 210 bp, synthetic construct
  misc_feature 1..210: note = Description of Artificial Sequence: Synthetic coding sequence
  source 1..210: mol_type = other DNA
atgtcgtctctgggcggtggcagccaagacgcaggcggatcctctagctccagtacaaatgggtctggaggctccgggagcagcggcccaaaggctggcgcagcagacaaatccgccgttgtcgccgctgcggcaccggcaagcgtagctgatgacactccacccccagaacggaggaacaagagcggcatcatatccgaacccctgtag

SEQ ID NO: 219561 - DNA, 243 bp, synthetic construct
  misc_feature 1..243: note = Description of Artificial Sequence: Synthetic coding sequence
  source 1..243: mol_type = other DNA
atgtcttcactgggaggcggttcgcaagatgcgggtggtagtagttctagttcgacgaatgggtcagggggatccggctctagtggacctaaggccggtgctgccgacaaaagcgcggtggttgctgccgcagcccctgcctctgtcgccgacgacaccccaccaccggagcggaggaacaaatctgggattatatccgaaccactcaataagtctctacggagaagccggccactgtcatag

SEQ ID NO: 219562 - DNA, 546 bp, synthetic construct
  misc_feature 1..546: note = Description of Artificial Sequence: Synthetic coding sequence
  source 1..546: mol_type = other DNA
atgtccagtctggggggtggaagccaggacgctgggggtagtagctcctcttctactaacgggtcaggcggatccggctcttccggtcctaaggccggagcagccgataaatcggcagtcgtggctgccgctgcccctgcttctgttgcggacgacactccccctccggaaagacgcaacaagagcgggataataagtgaaccactgaacaagtctctcaggcgaagcaggcctctctctcattattcctctttcggaagttctggcggatcaggtggtggcagcatgatgggcggagagagtgccgataaagctaccgccgctgccgctgccgcatccttgctcgccaacggtcatgacctggccgcagccatggccgttgacaaaagcaaccctacctcaaaacacaaatccggggcagttgcaagccttctttccaaagcagagcgggcaactgaacttgcggctgaaggccaactgaccctgcagcaatttgcccaaagtaccgaaatgctgaaacgagttgtgcaggagcatttgccttag

SEQ ID NO: 219563 - DNA, 252 bp, synthetic construct
  misc_feature 1..252: note = Description of Artificial Sequence: Synthetic coding sequence
  source 1..252: mol_type = other DNA
atgtcaagtctcgggggaggtagccaggatgctggcggttcttcctccagcagcactaacggcagtgggggatctggatcctctgggcctaaggctggggcagcagacaagtccgccgtggtggccgcagctgcccctgcgtccgtagccgacgataccccacctcctgagaggaggaacaaaagcggtatcatctcggaaccactgaacaagtctctccgtagatcccgccctctgagccactattcttag

SEQ ID NO: 219564 - DNA, 486 bp, synthetic construct
  misc_feature 1..486: note = Description of Artificial Sequence: Synthetic coding sequence
  source 1..486: mol_type = other DNA
atgtcaagcctgggtggcggatcccaggacgctggcggttcttcgagctcaagtactaacgggagtggcggaagtggatcatcagggcctaaagccggagccgctgacaagtccgccgttgtcgccgcagccgctccagccagtgttgctgatgatactccaccacccgagcgcagaaataagtctgggatcatttctgaaccgctgaataagtcccttaggaggtctcggccattaagccactattcatcatttggctcaagcgggggttctggagggggttcaatgatgggcggagaatcggccgataaagccacagcggctgcggcagcagccagcctgttagccaacggacatgacttggctgctgctatggccgttgataaatccaaccctacatctaagcataaatctggcgcagtggctagcctcttgagcaaggcggagcgagccacggaactggctgctgaggggcaattgacatag

SEQ ID NO: 219565 - DNA, 309 bp, synthetic construct
  misc_feature 1..309: note = Description of Artificial Sequence: Synthetic coding sequence
  source 1..309: mol_type = other DNA
atgagtagcctcggtggaggctcgcaggacgcaggcggatcgtcatctagctccacaaacggaagcggcggtagtggaagctccgggcctaaggccggagccgcagacaaatctgccgtggttgcagccgcagcccctgcgagcgttgccgatgacactccacctcccgagcgcaggaataaatccggaataatatctgagcccttaaacaagagccttcggaggagtagaccgttatctcattattcttcctttggttctagtgggggttctggagggggatctatgatggggggtgagtcagcgtag

SEQ ID NO: 219566 - DNA, 36 bp, synthetic construct
  misc_feature 1..36: note = Description of Artificial Sequence: Synthetic coding sequence
  source 1..36: mol_type = other DNA
atgagtagcctgggtggcggttcgcaggacgcttag

SEQ ID NO: 219567 - DNA, 297 bp, synthetic construct
  misc_feature 1..297: note = Description of Artificial Sequence: Synthetic coding sequence
  source 1..297: mol_type = other DNA
atgagctctctgggtggtggttcccaggacgcgggaggatcttccagtagctccaccaacggcagcggcggatcgggatcttccggtccaaaggccggtgctgctgataaatctgccgtggtagccgcagcagctcccgcttctgtggccgatgatactccgcctccggagagaaggaacaagtcaggcataatctctgaacccttgaacaaaagtctcaggcgctcacgtccgctatcgcactacagttcctttggaagtagcggcggatctggtggaggtagtatgatgggttag

SEQ ID NO: 219568 - DNA, 969 bp, synthetic construct
  misc_feature 1..969: note = Description of Artificial Sequence: Synthetic coding sequence
  source 1..969: mol_type = other DNA
atgtctagcctgggtgggggttcacaggatgccggtggaagctcctcttcctcgacaaacggaagcggcggatcgggaagcagtggacctaaagccggtgccgctgataaaagtgctgtggtggcagccgcagctcctgccagcgtcgctgacgacacgccaccccctgagcgcagaaataagtctgggatcatttccgagcccctcaacaagtcgcttaggcgctcaaggccacttagtcactattcttccttcggatcaagcggcggttcaggtgggggatctatgatgggtggggaaagtgccgacaaagctaccgccgcagccgcagctgccagcctgctcgcaaacggccacgatctcgccgctgccatggcagtggataaatccaacccaacatcaaagcataagtctggcgcagtggcctctcttctaagtaaggcagagcgggctaccgagttggcagccgaaggacagttgaccctgcagcagttcgcccagagcaccgaaatgctcaagagggttgtgcaagagcatcttcctctgatgagtgaagctggagctggactgcctgatatggaagctgtcgcgggtgccgaggccctcaacggccagagcgacttcccgtatctcggggctttcccaatcaatcctggtctttttattatgaccccagccggtgtgtttctcgctgaatctgcccttcatatggcgggacttgccgaatacccgatgcaaggtgagttggcaagtgccataagctctggcaaaaagaagcggaaacgctgcggaatgtgtgccccatgcaggaggagaattaactgcgaacagtgttccagctgtcgcaaccgcaagacaggacaccaaatttgtaagtttcgcaagtgcgaagagctgaagaaaaagcctagcgccgctctcgaaaaagttatgctaccaactggcgctgccttccggtggtttcagtag

SEQ ID NO: 219569 - DNA, 594 bp, synthetic construct
  misc_feature 1..594: note = Description of Artificial Sequence: Synthetic coding sequence
  source 1..594: mol_type = other DNA
atgtcttccctcggaggaggcagccaggacgcagggggaagcagcagttcttcaaccaatgggtcaggtggctccggatcttctggacccaaggccggagccgcagacaagagcgcggttgtcgctgctgcagctcctgcaagtgttgccgacgataccccaccacctgagcgcaggaataaatctggaattatttctgagcctctgaacaagtctctccgaaggagcagaccactgagccattatagttctttcggttctagcggaggatccggaggaggcagcatgatggggggagaatccgccgacaaagccacagccgctgccgcagccgctagtttgcttgccaatggacatgacttggccgctgctatggccgtagacaaatcaaatcccacctcaaagcacaaatctggagctgttgcgagcctcttatcaaaagctgagagggcaaccgaactggctgccgagggacagcttactctccagcaattcgcccagagtaccgagatgctgaaacgggttgtacaggagcacttgcctttgatgagcgaagccggagctggcctgcccgacatggaagctgtggcatag

SEQ ID NO: 219570 - DNA, 27 bp, synthetic construct
  misc_feature 1..27: note = Description of Artificial Sequence: Synthetic coding sequence
  source 1..27: mol_type = other DNA
atgagtagcctcggagggggatcatag

SEQ ID NO: 219571 - DNA, 222 bp, synthetic construct
  misc_feature 1..222: note = Description of Artificial Sequence: Synthetic coding sequence
  source 1..222: mol_type = other DNA
atgtccagcttaggaggaggatctcaggatgccggtggcagctcttcatcgagtactaacggcagcggaggcagtggatcatccggacccaaggcaggcgctgccgacaaatctgccgtcgtggctgctgccgctcccgcttccgtggctgatgacacccctccacctgagcgtcggaacaaaagcgggattatatcagagcctttgaacaagtccctctag

SEQ ID NO: 219572 - DNA, 414 bp, synthetic construct
  misc_feature 1..414: note = Description of Artificial Sequence: Synthetic coding sequence
  source 1..414: mol_type = other DNA
atgagctcactgggcggtggctcccaggacgctggtggatcttcttccagctcaacaaacggaagtggcggatccggttcttctggacccaaggctggcgcagcagacaaaagtgctgttgtggcagccgcagctccggcttcagtggcagatgatacacctccccctgagcgacggaacaagtccggtataatcagcgagcctttaaacaaatccttgcgtagatccagaccgttgtctcactattctagctttgggtcttctggcggttcaggcggaggttcaatgatgggaggggagagcgccgacaaggctactgccgcagctgcagccgcttcccttctggccaacggtcacgacctcgcagcagctatggctgtggacaaatctaacccaactagcaaacataagtag

SEQ ID NO: 219573 - DNA, 2073 bp, synthetic construct
  misc_feature 1..2073: note = Description of Artificial Sequence: Synthetic coding sequence
  source 1..2073: mol_type = other DNA
atgaagctttctatgaaaaataacattatcaatactcagcaatctttcgtgactatgcctaatgtaattgtgcccgacatcgagaaggagatacgcaggatggagaacggcgcatgctcatccttctccgaggacgatgactcagcatccactagtgaggagtccgagaatgagaatccgcacgcaagagggtctttttcttacaagtccctgaggaagggtgggccatcacagcgggaacagtatctacccggtgccatagcattattcaacgtgaacaacagttccaacaaagatcaggagccagaggagaaaaaaaagaagaaaaaagagaagaagtccaaatcggacgacaagaacgagaacaaaaacgatccagagaagaaaaaaaaaaaaaaagataaagaaaaaaaaaaaaaagaagagaagtcgaaggataagaaggaggaagagaagaaggaggtagtggtgatcgacccttctggtaatacttattacaactggctgttttgtattaccctgcccgttatgtataactggaccatggtgatcgcccgagcttgtttcgatgaattgcagtccgactacctcgagtattggcttattcttgattatgtgtcagatatcgtttacttgatcgacatgtttgttagaacccgtacagggtatctggagcagggactgttggttaaggaagagctgaaactgataaataaatacaagtctaatctgcagtttaaactcgatgtcttgtcgctgatcccgaccgacctgctttatttcaaattgggttggaactatcccgaaatccggctgaataggttactcagattctctagaatgtttgagttttttcagcggactgaaacccggacaaattaccctaatatctttcgcattagcaatctggtgatgtacatcgttattattatacactggaacgcttgtgtgttctattctattagcaaggctatcggttttggtaacgatacttgggtttaccctgatatcaatgaccctgagtttggacgactcgcacgcaaatatgtttatagcctgtactggtcaactctgacactcacaaccatcggcgagacacctccgccagtgcgcgactccgagtacgtttttgtagtagtcgattttctaataggcgtgctgatcttcgcaaccattgtgggcaacattggctcaatgatcagcaacatgaacgccgctcgggcagaattccaggctcggatcgatgcaattaaacagtatatgcactttcgcaacgtctctaaggacatggaaaagagggtcataaaatggttcgattacctgtggacaaacaaaaaaacggtcgacgagaaagaagttttgaaatacctgcccgacaaactcagagcagagatagctatcaatgtgcacttagacactttgaagaaagttagaatctttgctgattgcgaagccggactgctggttgagcttgttcttaaactccagccccaagtctatagccctggagattatatatgcaagaaaggggacattggcagggaaatgtacatcattaaggaaggaaaactggcagtcgtagccgatgacggcgtgacccagtttgtcgtgctgtccgacggctcctactttggcgagattagtatccttaacatcaaagggtccaaagccggaaaccggagaacggcaaacatcaagagcataggttactccgatctattctgtctcagcaaagacgatctcatggaggccctcaccgagtatccagatgcaaaaacaatgcttgaagaaaaaggtaagcagattctaatgaaggacgggctcctggacttgaatatcgccaacgccggtagcgaccctaaggacctagaggagaaggtcacacgcatggaagggtcggtggacctgcttcaaacccgcttcgcccgtatccttgctgaatatgagtccatgcagcaaaaactgaagcagcggctgactaaagttgaaaaatttctgaaaccactgattgacaccgaatttagtagtatcgaaggccctggcgctgagtcaggacccatcgattccacatag

SEQ ID NO: 219574 - DNA, 2280 bp, synthetic construct
  misc_feature 1..2280: note = Description of Artificial Sequence: Synthetic coding sequence
  source 1..2280: mol_type = other DNA
atggagagccgctcatctccacggcttgagtgcagtggggctatctccgcacattgttctttacacctgcccgacagcagcgacttccagctgatttttgtgttcctggtggagatgggtttccaccacgtgggacaggcaggcctggagttgctgatttcctccgatctccctacatctgcctcacagagcgccggaatcacagatatgaaattgagtatgaaaaataacattatcaatacacaacagagcttcgtcaccatgccaaatgtcattgtgcccgatatcgaaaaggagatccgaaggatggagaacggagcctgttcaagtttctccgaggacgatgacagtgcctccacttctgaggaaagcgagaacgagaacccacacgcgcgtggctcattcagctataaatcccttagaaaggggggacccagccagcgcgaacagtacttgccaggagctatcgccctgttcaatgtaaacaatagtagtaacaaggaccaggagcctgaagagaagaagaaaaaaaagaaagaaaaaaagtctaagtccgatgataagaacgagaataaaaatgacccagagaagaagaaaaagaaaaaagataaggaaaaaaaaaagaaagaagagaaatccaaagataagaaagaagaggagaaaaaggaggtggtcgtgatcgaccccagtgggaatacttactataactggctgttctgtataaccttgccagtaatgtacaattggactatggtgatcgcgagagcttgttttgacgaactacagtcggattacttggagtactggttgatactggattacgttagtgatattgtgtacctcatcgacatgttcgtgcgtacccggactggctatctggagcaaggcctgctcgtgaaagaggagctcaagctgattaataagtacaaatccaaccttcagtttaagctggacgttctaagcctgatcccaaccgacctactgtatttcaaactaggttggaattatcccgagatacgcctgaatagattgctgaggttctcccggatgttcgaatttttccagcgtaccgagacacggactaactatcccaatatcttcagaatttcaaacctggttatgtacatagttattatcatccactggaatgcatgcgttttctactcaatctctaaagccatcgggttcggcaatgacacctgggtttaccctgacatcaacgatccagagttcggccgactcgctaggaaatatgtctacagtctgtattggtccaccctgacattgacgactatcggcgagactccccctcctgtccgtgattcagagtacgtcttcgtcgtcgtagacttcctgatcggcgttttgattttcgccacaattgtggggaacattggttctatgatttccaacatgaatgctgccagggccgaattccaggcccgtatcgacgccattaaacaatacatgcacttcaggaacgtctccaaggatatggagaagagggtcatcaagtggtttgattatctgtggactaataagaagacagtggacgaaaaggaggttctgaagtacttgccagataagctcagagctgagattgcgatcaacgtccatctcgacaccctgaagaaggtgaggatctttgccgattgcgaggcaggtctgttagtggaacttgtgctcaagctgcaaccacaggtctattcacccggagattacatctgcaaaaaaggcgatataggcagggaaatgtatatcataaaagagggtaaactggctgtcgtggctgatgacggcgtgacccagttcgtggtattaagtgacgggagctattttggcgagatatctattctgaatatcaaggggagcaaagcaggaaaccgccgaacagctaacattaagtccatcggatactcagatctattctgcttgtccaaagacgacctgatggaggcattaaccgaataccccgatgccaagaccatgctcgaggagaagggcaaacagatcctcatgaaggatggtctgctggatctgaacattgcaaatgcgggatccgacccaaaagatctggaggaaaaagtgaccaggatggaaggaagcgtggatctgttgcaaactcgctttgccaggatcttggccgaatatgagtccatgcagcagaaattaaagcagaggttgaccaaagtcgaaaagttccttaaaccactgatcgacactgagttcagctccattgagggccctggggctgaaagcggcccaatcgattcaacttag

SEQ ID NO: 219575 - DNA, 2073 bp, synthetic construct
  misc_feature 1..2073: note = Description of Artificial Sequence: Synthetic coding sequence
  source 1..2073: mol_type = other DNA
atgaagctcagcatgaaaaataatattatcaacacacagcagagcttcgtgacaatgccaaacgtgatcgtgcctgacatcgagaaggagattcgcagaatggagaatggggcatgtagctccttctcggaagacgatgactccgctagcacctctgaagaatccgagaatgagaaccctcacgcccgaggctcctttagttataaatcacttcgcaaggggggtccttcccaaagggagcagtacctacccggagcaatcgccctgttcaacgtaaacaattcctcaaataaagatcaagagcccgaggaaaagaagaaaaagaagaaggaaaaaaagtctaagtccgacgacaaaaatgaaaacaaaaatgatcccgaaaagaagaagaaaaagaaggacaaagaaaaaaagaagaaagaagagaagtccaaagataagaaggaagaggagaagaaggaggtagtggtcatagatccctccggaaatacatattacaattggctgttctgcatcacccttcccgttatgtataactggactatggttattgccagggcgtgttttgatgaattgcagtcggattacctggagtattggcttatcctcgactacgtgagcgacattgtatacctgatcgacatgtttgtgagaacacgcacaggttatctggagcagggcctgctcgttaaggaagagctaaaactgatcaacaagtataaatcaaacctccagtttaaacttgacgtccttagtctgatcccaaccgatttgctgtattttaagctaggctggaattatcccgaaataagactaaaccgccttctgcgctttagccgcatgtttgaattcttccagcggacagaaactaggacaaactatcccaacatttttcgcatcagcaatcttgtgatgtatatcgtaatcatcattcattggaatgcctgcgtgttctactcaatctcaaaagcaatcggattcggaaatgatacctgggtgtaccccgatattaatgatcccgagttcggacggctggcgcgtaaatacgtgtactctttgtattggtctactttgacactgaccaccattggagagacgcccccaccggtgcgagatagcgagtacgtctttgtcgtagtggatttcctgataggagtccttatcttcgccacaattgttggcaacatcggctccatgatctctaacatgaatgcagcaagggcagagtttcaggcacgcatcgatgccattaagcaatacatgcactttcggaatgtctctaaggatatggagaagcgggtgattaaatggttcgactatctttggaccaacaagaaaactgtcgacgagaaagaggtgctcaagtatttgcccgacaagctccgggcagagatcgccatcaacgtccacctggataccctcaagaaagtgagaatcttcgctgattgtgaagccggacttttggttgagctcgtgctaaagctgcaacctcaggtctatagtccgggagactatatctgcaaaaaaggcgacatcggcagagagatgtatatcattaaagaaggaaaactagccgtggtagcagacgatggcgtcacacagtttgtggtcctgtccgacggctcctacttcggagaaatctcgatccttaatatcaaagggtccaaggcgggtaataggcgcacagccaacataaaaagcatcggatacagcgatttattctgtctgagcaaagacgatctgatggaggcactcactgaatatcctgatgctaaaaccatgctcgaagaaaagggcaagcagatcttgatgaaggatggattgctcgatttaaacatagccaacgcgggatcggacccaaaggatctagaggaaaaggtcactcgcatggagggaagtgtggaccttctccagacccgatttgccaggatccttgccgagtatgaaagcatgcaacagaagctaaaacagagactcacaaaagtcgaaaagttcctcaaacctttgatcgacactgagttctcatccatcgagggccctggcgctgaatctggcccaatcgacagcacctag

SEQ ID NO: 219576 - DNA, 387 bp, synthetic construct
  misc_feature 1..387: note = Description of Artificial Sequence: Synthetic coding sequence
  source 1..387: mol_type = other DNA
atgaaacttagtatgaaaaataacatcattaatacacagcagagttttgtcactatgcccaatgtcattgtaccggacattgagaaggaaatcaggcgaatggaaaacggtgcctgttcttcgttttctgaagatgacgactcagcctcaacaagcgaggagagtgaaaacgagaacccccatgccagggggtccttctcttacaagtctctgagaaagggcggaccaagccagcgcgaacaatatctgcctggcgcaattgccctcttcaatgtgaacaactcctcaaacaaggatcaggaacctgaagaaaaaaagaaaaaaaaaaaagaaaagaagtccaagtctgacgataagaacgaaaacaagaatgatcccgagaagtag

SEQ ID NO: 219577 - DNA, 300 bp, synthetic construct
  misc_feature 1..300: note = Description of Artificial Sequence: Synthetic coding sequence
  source 1..300: mol_type = other DNA
atgaaattgtccatgaagaacaatatcattaacacccagcaatcatttgtgacaatgcctaacgtgatcgtccccgatatcgaaaaagagatacggaggatggagaatggcgcatgttcctccttttcggaggatgacgactccgcctcaacgagtgaggaaagcgagaatgagaatcctcacgcacggggatcgttcagttataagagccttaggaagggagggccatctcagcgggaacagtatcttcctggcgctatcgctctgttcaacgtgaacaactccagtaataaagattag

SEQ ID NO: 219578 - DNA, 2073 bp, synthetic construct
  misc_feature 1..2073: note = Description of Artificial Sequence: Synthetic coding sequence
  source 1..2073: mol_type = other DNA
atgaaacttagcatgaagaacaacataatcaatactcaacaatctttcgtgacaatgcctaatgttatagttccggacatcgagaaagaaattcgtcggatggaaaacggggcatgttctagcttctcagaggacgatgacagcgctagcacttccgaggaatctgagaacgaaaaccctcacgccagaggtagcttttcttataaatctctgcgcaagggcggacccagccagagagaacaatacttacctggagcgatcgctctatttaacgtgaacaatagctctaataaagatcaggagcccgaagaaaaaaagaagaaaaagaaggagaagaagagcaaatctgacgataagaacgagaacaaaaatgaccccgaaaagaaaaaaaagaaaaaggacaaggagaaaaagaaaaaagaggaaaagagtaaagacaaaaaagaagaggagaagaaagaggtggtcgtgatcgacccttctggcaatacatactacaattggctgttttgcattacccttcctgtaatgtataattggaccatggtgatcgcccgagcgtgctttgatgagcttcaaagcgattatttggaatattggctcatcctggattacgttagcgatatagtgtatctgatcgacatgtttgtgaggacccgcaccggatacctggaacaaggattgttggtgaaggaagagctcaagcttattaataagtataagtctaatctgcaattcaaactggacgtgctgtccctaataccgactgacctgctgtactttaaacttggttggaattaccccgaaattcgcctcaacaggctgctgcgcttctcacgcatgttcgagttcttccaaaggaccgaaacacggactaactacccaaatatattccgtattagcaaccttgttatgtatatcgttatcatcatccactggaacgcatgtgtcttctattctattagcaaagctatcggttttggcaatgacacttgggtgtatcctgacatcaacgatccagagttcggaaggcttgcgagaaagtacgtctactccttgtactggagtactcttaccctcaccacaattggtgaaacccccccaccggtgcgagattcggagtatgtgtttgtagtggttgatttcctgatcggggtcttgattttcgcgactattgtggggaacatcgggagtatgatttccaatatgaacgccgcacgcgcagagtttcaagccaggatagatgccattaaacagtacatgcacttcaggaacgtgtctaaagacatggagaagcgtgtgatcaaatggtttgattacttgtggacaaacaagaagaccgttgacgaaaaggaagtgttaaagtacctgccagacaaattacgagccgagattgccatcaatgttcacctggatacactgaagaaagtgagaattttcgcagattgtgaagccggactcttggtagagcttgtcctcaagttacaacctcaggtctactctccaggagattacatctgtaagaaaggggacatcggcagggaaatgtacataatcaaggagggaaagctggccgttgttgctgatgatggcgtgacacagttcgtggtgctgtccgatgggtcgtattttggggaaatcagcatcttgaacattaagggctccaaggccggtaacagacgcaccgcgaatataaagagcattggttactctgatctgttttgtctatctaaagacgatctgatggaggcactgaccgaatatcccgacgcgaaaaccatgctagaggagaagggtaaacagattctgatgaaggatggcctgcttgacctgaacatcgcaaacgccggttctgatcccaaggatctggaggagaaagtcacaagaatggaaggatcagtggatctgttgcagaccagatttgcacgtatcctcgcagagtacgagagtatgcagcagaaactcaaacagcggcttaccaaggtagaaaagttcttaaagccattaatcgacaccgagtttagcagtatcgagggccctggcgctgagagtggacccattgactccacttag

SEQ ID NO: 219579 - DNA, 300 bp, synthetic construct
  misc_feature 1..300: note = Description of Artificial Sequence: Synthetic coding sequence
  source 1..300: mol_type = other DNA
atgaagctgtcaatgaaaaacaacatcataaacacgcagcagtcctttgtaaccatgcccaacgtaattgtgcctgacattgagaaggagattaggcgtatggaaaatggggcttgttcttcattctccgaggacgatgatagcgcttctacatctgaggaatctgaaaacgagaatccccacgctagagggtctttttcttataagagcctccgcaagggtggtccatcacagcgagagcagtaccttcctggggcaatcgccctgtttaacgtcaataacagcagtaacaaggactag

SEQ ID NO: 219580 - DNA, 2073 bp, synthetic construct
  misc_feature 1..2073: note = Description of Artificial Sequence: Synthetic coding sequence
  source 1..2073: mol_type = other DNA
atgaagttgtccatgaagaataatatcatcaatacccagcagtcttttgttacaatgccaaatgtgatcgtccccgacattgaaaaagagataaggaggatggagaacggcgcttgctcatcgttttcagaagatgacgactcagcctccacatcagaggagtccgaaaacgagaatccccatgcccgtggttccttttcctataagagcctacgtaaagggggaccatctcagcgggagcagtacttgcctggggctatcgctctgtttaacgtcaataattcctccaataaggaccaggaacccgaggaaaagaagaagaaaaagaaggagaaaaagtccaaatccgatgataagaatgaaaataaaaacgatccggagaagaagaagaagaagaaggataaggaaaagaagaagaaggaagagaaaagcaaggataagaaagaggaggagaagaaggaagtcgtcgtcattgacccatctggcaacacttattataactggctcttctgcataacgctgccggtgatgtacaactggacgatggtcatagcgcgagcatgtttcgatgagttgcaatccgattatctggagtattggctcatcttagactatgtgtccgacatcgtctatcttatcgacatgtttgtccgaacgcggacgggttacctggaacagggcctgctggtcaaggaggaattgaaattaatcaacaagtataagtccaacctgcagttcaagcttgatgtccttagtctgattccaaccgacctcctgtactttaagctggggtggaactaccccgagatccgtctcaaccggctgcttagattctcacggatgttcgagttttttcagcgcactgagacgcgcaccaactacccaaacattttcaggattagtaacctggttatgtatattgttatcattattcactggaacgcatgtgtcttctattccatctcaaaggcaattggattcggtaatgacacatgggtctaccccgacatcaatgaccccgaattcggaagacttgctagaaaatacgtgtatagtttatattggagtacactgactctgactacaatcggagaaaccccaccgcctgtgcgcgattccgaatacgtgttcgttgtggttgatttcctcattggagtgctgatatttgctaccattgtcggcaacattgggagcatgatatccaacatgaacgcagcacgcgctgaattccaggctagaatcgatgcgatcaagcagtatatgcacttccggaatgtaagcaaagacatggagaaacgcgtgattaaatggttcgattacttgtggacaaataaaaaaactgttgatgaaaaagaagtgctgaaatatctacccgataagcttcgggcagagatcgcaattaacgttcatctagacactctgaaaaaggtgaggatctttgcagattgtgaggcgggtctcctggtcgaactggtgcttaagttacagccgcaagtttactcgcccggtgactatatctgtaagaagggagatatcggacgcgaaatgtacataatcaaagaaggcaaactggccgtggtggccgatgatggcgtgacacaattcgtagtgttgtctgacgggagctacttcggtgagatctctatactgaacataaagggctccaaggcaggcaatcgacgcactgcaaacattaagtccataggatactcagatctgttttgtctcagcaaagatgatttgatggaggccctgactgagtatcccgatgctaagacaatgctggaggaaaagggaaaacagatcctgatgaaagacgggcttctggatttgaacattgcaaacgccggtagtgaccccaaggatctcgaagagaaggttacacgaatggagggcagcgtggacctgctgcagacaagattcgccagaatcctggccgagtacgagtccatgcagcagaagctgaaacagagactcacaaaggtcgagaagttcctgaaaccccttattgacacggagttttctagcattgagggaccgggagcagagagtggaccgatcgactcaacttag

SEQ ID NO: 219581 - DNA, 1995 bp, synthetic construct
  misc_feature 1..1995: note = Description of Artificial Sequence: Synthetic coding sequence
  source 1..1995: mol_type = other DNA
atgactgagaagacgaacggcgtgaagagctcaccggcaaataatcacaatcatcacgcacctccggcaattaaggctaacgggaaggatgaccaccgtacatctagcaggccacatagtgctgccgacgacgacacatcatccgagctgcagaggctagccgacgtcgacgccccacagcagggacgctccgggtttaggagaatagtgaggcttgtggggattattcgcgagtgggccaacaaaaatttcagagaggaggagcccaggccagacagcttcctggagaggttcaggggaccagagctgcagaccgtaacaacccaggaaggagacgggaagggcgataaagatggcgaggacaagggcacaaagaaaaaatttgagctttttgtgctcgatcccgcaggagactggtactattgctggctgtttgtaattgcaatgcccgtcctgtacaactggtgtctgctcgtagcacgcgcatgtttctctgacctgcagaaggggtattacttggtatggcttgtcctggactatgtgtccgatgtggtctatattgccgacctgttcattagattgcggaccggcttcctggagcaaggtttactggtgaaggacacaaaaaaactgagagataactacattcacacactgcagttcaaactggacgtggcatcgatcatccctactgatcttatttattttgccgtagatatccacagtcccgaggtgaggttcaatcgtttgctccactttgccagaatgtttgaatttttcgacagaaccgaaaccaggaccaactaccccaatatatttcgaatttccaacctcgtgctgtacatcctggtcatcattcattggaatgcgtgcatttattacgccattagtaagagcattgggtttggcgttgacacttgggtgtaccccaacattacagaccctgagtatgggtacctcgctcgcgaatatatctactgtttgtactggtcgaccctgacgttgacaaccataggcgagactcctccccctgttaaggatgaagaatatcttttcgttatattcgacttcctgatcggagtgctgatcttcgcaaccatcgtgggtaacgtaggatcaatgatcagcaacatgaacgctacaagggcggagttccaggccaaaatagatgccgtgaagcattatatgcagtttcgtaaggtaagcaaaggtatggaggcaaaggtaattagatggtttgactacttatggacaaataagaaaaccgtggacgaaagagaaattttaaaaaaccttcccgcaaagcttcgtgctgagatcgccataaacgtgcatctgtccacattgaaaaaagtgaggatctttcacgactgcgaggccggactccttgtagaactcgtgctgaaactccgcccacaagtgttctccccaggcgactatatctgtcgcaaaggggacattggaaaggaaatgtatatcatcaaagaaggaaagctcgccgtagtggccgacgatggtgtgacacagtacgcccttctaagtgccggttcttgttttggggagatctcaatcttaaacataaagggtagcaagatgggaaatagaaggaccgccaacatcaggagcctgggctatagtgacttgttctgcctgagcaaggacgatctcatggaagccgtaaccgagtaccctgacgctaagaaggtgcttgaggagcgtggcagggagattttaatgaaagaagggctcctggacgaaaacgaagtggccacctcaatggaggtggacgtgcaagagaagctaggacagctagaaactaacatggaaacactctacacaaggtttgggagattactggctgagtatacaggtgcccagcagaagctgaaacagcgcataaccgttctggaaactaaaatgaaacagaataacgaggatgactacttaagtgatgggatgaactcacccgagttggccgcagcggacgagccctag

SEQ ID NO: 219582 - DNA, 2085 bp, synthetic construct
  misc_feature 1..2085: note = Description of Artificial Sequence: Synthetic coding sequence
  source 1..2085: mol_type = other DNA
atggctaagatcaatacccagtactcacacccctcaagaactcacctgaaagtcaaaacaagcgaccgcgacctaaaccgtgcggagaatggcctatctcgcgctcacagctcaagcgaggagaccagttctgtactccagcctgggatagcaatggaaacgagggggctcgctgactcagggcaaggttcattcaccggtcaaggcatcgcaaggctcagtagactgatctttctgctgagacgttgggcagccaggcatgtgcaccatcaagatcaaggaccagactcattccctgatagattcagaggtgcagagcttaaggaagtctcaagtcaggagtccaatgcacaggcaaacgttggttcacaagagcccgctgaccgaggcagaagcgcctggcctctagccaagtgcaatactaacacgtccaacaataccgaagaagaaaagaagactaaaaagaaagacgctattgtcgtggatccctcctcgaacctgtactacagatggctgaccgccattgccttgccagttttctataactggtatctactcatttgtcgtgcttgtttcgacgagctacagtccgagtacctcatgctttggctggtcctcgattacagcgccgacgtcctctatgtgcttgacgttctcgtacgcgcacgtaccggttttctagaacaagggctgatggtcagtgataccaataggctttggcagcattataaaacaacaactcagttcaagctggatgtgctgtcgttagttcctactgatcttgcgtatttgaaagtcgggactaactacccggaggtgaggtttaaccgcctgttaaaattctccaggctgttcgagttcttcgacaggaccgagacccgaactaactacccaaacatgtttcgcattggcaacctcgttctgtatatattaatcatcatccactggaatgcctgtatttacttcgccattagcaagttcataggatttgggaccgattcatgggtttaccccaatatcagcatcccagagcatggcaggctgtctagaaaatacatctactctctgtactggtccaccctgaccctcaccactatcggagagacaccaccacccgtaaaggatgaggagtacctgtttgtcgtagtcgatttcctggtaggcgtgttgatatttgccaccattgtcggtaatgtaggcagcatgatatctaacatgaatgccagtcgggctgaatttcaagccaagatcgacagcatcaagcagtatatgcaattccgcaaggtgactaaagacctagaaacgagggtaatcaggtggttcgactacctgtgggcaaacaagaagaccgttgatgagaaagaagtactgaaatcactccctgataagctgaaggcagagattgcaataaatgtgcatctcgacacactgaagaaagtgcgaatttttcaggactgtgaggcaggcttgttggtagaactggtgttaaagttaaggccaacggtattcagccccggagattacatttgtaagaagggggatatcgggaaagagatgtatattattaacgagggcaaactagccgttgtggctgatgatggcgtgacgcagttcgtagttctttccgacggctcatacttcggtgagatcagtatcctcaacattaaagggagtaagtccggtaatcggagaacagcaaacatccgctctataggatattctgacctcttttgtctgtccaaagacgatttgatggaagcactgaccgaataccctgaagccaaaaaggcccttgaggagaagggccgacagatcttaatgaaagataacctaatcgacgaggagctagcacgtgccggtgctgatcccaaggaccttgaggagaaagtggaacaactggggtcctccttagacacactgcagaccaggttcgcgagactgttggctgagtacaatgccacacagatgaagatgaagcagcgtctgagccagctcgaaagtcaagtgaagggcggtggagacaagcccctggcggatggcgaagttcccggagacgccaccaaaactgaagataagcagcaatag

SEQ ID NO: 219583 - DNA, 2085 bp, synthetic construct
  misc_feature 1..2085: note = Description of Artificial Sequence: Synthetic coding sequence
  source 1..2085: mol_type = other DNA
atggctaaaatcaatacacagtattctcatcccagcagaactcacctgaaagtcaaaacaagcgaccgggaccttaatagggccgaaaatggcctctctcgcgcacattctagttccgaggagacgagcagtgtcctgcagcccggtatcgccatggaaacccgtgggctcgcagactcaggccaggggtctttcacaggtcagggcattgctagactgtcacgactgatctttctgctgagacgatgggctgcccgacacgtgcaccaccaggatcagggtccagacagctttccagatcggtttcgcggtgccgagttaaaagaagttagctctcaagaaagcaatgcccaggccaatgtgggaagccaggagcctgctgacagggggagatccgcgtggcccttggctaagtgcaacaccaatacctccaataatacagaggaggagaaaaagacaaaaaaaaaggatgcgattgtggtggaccccagctcaaatctctactaccggtggctgaccgccattgcccttccggtattttacaactggtacctcttgatctgcagagcttgtttcgacgagctccaatcagagtatctgatgctgtggctagtcctggactactccgccgatgtgctctatgtgctcgatgtgctcgttcgagccaggacaggcttcctcgagcagggattgatggtgtcagacaccaatcgactttggcagcattataaaacaaccactcagttcaagctcgatgttctcagcttagtgccgactgacctcgcatatttaaaggtcgggaccaactatcctgaagtcagattcaaccggctgttgaaattttcaagattgtttgagttttttgaccggactgagacaaggactaattacccaaatatgtttcggattggaaatctcgttctatacattctaataattatacattggaatgcctgcatctactttgctatctcgaaatttatcggttttggcactgatagttgggtctatccaaacattagcatccccgagcatggtaggctgtcgcgcaagtatatttattcactgtactggtctactcttaccctcaccacaataggtgagaccccaccacctgtcaaggacgaggagtacctctttgtggtggtagatttcctagtcggtgtcttgattttcgccaccattgtaggcaatgtgggatccatgatttcgaatatgaatgcatccagagccgagtttcaggccaaaatcgactcgataaaacagtacatgcagttccgcaaagttacaaaagatctcgaaacccgagtgatcagatggttcgactatctttgggccaacaagaagacggttgacgaaaaagaggttctcaagagtctgcccgataaacttaaggccgagatcgctatcaacgtgcacctagatactctgaaaaaagtcagaatcttccaggattgcgaggctgggctgctggttgaactggtcttgaaactgagaccaaccgtgttctcaccgggtgactacatttgcaaaaaaggcgatatcggtaaagaaatgtatatcataaacgaggggaaactggcagtcgtagcagatgacggagtcacgcagtttgttgtgctctccgacggatcttatttcggcgagattagtatccttaatatcaaaggaagtaagtcagggaatagaaggactgctaacattcgctcaattgggtattcagatctgttttgcctcagtaaggatgatctgatggaagctcttactgaatatcccgaggctaagaaagcgctagaggagaaaggtcgacagatcttaatgaaggacaatcttatcgacgaagagctggcacgggcaggagccgatcctaaggatcttgaagagaaagtggagcagctcggcagttctctggacactcttcagactagatttgctcgcctgcttgccgagtacaatgcaacacaaatgaaaatgaagcagcgcctctcccagctggaatcccaggtaaagggcggaggcgataaacctctcgctgatggagaggtgccaggagatgcaacgaaaacagaagataaacaacaatag

SEQ ID NO: 219584 - DNA, 2031 bp, synthetic construct
  misc_feature 1..2031: note = Description of Artificial Sequence: Synthetic coding sequence
  source 1..2031: mol_type = other DNA
atggccaagattaacacccagtacagccatcctagtcggacacacctcaaggttaagacatcagatcgggatctgaatcgagcagagaacgggctgtcgcgggcacatagttcctccgaagagacttcttcagttttgcaacctggaatcgcaatggagaccaggggtctggcggattccggccagggtagcttcacaggccaggggatagccagactgagccgcctgatattcctgcttcgcaggtgggctgccagacacgttcaccatcaagatcaaggaccagatagcttccctgacagattccgtggggctgaattaaaggaggtttcatcccaggaatccaacgctcaagctaatgtgggtagccaggagccagcagaccgaggacggaggaagaagacaaaaaagaaggatgccatcgtggtggaccccagctcgaatctgtattaccgatggctgacagcaatcgcactgccagtcttttataattggtatttgttaatttgtcgagcctgttttgatgaactgcaatcagagtatcttatgttgtggttggtcttagattacagtgcggatgtgctctacgttcttgacgtgctggtgagggcacggaccggttttctggaacagggactgatggtctcagataccaatcgcctttggcaacactacaagacaacgacgcagttcaagctggacgtgctgagcctggtgccaacagatctggcatatttgaaagtgggtaccaactatcccgaggtgaggttcaacagactgctgaagtttagtagattgtttgagttcttcgatagaactgaaacaaggactaactaccccaatatgttcaggattggaaatttggtgctgtatatccttataatcatccattggaacgcctgcatttactttgctatttctaagtttatcggctttggcacggacagttgggtctatcctaacatttccattccagagcatggacggttgagccgcaaatacatttactccctttactggtcgactctgaccctcacaactatcggggaaactcctccaccggtgaaagacgaggaatatctttttgttgtggttgattttctcgtcggcgtcctcatcttcgctaccatagttggtaacgtgggaagtatgatttctaacatgaacgcatctcgcgctgagtttcaagcaaaaatagattccatcaagcagtatatgcaatttcggaaggtcaccaaagatctcgaaacacgggtcattagatggtttgactatttgtgggcaaacaaaaaaaccgtggatgagaaggaggtgctgaaatctttgcccgacaaattgaaggctgagatagccattaacgtgcatctggatactctgaaaaaggtcaggatatttcaggattgtgaggctggcctgttggtggagctagtactaaagctccgcccaacggtgtttagtcccggagattacatttgcaaaaaaggagatattggtaaagagatgtacattataaacgagggaaaattagctgtcgtcgccgacgacggtgtcactcagttcgttgtgctcagtgacggctcctacttcggcgaaatttccatcctgaatatcaaggggagtaagtcaggaaatcgtcgcacagctaatatccggtcaattggctactccgatctgttctgcctctctaaggatgatcttatggaggctcttaccgagtaccccgaagcaaagaaggccctggaggagaagggtcgccagatcctgatgaaagacaacctcatcgacgaggagctggcccgtgctggcgctgaccccaaagacctggaggaaaaagtggagcagcttggtagtagtctggacaccctccagacaagattcgcccgtttactagctgaatacaatgcaacccaaatgaagatgaagcagagactgagtcaattagaatcgcaggtgaagggagggggagataagccgttggcagacggggaggttccaggggatgctacaaaaactgaggataagcaacaatag

SEQ ID NO: 219585 - DNA, 3756 bp, synthetic construct
  misc_feature 1..3756: note = Description of Artificial Sequence: Synthetic coding sequence
  source 1..3756: mol_type = other DNA
atgctgggatgggtacagcgagtgttgccccagccccctggcacccctcggaagactaaaatgcaggaagaagaggaggttgagccagagccggaaatggaagccgaggtggagccagagccaaaccccgaagaagctgaaactgaaagcgaatctatgccaccagaagagagctttaaagaagaggaagtggccgtggccgacccttccccacaggaaaccaaggaggctgcgctcaccagcaccatttcactcagggcacaaggagccgaaatctccgaaatgaattctccctcaaggagagtgctgacttggctcatgaaaggggtcgagaaagtgatccctcagcctgttcactctatcactgaggatcctgctcagattttaggccacggatccaccggtgacaccggctgcactgacgagccaaatgaggctctggaagctcaggacaccaggccgggactgcggctgttgctatggctcgaacagaacttggagcgtgtcctcccacagccaccgaaatctagcgaggtatggcgcgatgagcctgctgtggcaactggggcagccagtgaccccgctccacccggacgcccacaggaaatgggtcccaaactgcaggcaagagaaactcctagtctgcccacacccattcccttacagcctaaagaggaaccaaaggaggcgccagcccctgagcctcagcccggatcccaggcccagacctccagcctgccccctaccagagacccagcacgactggtggcctgggtcttacataggcttgagatggccttacctcaacctgtgttgcatgggaagatcggggagcaggagcctgactcaccgggaatttgcgatgtacagacgatatctatcttgcccggtggacaggtggagccagaccttgtcctagaggaggtcgagcccccttgggaggacgcccaccaagatgtgtctacctcccctcaggggaccgaagtggtgcccgcatacgaggaagaaaacaaggcggtggaaaagatgcccagggagctgagtaggatagaggaagagaaagaagacgaagaggaggaggaggaggaagaagaggaggaggaggaggaagaggtaaccgaggtgctgcttgacagctgtgttgtgtctcaggtgggggtcggacagagcgaagaagatgggacccggccacagtccaccagcgatcagaagttatgggaggaagtaggtgaagaggccaaaaaagaggcagaggaaaaggccaaagaggaagccgaagaagtggccgaagaggaggcagagaaggaaccccaggactgggcagaaaccaaggaagaaccggaggctgaagctgaggctgccagttcgggcgtgcccgctactaagcaacatcccgaggttcaggtcgaggataccgatgcagacagttgcccgctaatggcagaagaaaatccacccagcaccgtactgccacctcccagccccgctaaaagcgataccctgatagtgccatcaagtgccagcggaacacacaggaagaaactgccatctgaggatgatgaagctgaagaactgaaggccctttcgcccgcagaaagccccgtcgttgcttggtccgatcccaccacacctaaagacaccgatgggcaggatcgagcggcttctacagcaagtacaaatagcgcaatcattaatgaccggctgcaagaacttgttaagttgttcaaagagaggacagaaaaggtcaaggaaaaattaattgaccctgacgtaacaagtgatgaagaatcaccaaaaccatcccctgctaagaaggcccctgaaccggctcccgatacaaaaccggcagaagctgaacctgttgaggaagaacactactgcgatatgctttgttgtaaatttaagcaccgcccatggaagaagtatcagttcccccaatctatcgaccctctgacaaacttaatgtacgttctgtggttgttcttcgtcgtcatggcttggaactggaactgttggctcattcctgtgaggtgggctttcccctaccagacgcccgataacatccaccattggctcttgatggactatttgtgcgacctgatatatttcctggacattaccgtgtttcagacgaggttgcagttcgtcagaggcggagacataattacggacaaaaaggacatgcggaataattacttgaaatctagacggtttaaaatggatttactatcccttttaccccttgactttttatacttgaaagtgggggtgaatcctctgcttcggctgcctcgctgtttgaagtacatggcattttttgaattcaattcaaggctagaatctatcctctccaaggcttacgtctacagggtgatccgcacgaccgcctaccttctgtattcccttcacctgaactcttgcctgtactactgggcaagtgcttaccaaggccttggctccactcactgggtgtatgacggcgtagggaactcttatataagatgctactactttgcagtgaagacgctcataacgattggaggactgcctgatcctaagacgctctttgaaatcgtgttccagctgcttaactattttacgggcgtcttcgctttctccgttatgatcgggcagatgcgggacgttgtgggagccgctaccgcaggtcagacctattatagaagttgtatggattctaccgttaaatatatgaacttttataaaattcctaagtctgtacagaaccgtgtaaagacctggtacgagtacacatggcacagccagggcatgctagatgagtcagaattaatggtccaactgcctgataagatgcgtctcgacctcgccattgacgtcaactataacattgtttccaaggtcgcgctgttccagggttgtgataggcagatgatatttgacatgctgaagcgattgagaagtgtggtgtacctccctaatgactacgtgtgcaaaaaaggcgagatcggacgggaaatgtatatcatccaagcaggccaggtccaggtgttagggggaccggacggtaaatctgtgctggtgacacttaaggccggaagcgtcttcggggagatatctctgctcgccgtggggggtggcaatcgcagaactgccaatgtggtggcccacggctttacaaacctgtttatactggacaagaaagatctcaatgaaattctggtgcattaccccgaatcacaaaagttgttaagaaaaaaggctcgaaggatgttgaggtccaacaataagcccaaagaagagaaatctgtcctgattctcccacctcgtgctgggactccaaaactcttcaatgctgctctagccatgacaggtaagatgggaggtaagggcgctaaagggggaaaacttgcccatcttcgggcaagattaaaggaactcgcagcccttgaagccgctgctaagcagcaggaacttgtcgagcaggccaagtccagccaggacgtcaagggagaggagggaagtgccgcacctgaccagcatacccaccccaaggaggctgccacagatccgccagctccgaggaccccacccgagcccccaggttcccctccatccagtccaccaccggcttctctggggagaccggagggagaggaagaggggcctgccgaaccggaggagcattccgtgagaatttgtatgtcccccggtcctgagcctggggagcagatactgtctgttaaaatgccagaggagcgcgaggaaaaagctgaatag

SEQ ID NO: 219586 - DNA, 900 bp, synthetic construct
  misc_feature 1..900: note = Description of Artificial Sequence: Synthetic coding sequence
  source 1..900: mol_type = other DNA
atgctgggatgggtccaacgcgtcctgcctcagcctcctgggaccccaaggaagactaaaatgcaagaagaagaggaagtggagccagaacctgagatggaggccgaggtggaacccgagcccaacccagaagaggccgagaccgagagcgaatctatgccccctgaagagagctttaaagaggaagaagtcgcagtggccgatccttccccacaggagactaaagaagcggctctgactagcacaatttccctccgcgcacagggggctgagattagcgagatgaacagcccatccagaagggtgctgacttggctgatgaagggcgttgaaaaagtcatcccacagccggtgcacagcatcactgaagaccccgcacagattctgggtcacggctctactggggacacggggtgtacggatgaacccaacgaagcactggaggcccaggacacaaggcccggattaagattattgctgtggttggaacagaatctggagcgtgtgctgccacagcctccaaagtcctctgaggtttggagggatgagcccgcagtcgccaccggcgcagcctcagatcccgctccgccaggtcggcctcaggagatgggcccaaagctgcaggcacgcgaaactccatccttacccacccccattccgctgcagccaaaggaagaacctaaggaagcaccagcacccgagcctcagcctggttctcaagcccaaaccagcagcctgcccccaactagagatccagccaggctggtcgcctgggtcctgcatcggttggaaatggctctcccacagcctgttctccacggaaagattggagagcaggagccggacagtcctggaatttgcgatgtccaaaccagggtgatgggagctgggggtctctag

SEQ ID NO: 219587 - DNA, 2430 bp, synthetic construct
  misc_feature 1..2430: note = Description of Artificial Sequence: Synthetic coding sequence
  source 1..2430: mol_type = other DNA
atgttcaagtctcttaccaaagtgaacaaagtgaagccaattggggagaacaacgagaacgagcaatctagcagacggaatgaggaaggaagccacccctcaaaccagagccagcagacaacagcccaggaggaaaacaaaggtgaggaaaagagtctgaaaactaaatcaactccagtgacctcagaggaaccgcatactaatattcaggacaagttgtccaagaaaaattccagcggcgacctgaccactaatcctgacccacagaacgcagccgagcctacaggtaccgtgcccgaacagaaagaaatggaccctggcaaggaaggacccaatagtccgcagaataagcctcctgctgcccctgtcatcaatgagtatgctgatgcccagctgcataatttggttaagcgcatgcggcagcggaccgccctctacaagaaaaaacttgtggagggggatttatcgagcccagaagctagcccacagacagctaagcccaccgccgtgccacctgtgaaggaatcagatgacaagcctacagaacattactatagacttctgtggtttaaagtgaaaaagatgcctctgacagagtatctgaagcgtatcaaactgccaaattccattgattcctacactgatcggctgtaccttctttggctgctgctggtgactctagcatacaattggaactgctgttttatcccattacggctcgtttttccctatcagaccgcggacaacatacattactggctgatcgccgatataatctgcgacataatctatttgtatgacatgttgttcattcagcctcggctccagtttgtacggggtggggacattatcgtggattccaatgaactgagaaaacattaccgcacctctaccaaattccagctggatgtcgcatctataatccccttcgacatctgctacctgttcttcggcttcaatccaatgtttcgcgcaaatcgtatgctcaagtacacatctttctttgaattcaatcatcatctcgagtcgatcatggacaaggcctatatctacagggtaataaggaccactggttatctgctctttatcctgcatattaacgcctgcgtgtactactgggcctcaaactacgaaggaattggaacgacacgatgggtgtacgacggcgaggggaacgagtacctacgatgctattactgggcagtgagaacgctgatcaccatagggggactgccagagccccagaccttgttcgagattgtattccagcttctcaactttttctcaggagtatttgtcttctcctcattgattggccagatgcgggatgttattggggcagcgaccgctaatcagaattatttcagagcatgtatggatgacacaattgcctacatgaataactattccatccctaaattagtacagaaacgggtgagaacttggtatgagtatacctgggactcccaacggatgttggatgagagcgatctgctcaagacgttaccaaccactgtgcagttagcactggcgatcgacgtcaatttctctattataagcaaagtggatctcttcaaaggatgtgatacccagatgatttatgatatgttattaagacttaagagcgtcctgtatcttcctggcgatttcgtttgcaagaagggtgagatcggtaaggagatgtacattatcaagcatggtgaagttcaggtcctaggcggacctgatggaactaaagtactagtgacactgaaggctgggagcgtttttggcgagatttcacttttggccgctggaggtggtaatcgtaggaccgccaatgtggtcgcacatggtttcgcaaatcttctgacattggacaaaaagaccttgcaggaaatcttagttcactaccctgactccgagaggattcttatgaaaaaggcccgtgttctcctcaagcagaaggccaagacagctgaggctacacctcccaggaaggatttggccttgctgtttccacctaaggaagaaacccccaagctttttaaaactcttctcggcggtaccggcaaggccagtctggcgagactgctgaagcttaaaagagaacaggctgctcagaaaaaggaaaactccgaaggcggtgaagaagaaggcaaagaaaatgaagacaaacagaaggagaatgaggataagcagaaagaaaacgaggacaaaggcaaagaaaatgaagacaaagacaagggtcgcgagccagaagagaagccattggacagaccagagtgcactgcatctccgatcgccgttgaagaagaacctcacagcgtacggcgtaccgtccttcccagagggacctccagacagtccctgatcatttctatggcaccttccgccgagggtggggaggaagtcctaactattgaagtgaaggagaaggcaaagcagtag

SEQ ID NO: 219588 - DNA, 4188 bp, synthetic construct
  misc_feature 1..4188: note = Description of Artificial Sequence: Synthetic coding sequence
  source 1..4188: mol_type = other DNA
atgctgttaccactgcccccacagagctccaagccagtgcctaagaaatctcaatcgtccaaaatcgtgccatcccaccacgaccccagcgagaaaaccggcgagaactgccagaccaagatttcacccagtagcctgcaggaatccccatccagtctccaaggggcactgaagaaacggagcgcttttgaggatctgaccaacgcatctcagtgccagccagtgcaaccgaagaaggaagcaaacaaagagttcgtgaaggtagtgtctaagaagatcaaccggaatactcatgccttggggttggcgaaaaagaacaaaagaaacctaaaatggcataagttggaggttactcctgtcgtggcatccacgaccgttgtccccaatattatggagaaacccttaattctagacatcagcaccacatccaagacgccaaatacagaggaggcgtcgttgtttcgcaaacctttggtgcttaaagaggagccgacaattgaagatgaaaccctaataaataaatccctctccttgaagaaatgctctaaccatgaggaggtctctcttctcgagaagctccagccactccaggaagagagcgactccgatgatgcattcgtcatcgagccaatgacgttcaaaaagactcataagacagaagaggcagccattaccaagaagacactgagcttgaaaaagaaaatgtgcgcctcccagcgcaagcagtcttgccaggaagagagtttggctgtgcaggacgtcaatatggaggaagactctttcttcatggaaagtatgagttttaagaaaaaaccgaagactgaagagtccatcccaacccacaaactgtcttctttgaaaaagaagtgcactatttacggaaagatatgccactttaggaagcctcctgtcttgcaaaccacaatatgtggagccatgagtagtatcaaaaagcccaccaccgaaaaggaaacgctgtttcaagaactgtctgtgttgcaggagaagcataccaccgaacacgagatgagcatcctgaaaaagtccctagctctgcaaaagacaaatttcaaggaggattctctggtcaaggagtccctggcttttaagaagaaaccatctactgaagaagccatcatgatgcctgtgattttgaaggagcaatgcatgactgaaggaaaaagaagcagacttaagcccctggtgctgcaggagattaccagtggtgaaaagtcactcatcatgaaacctcttagcatcaaggagaagccttctactgagaaggagtcattctcacaggagccatccgccctgcagaagaaacacaccacccaagaggaagtgtccattctgaaggaaccctcaagcttgttgaagtccccaacagaagagtcaccgtttgacgaggcccttgcctttaccaaaaaatgcaccattgaggaggccccacccactaagaaaccattgatcctaaaacgtaagcatgccacacagggcactatgagtcacctgaagaaaccactgatcctccaaacaacaagtggtgaaaagtctctgattaaagaaccattaccctttaaggaggagaaggtcagtctgaagaagaagtgcacgacccaggagatgatgtccatatgtcctgagttgctggactttcaggacatgattggggaggacaaaaactctttctttatggaaccaatgtctttccggaagaacccaaccactgaagaaacagtcctcaccaagacaagcctctccctccaggagaagaagatcacgcagggcaagatgtcccacctgaaaaagcccctggtgctgcagaaaattacatccgaggaggagagcttctacaagaagctgctgccgttcaagatgaagtctaccaccgaagaaaaattcttgtcgcaagagccatctgccttaaaggagaaacacaccactctccaagaagtgtctctctctaaggagtcattggcgatccaagagaaggctacgacagaagaggagttctcacaagagctgttttcactgcacgtgaaacacactaataaatcggggagcttgtttcaggaggctctggtgctgcaggagaaaaccgacgccgaggaagactccctgaaaaatctcctggctctccaggaaaaatctactatggaagaggagtcactgatcaacaagttgctcgccttgaaagaggaattatccgcagaagccgcaacgaacatccagactcagcttagcctgaaaaagaagtctacctcccatggtaaagtgtttttcctaaagaaacagcttgccctgaacgagaccattaacgaagaggagttcctaaataaacaaccactggccctggagggctaccccagcattgccgagggggagacgctgttcaaaaagctgctggccatgcaggaggaaccatctatcgaaaaggaggcagttcttaaagagccgacaatcgacaccgaagctcactttaaggaacccctcgccctgcaagaggagccaagtacagagaaggaggcagtcctgaaagagccatcggtcgataccgaggctcactttaaggaaaccctcgcattgcaggaaaagccgagcatcgagcaggaggcactcttcaaacgccatagcgccctgtgggaaaaaccttctacagaaaaagagacaatttttaaggagtcactggacctgcaggagaaacccagtatcaaaaaagaaactctcctgaagaagccccttgccctgaagatgagcaccattaatgaggcagtgctatttgaggatatgatcgcactcaacgaaaagccaacaacaggcaaagagttgtccttcaaagagccccttgcgttacaggaatcgccaacctataaggaggacacctttttgaaaacactgctggtaccccaggttggcacttcgcctaacgtttccagcaccgcacccgaaagtataacctcgaaaagcagcatagccacaatgacctctgtcggtaaaagcggaacaataaacgaagcctttctctttgaagatatgataaccctcaacgagaagccgactacggggaaggagctgtcattcaaagaacccctagcccttcaggagagtccaacttgcaaggaggacacgttcctggaaaccttcctgattcctcagatcgggacctccccatatgtcttcagcactacacctgagtccataaccgagaagtcaagcatcgccacaatgacatctgtgggcaagtctcgaacaaccactgagagtagcgcctgcgaaagcgcctccgacaaaccagttagcccacaggccaagggaactcccaaagagattacccctcgggaggatattgacgaagattcttcagacccatcatttaatcccatgtacgcgaaagaaattttttcctacatgaaggaaagagaggagcagttcattctgaccgactatatgaatagacagatagaaattacatcggacatgagagccatcttggtcgattggttagtcgaggtacaggtttcttttgagatgacgcacgaaacgctctatcttgctgtcaagctcgtggatttgtacctgatgaaggccgtctgtaaaaaggacaaactgcagctactcggagccaccgctttcatgatcgctgcaaaatttgaagagcacaactcccccagagtagatgattttgtctacatctgtgacgacaactatcaaaggagcgaggttcttagcatggaaattaacatcctaaacgttctgaagtgcgacattaacatccccattgcttatcattttcttcgaagatacgctagatgcattcacacaaacatgaagaccttaacactctcacggtacatctgcgagatgacgctgcaggagtaccactatgtacaggaaaaagcttcaaaattagcagccgcatccctgcttctggctctttatatgaaaaagctgggctactgggtgccctttctggagcactacagcggctacagtatctctgaactgcatcctcttgttcgccagctgaataagcttctgactttcagctcatacgatagcttgaaggccgtttactacaaatatagccacccggtgttctttgaagtggcaaagattccagctctcgacatgctaaagcttgaagagattctgaattgcgattgcgaagctcagggcctcgtgctttag

SEQ ID NO: 219589 - DNA, 876 bp, synthetic construct
  misc_feature 1..876: note = Description of Artificial Sequence: Synthetic coding sequence
  source 1..876: mol_type = other DNA
atgctgttgcccctgccacctcaatcttcaaagccagttcctaagaaatcgcaaagtagcaagattgtcccttcacatcatgacccatctgagaagaccggagagaattgtcagactaagatctctcccagcagtctccaggagtctccatcttctctgcagggggcactcaagaagcggagcgccttcgaggacctcactaacgtttcctttgaaatgacacatgagactctatacctcgccgtgaagttggtagatctgtacctgatgaaagccgtgtgcaaaaaggataaactccagctgctgggtgcgacagctttcatgatcgctgccaagttcgaggaacacaactctcctagagtggatgactttgtgtacatttgcgatgataactatcagcggagcgaggtgcttagtatggagatcaatatcctcaacgtgcttaagtgcgacatcaacattccaattgcataccactttctcaggaggtacgcacgctgtatccatacaaacatgaagactcttactctttctcgatacatttgcgagatgaccttgcaggaataccactatgtacaggaaaaggcctcaaaactagctgccgcttctttactgttggcgctgtatatgaaaaaactgggctattgggtcccattcttggagcactattccgggtatagcatctccgagctgcaccctttagtaaggcaactaaataaattactgaccttcagttcttatgactcacttaaagctgtatactacaagtacagtcaccctgtgtttttcgaagttgcgaagatccctgcactcgacatgctgaaacttgaggagatactcaactgcgactgcgaggcccaaggactagttctatag

SEQ ID NO: 219590 - DNA, 876 bp, synthetic construct
  misc_feature 1..876: note = Description of Artificial Sequence: Synthetic coding sequence
  source 1..876: mol_type = other DNA
atgttgttgcccttaccccctcagagcagtaagcctgtccccaaaaaatctcaaagtagcaaaatcgtgccaagccaccacgacccctccgaaaaaacaggagaaaactgtcagactaagatcagcccttccagcttgcaggagtccccatcatcgctgcagggcgctctgaaaaaaagaagcgctttcgaggacctgacaaatgtgagtttcgagatgacccatgaaacactgtatctggcggtaaaactagtggatctatacctgatgaaagctgtttgtaagaaagataaactgcagctacttggagccacagcgttcatgatcgcagccaagttcgaggaacacaactcccctcgggtcgacgacttcgtgtacatttgtgacgataactaccagcgctctgaggtgttatctatggagataaacattctgaatgtcctgaaatgtgacataaacattcccattgcttaccatttcctgcggaggtacgccagatgcatccacacaaacatgaagacactgaccttgtcacgttatatttgtgagatgactcttcaagaataccactatgtgcaggaaaaagcatccaaactggcggcagccagcctcctgctggccctctatatgaagaaactggggtactgggtgcctttcctggagcattacagcgggtattccattagcgagctccatcctttggtgcggcaattaaataagctgttaaccttctcttcctatgattccttgaaggccgtgtattataagtatagtcatcccgtcttctttgaggtggcaaagattcctgctctggatatgctgaagctggaagagattctcaattgtgattgcgaggcccaggggctggttctgtag

SEQ ID NO: 219591 - DNA, 4188 bp, synthetic construct
  misc_feature 1..4188: note = Description of Artificial Sequence: Synthetic coding sequence
  source 1..4188: mol_type = other DNA
atgctcttgccgctcccccctcagtcctcaaaacctgtgcctaagaagtcacagtctagcaagatcgtgccttcacaccacgatcctagcgagaagacaggagaaaactgtcagaccaagataagcccaagctcactgcaggaaagccccagctcactgcagggcgctttgaaaaaaaggtcggctttcgaggacctgactaacgcctcgcagtgccaaccagtccagcctaaaaaggaagccaataaggagtttgttaaggttgtcagcaagaagatcaaccgaaatactcacgccctcggcctcgccaaaaaaaacaaacggaacctcaaatggcacaaacttgaggtgacgccggtcgtggcttctaccacggtggtcccaaacattatggagaagccactcattctagatattagcactaccagcaagacaccaaatactgaggaagctagcttattcaggaagccgctcgtgctgaaggaggagcctacaattgaagatgaaactttgataaataagtcgctgagtttgaagaagtgctcaaatcacgaagaggtgtctctcttggaaaaacttcagccactccaggaggagtctgatagtgatgacgcatttgtgatcgagccaatgactttcaaaaaaacacataagactgaagaggccgcaatcacgaaaaaaactctcagcctgaaaaaaaagatgtgcgcgagtcagcggaaacagagctgccaggaagaaagcctggcagtgcaagatgtgaatatggaggaggattccttcttcatggaatcgatgagctttaagaaaaaaccgaagacagaggaatcaatcccaacccacaagctttcttcactgaaaaagaaatgcacaatatatggaaaaatctgtcactttcgtaagccccctgtgttacagactacaatttgtggagcaatgtctagcataaagaagcctaccaccgagaaagaaacacttttccaggaactttcggtgctccaagagaagcatactaccgagcacgagatgtctatcttgaaaaagagtctcgctctccagaagactaattttaaagaggactcccttgtcaaggaaagtctggctttcaagaagaagccatccacggaagaggctatcatgatgcctgtcatcttgaaagagcagtgtatgaccgagggaaagcggagccggctgaagccactggtattgcaggaaatcacttctggcgagaaaagcctgataatgaagcccctatctattaaggaaaaaccaagcaccgaaaaagaatcctttagccaggaacctagtgcactgcagaaaaaacataccacccaagaagaagtgagtatcctcaaagaaccctcctctctgctgaaatcaccaacagaggagtcacccttcgacgaagccttggcattcaccaagaaatgcacgatcgaggaagccccaccaacgaaaaaaccattaatcctgaagcggaaacacgccacacaggggactatgtcccatctcaagaaaccactgattcttcaaactactagcggcgaaaaaagcctaattaaggagccgctccctttcaaagaggagaaggtatctttgaagaagaaatgcaccacacaggagatgatgagtatctgccccgagctcctagattttcaagacatgattggagaggacaagaactccttctttatggaacccatgtctttcaggaagaatcccacaactgaagaaacagttttgactaagacttccctctcactgcaagagaagaaaatcacacagggaaaaatgagccatctgaagaaacctcttgtgctgcagaagataaccagcgaggaagaatccttctataaaaaactgttgccgtttaaaatgaaaagtacaactgaagagaaattcctgtcccaggaacccagtgccctgaaagagaaacacacaacgttgcaggaggtgtcactgagcaaggagtctctggctatccaggaaaaggccacgacagaggaagaattttctcaggagctgttcagcctgcacgtcaagcacactaacaagagtggaagcctgttccaggaagccctagtgttgcaggagaaaaccgatgcagaggaggactccctcaaaaacctgctggctttgcaggaaaagagcaccatggaagaagagtccctcatcaataagctcttggctttaaaggaagaattgagcgccgaggccgctaccaatatccagactcagctaagcctcaaaaaaaaaagtaccagtcatggtaaagtattcttcctcaagaagcagcttgcgttaaatgaaacgatcaacgaggaagaatttctgaataagcagcccctagccctcgaaggctacccttcgatcgctgagggcgagacattatttaaaaagctgttggccatgcaggaggaaccttcaatcgagaaggaggcagttctaaaggaacccactatcgatacggaagctcacttcaaggagcccctagctttacaggaagagccctcaactgagaaagaggcagtgctgaaagaaccgagtgttgataccgaagcccacttcaaagagaccttggcactccaggagaagccaagcatcgaacaggaggcgctctttaagaggcacagtgccctgtgggaaaaacctagcacggagaaggagacaatatttaaggaatcgttagatctgcaagagaaaccatctatcaagaaagagaccctgttgaaaaagccgctcgctctcaaaatgtccacgattaatgaggcggtgctctttgaggacatgatagctcttaacgagaaaccaacaacgggcaaagaactctctttcaaggaaccactggcccttcaggaaagccctacctataaggaagataccttcctcaaaacactgctcgttccacaagtgggaacctcccccaacgtgagctctaccgcccctgagtccatcacctccaagagttctattgctaccatgacaagcgttggaaagagcggaaccatcaacgaagcttttctattcgaagatatgatcacacttaacgaaaagcctacaactgggaaggagttgagtttcaaagaaccattagccttgcaagagtcgccaacgtgtaaagaggacacttttcttgagacatttcttattccacagatagggacttccccttacgtattttccaccactcctgagtcaataacagagaagtctagcatcgctaccatgacatccgtgggaaaaagccgcacgactaccgaatcatcagcctgtgagtcagctagtgacaagcccgtttcgcctcaggctaagggtactcccaaggagataactcccagggaggacattgatgaggacagtagtgatccttccttcaatccaatgtacgcaaaggagatatttagttatatgaaggagagggaggaacagttcatcttaacagattatatgaataggcagatcgagatcacaagcgacatgagagctatcctcgttgactggcttgttgaagtgcaggtgtctttcgagatgacacatgagacgttgtacctcgctgtgaagctggttgatctctatctgatgaaggccgtgtgcaagaaagataagctgcaactcctcggagccacagcctttatgattgctgcaaagttcgaagaacacaacagcccaagagttgatgatttcgtgtatatctgcgacgataattatcagaggtcagaggtgctctctatggagatcaacattttgaatgtgctcaaatgtgatattaacatcccgatagcataccactttttacggaggtacgctcgatgtatacataccaacatgaaaaccctcactctctcccgttacatctgcgagatgacgcttcaggagtatcattacgtgcaagaaaaagctagcaaattagcagccgcttctctgctgctggctctgtatatgaagaagctcggctactgggtccctttcctagagcactactctggctacagcatcagcgagttgcatcctctggtgaggcagttgaacaagctgcttacatttagctcctacgactcactgaaggctgtgtattacaaatactcacaccctgtattttttgaagtcgcaaagatcccagccttggacatgcttaaacttgaggagattctcaattgcgattgtgaggcgcagggcctggtgctgtag

SEQ ID NO: 219592 - DNA, 336 bp, synthetic construct
  misc_feature 1..336: note = Description of Artificial Sequence: Synthetic coding sequence
  source 1..336: mol_type = other DNA
atgttactccccctccccccacagagctcaaaacctgtgcccaaaaagtctcagagctccaagatcgtgcctagccaccatgacccaagcgagaaaactggtgaaaactgccagactaagatttcaccttcgagcctgcaggagtctccctcctccctgcaaggtgctcttaagaaacgcagcgcttttgaggatcttaccaacgcaagtcagtgtcagccagtgcagccaaaaaaagaggccaataaggaatttgtcaaggtggtgtcaaaaaagattaaccgaaatacacacgcgctgggacttgccaagaagaataaacgcaaccttaagtag

SEQ ID NO: 219593 - DNA, 1083 bp, synthetic construct
  misc_feature 1..1083: note = Description of Artificial Sequence: Synthetic coding sequence
  source 1..1083: mol_type = other DNA
atggctagcgcgactgcccctgctgcagcagtacccacactggctagccctctggagcagcttcgtcatttagctgaggaactccgccttctactgcctcgagtgcgcgtaggtgaggcacaagagaccaccgaggaatttaacagagagatgttttggcgtcggctaaatgaggctgcggtgactgtaagccgggaagctaccacacttaccatagtattcagtcaactcccactgccatcacctcaggagacccaaaaattctgtgaacaggtgcacgccgctatcaaagccttcatcgcggtctactacttgttgcctaaagatcagggaattaccctgaggaagcttgtccggggagccacactggatattgtggacggcatggcccagctgatggaagttctaagcgtgacgcccactcagagccccgaaaacaacgacctgatctcttacaatagtgtgtgggtggcctgtcagcagatgccccagatccccagggacaataaagcagctgctctactaatgttaacaaagaacgttgacttcgtcaaggatgcccacgaggaaatggagcaggccgtggaagaatgcgacccctacagcggcttactgaacgacaccgaggaaaacaactctgataatcacaaccatgaagacgacgttctggggttcccgtctaaccaagatctctattggagtgaagacgaccaggagctcatcataccttgccttgccttggtgcgtgcaagtaaagcttgcctgaagaagatccggatgcttgtggcagaaaatggcaagaaagaccaggtcgcacaactagatgacatcgtcgatataagcgacgagattagtccatctgtggacgacctggctcttagcatttaccccccaatgtgccacctgaccgtgagaatcaacagcgctaagctggttagtgtcctgaagaaggccctggagataactaaggcatcacatgtcactcctcaaccagaggattcgtggattccacttctgattaacgctattgaccactgtatgaaccgcattaaggagctgacacaatccgagctggaattgtag

SEQ ID NO: 219594 - DNA, 600 bp, synthetic construct
  misc_feature 1..600: note = Description of Artificial Sequence: Synthetic coding sequence
  source 1..600: mol_type = other DNA
atgccccagatccccagggacaacaaggctgccgcactgctcatgttaaccaaaaacgtcgacttcgtgaaggacgctcatgaagaaatggagcaagccgtggaagagtgtgacccctattcgggtctgctcaatgatactgaagagaacaacagcgacaatcataaccatgaagatgacgtgcttgggttcccatccaaccaagatctttattggtctgaagatgatcaggagcttataattccttgcctcgccctggtgagggcctcaaaagcctgcctgaagaagattagaatgcttgtggccgagaatggaaaaaaggaccaggttgcacagctggatgatatcgtggatatttccgacgagatcagcccctcagttgatgatctggccctgtccatctacccacctatgtgccacctcacagtccggatcaacagcgcaaaactggtcagcgtgcttaaaaaggcactcgagatcaccaaagcgtcacatgtgaccccacaaccagaagattcttggattcctctgctgatcaatgctattgaccattgtatgaaccgcatcaaagagcttactcagagtgaattggaattgtag

SEQ ID NO: 219595 - DNA, 699 bp, synthetic construct
  misc_feature 1..699: note = Description of Artificial Sequence: Synthetic coding sequence
  source 1..699: mol_type = other DNA
atggcccagctgatggaggttcttagtgtgacgccaacgcagagccctgagaacaatgacctaatctcctataattcagtgtgggtggcttgccaacagatgccccagattccacgcgataataaagctgcagccctgctcatgcttacaaagaacgttgactttgtgaaggacgcccacgaggagatggagcaggccgtcgaagagtgcgacccgtacagcggcctactgaacgatacagaggagaataattccgacaatcacaaccacgaggatgacgtgcttggcttcccatctaaccaagatttgtactggagtgaggatgatcaggagctgattattccctgcttggccctggtgcgggcttctaaagcctgtctgaagaaaattcgcatgctagtagccgaaaatggcaagaaagatcaagtggcacagctcgacgatattgtggatattagtgatgagatctcgcccagcgtggacgatctggcactctccatttaccccccaatgtgtcacctcacagttcggataaactctgctaaactggttagtgtgctgaagaaggctctggagatcaccaaagcctctcatgtgacgcctcagcccgaagacagttggattcccctcctcatcaacgcaatagatcactgtatgaacaggatcaaggaactcacgcagtcagaactggaactgtag

SEQ ID NO: 219596 - DNA, 3936 bp, synthetic construct
  misc_feature 1..3936: note = Description of Artificial Sequence: Synthetic coding sequence
  source 1..3936: mol_type = other DNA
atgtctctgctgcagagcgcgctagacttcctagcaggaccgggttcccttggcggagcgtctggaagagatcagtccgatttcgtaggccagactgtggagctgggggaactcaggttgagagtccggagggtgctcgccgagggtggcttcgcattcgtctatgaagctcaggacgtgggtagtggaagagagtacgccctgaagcgcctgttaagcaatgaagaggagaagaacagggctataatccaagaggtatgtttcatgaaaaagttatctggacacccaaatattgtgcagttctgttcggccgcttcaattggcaaagaagagagtgatactggccaggcagagttcttactcctcactgagttgtgcaagggccagctggtagagttcctgaagaagatggaatctcgaggtcccctgtcgtgcgacacggtcctcaagatcttttatcagacctgccgggcagtccagcatatgcacagacagaagccccctatcattcaccgtgacctgaaggttgagaatctgttgctctctaatcagggaacgatcaaactgtgcgacttcggttcagcaactacaatatcccattatcccgactattcttggagcgcccagcggagagcgcttgtcgaagaagagatcactagaaataccaccccaatgtatcgaacccctgagattattgacctttattccaatttccccataggtgaaaagcaggacatatgggcactggggtgcattttatacttattatgcttccggcagcatcctttcgaagacggtgctaaattgaggatcgtcaacggtaagtattccattcctccgcatgacacccagtacaccgtgtttcactcattaatccgcgctatgctccaggtcaacccggaggagaggctctccatcgctgaagttgtgcatcaactccaggagatcgccgcagcgagaaatgtgaacccaaaatcaccaattacagagctcctggagcaaaacggcggatacggctccgccacactttctcgtggcccaccgcctccggtcggccctgctgggtcaggctacagtggaggactggcattagcagaatatgatcaaccctacggaggattcctggacatactgcggggaggaacagaacggctcttcaccaacctcaaagatacgagctctaaagttatccagagcgtagctaattacgccaaaggggatctcgacatctcctacattacttcacgaattgcggtgatgagtttcccggctgaaggagtggaaagtgccctgaagaataatattgaggatgtccgactttttctcgatagcaaacacccaggtcattatgcagtgtacaatctgagccctcggacttatcggccttctaggtttcataaccgcgtttccgagtgcgggtgggcggcacggagagcaccgcacttacacacgctatataacatttgtcggaacatgcacgcctggttgcggcaagaccataagaatgtgtgcgttgtgcactgtatggatggtagggctgcctccgcagtggctgtctgttctttcctctgcttctgtcgtctgttcagtacagctgaggccgctgtgtacatgttttcgatgaagcgctgtccccctggcatctggccgtcccataagaggtatatcgaatacatgtgcgacatggttgcagaagagcctatcacgccccactccaagcccatcttggtgcgtgcggtcgtgatgacgcccgtgcccctcttttccaaacagcggtcgggctgtcgccctttttgcgaagtttacgtgggtgacgagcgggtggccagcacctcacaagaatacgataagatgcgggacttcaaaatagaggatggcaaggcggtgatacccctgggcgtgaccgtccaaggggatgtgctcatagtgatttatcatgccaggagcacattagggggacgactacaggccaagatggctagtatgaagatgtttcagatacagtttcataccggcttcgtccctcgcaacgctaccaccgtgaagtttgcaaagtacgaccttgacgcatgcgatatacaggaaaagtaccctgaccttttccaggtgaacctggaagtggaggtggaacctcgagacagaccaagcagagaggcaccaccatgggagaatagctcaatgcggggacttaaccccaaaatcctgttcagcagccgggaggaacagcaggatatattgagcaaatttggcaagcccgagttacctcgacagcctggctctactgctcaatatgatgctggcgctggctcacctgaagccgagcccacagacagtgactctcccccatcctcgtccgctgacgctagtaggttcctgcatacactggactggcaagaagagaaggaggccgaaacaggcgctgagaatgcctccagtaaagagtctgaaagtgccctcatggaggaccgagacgagagtgaggtgagcgacgaaggtggaagccctatctcaagcgaaggccaagaacccagggcagatcccgagcccccaggattggccgctggcctcgtacagcaagatctggtttttgaggtggagacacccgctgttttgccagaacctgtgccccaggaagatggcgtggatctgttgggtctccactccgaggtcggggctgggccagctgtccctcctcaggcttgtaaagctccatcttcaaacactgatcttctgtcatgtctgctcggccctcccgaggccgcatctcagggacccccagaggatctgctctccgaagatcccctgctgctggcgtcaccagcacccccactgtccgttcagagcacccccaggggagggccaccagccgctgccgaccccttcggccctctgctaccaagcagtggcaataactcccaaccctgctccaatcccgatctgtttggtgaatttctgaatagcgattccgtgaccgtacctccatcattcccttcagcacactctgcacccccaccatcttgtagtgctgattttctgcatcttggggacctgcccggtgagccttcaaagatgacagcaagttccagcaatccagatcttctcggaggatgggctgcttggactgaaaccgctgcttcagcagtagctccaacccccgcaacagagggacctttattctcccccggagggcaacctgctccctgcggctctcaggcctcttggacgaaatctcagaatccagatccttttgcggatctaggagacctcagctccggactccagggatctccagccggatttccgccaggcggattcatacccaagaccgccacaacccctaaggggtcctcatcctggcagacctcacgccctcctgcccagggtgccagttggccacctcaagctaagccacccccaaaggcttgtactcaacctaggccaaactacgcttcaaacttttcggtgatcggagccagagaagaaagaggcgtccgcgctccatcgtttgcacagaaaccaaaggtgtccgaaaacgacttcgaggatctgcttagcaaccaaggtttttcctcaagatccgacaagaaaggccctaaaacaattgcagagatgcgaaaacaggatttggccaaagacactgaccctttaaaactgaagttgctcgactggatagaagggaaggagcgaaatatacgtgcactcctgagcacacttcacactgtactttgggacggagagagccggtggactcctgtcgggatggccgatctggtggccccagagcaggtgaaaaagcattacaggagggcagtactggccgtccatcccgataaggccgctggtcagccctacgagcagcacgcaaagatgatatttatggaattgaacgatgcctggtcagagttcgaaaaccaaggctccaggccgcttttttag

SEQ ID NO: 219597 - DNA, 1764 bp, synthetic construct
  misc_feature 1..1764: note = Description of Artificial Sequence: Synthetic coding sequence
  source 1..1764: mol_type = other DNA
atgtcactgctgcagtctgcgttggactttctggctgggccaggctccctaggtggggcatcagggagagaccagtccgactttgtcggccaaacagtggagctgggtgagcttcgactgagagtcagacgggttttggccgaaggcggattcgcattcgtctacgaggcacaagacgtcggcagtgggcgagagtacgcactcaagcggctcctgagtaatgaggaagagaagaatcgcgcaattattcaggaggtgtgctttatgaaaaaactgagtggccacccgaacattgttcagttctgctccgcagcctctatcgggaaggaggagagcgacacgggccaagccgaattcttgctcctcacagagccaccagggcttgccgcaggtctggtccagcaagacctggtatttgaggtggaaacccctgcagtgcttccagaacccgtgccccaggaagacggggtggacctcttagggcttcacagcgaagtgggcgcagggcctgcggtcccaccccaggcctgtaaggcccctagttccaacacagacctcctgtcctgccttctcgggccacctgaggctgcttcgcagggtccacccgaagacctactctctgaggaccctctattactcgcatcccccgcaccccctcttagcgtccagagcacccccagaggcggtccaccagccgctgcagatccattcggccctctgctgccatcctctggaaacaattcccagccttgctcaaaccccgacctctttggggagttcctgaactccgactcggtgactgttcctccgagcttcccatccgcacactcggctcctccgccttcctgctccgcggacttcctccatctgggagatctgccaggggagccttccaagatgactgcatccagctcaaatcctgacctcttaggaggatgggccgcatggaccgagaccgctgcttccgcggtggcgccaactccagcaacggaagggccacttttttcccctggcggacaaccagccccttgtgggtctcaggcatcatggacaaaatcacaaaatccggatccctttgctgacctcggcgacctgagctctgggctgcaggggtcccctgcgggttttcctcccggtggttttatacccaagaccgccactaccccaaagggcagctcctcatggcaaaccagtaggcccccagcccaaggagcatcctggcccccacaggccaaaccacctccaaaagcgtgcacccagccaagacctaactatgccagcaatttctctgtgattggggcacgtgaagagcgtggagtacgcgcaccatctttcgcacagaaacctaaggtctcagagaacgattttgaggacctcctgagcaaccagggcttctctagtcggtctgataaaaagggacccaagacaatcgccgaaatgagaaagcaggatttagctaaagacactgacccacttaaactgaaactgctcgattggatcgaaggaaaggagaggaacattagggcgttactttctacgcttcacacagtactctgggatggcgagtctagatggacccccgtcggtatggcagatctcgttgcaccagagcaggttaaaaagcactatcggcgagctgtgctggctgtgcacccagacaaggccgctggtcaaccttatgagcaacacgccaaaatgatcttcatggaactgaatgatgcttggtctgagtttgagaaccagggctctagacccttattttag

SEQ ID NO: 219598 - DNA, 2238 bp, synthetic construct
  misc_feature 1..2238: note = Description of Artificial Sequence: Synthetic coding sequence
  source 1..2238: mol_type = other DNA
atgcccttcccggtgactacccaaggttctcagcagacccagccaccccagaaacattacggcatcactagtccaatatccctcgctgccccaaaagagacggactgtgtcctcacacagaagctcattgaaacccttaaacctttcggagtctttgaggaggaagaggagctgcagagacgcatcctcattctgggtaaactgaataatctggtgaaagagtggattcgggaaatctctgagtcaaaaaacctgccacagtcagtcatcgaaaatgtcggtggtaaaattttcacctttggttcttacaggctcggagtgcatacgaagggtgcggatattgacgcgctgtgcgtggcacctagacatgtggatcgcagtgacttctttacctctttctatgacaaacttaagctgcaggaagaggttaaggacctgagggcggtggaagaggcctttgtccccgtcattaagctctgcttcgacggtattgagattgatatattgttcgcaagattggccctgcagacgatacccgaggacctggatctgcgcgatgatagcttgctcaaaaaccttgatataaggtgcatcaggtcactgaatggctgccgggtgacagatgaaatactccacttggttcccaacatcgataactttcgtctgacactgcgggctattaaattatgggcaaagcgccacaatatttatagtaacattcttggattcctgggaggtgtgagctgggccatgctggtcgccagaacctgccagttgtaccccaatgcaatcgcgtccactctcgtccacaagttctttctcgtatttagtaagtgggagtggcctaatccagtactgctgaaacagcctgaggaatgcaacctgaatctcccggtctgggatcccagggtcaatcccagcgaccggtaccatctgatgccaattattacacctgcctaccctcagcagaattccacttacaacgtgtctgtctccactaggatggtgatggtggaagagtttaaacagggtttagccatcacagatgaaatactcttaagcaaagcggagtggtccaaactcttcgaagctcctaactttttccagaagtacaaacactacatcgtgttgctcgccagcgcgccaaccgagaagcagaggcttgagtgggtgggcctcgtagagtccaagatccgtatcctggtcggaagcctggaaaagaacgagttcatcacactagcccatgttaaccctcagtccttccccgctcccaaggaaaaccccgacaaggaggagtttaggaccatgtgggttatcggtttggtttttaaaaaaaccgaaaactcagagaacttgtctgtcgatctgacctatgatattcagagctttaccgacactgtgtaccgccaggccatcaactcaaagatgttcgaagtggacatgaaaattgccgcaatgcacgtcaagcgaaaacagctccatcaactgctgcctaatcatgtgctccaaaagaaaaagaagcattccactgaaggagtgaaattaacggctctgaatgattcttcattggacttgtccatggatagtgataatagcatgtctgtgccttcgcctacatccgccacaaagactagccctttgaatagctctgggtcaagccaggggagaaactcacctgcccctgcggttactgccgcaagcgtcaccaatatccaggccactgaagtctcagtgcctcaggtcaatagctccgaatcctctggaggcactagtagtgagagtatacctcaaacagctacgcagcctgctatttctcctccgcctaagcctactgtttcgcgagtcgtgtctagtacgaggctcgtgaatcccccaccccgttcctctggaaatgccgctaccagtggcaacgctgcgaccaagatcccaactcctatcgtgggagtcaaacggacaagtagtccgcataaggaggagagtcccaagaaaacaaagaccgaggaggatgagaccagcgaggacgccaactgtcttgctttaagcggtcatgacaaaactgaagcaaaggaacagctggacaccgagacatccacgacccagagcgagaccattcagacagctgcgtcactcctcgcctcccagaagacatcaagcaccgatcttagcgatattccggcactgcccgcaaatcctatccccgtcattaagaactcaattaagctccgcctcaacaggtag

SEQ ID NO: 219599 - DNA, 1080 bp, synthetic construct
  misc_feature 1..1080: note = Description of Artificial Sequence: Synthetic coding sequence
  source 1..1080: mol_type = other DNA
atgaaagaaaataaagagaacagctctccatcggtgactagcgcaaatctggatcacacaaaaccctgttggtactgggacaaaaaagacttagctcacacccctagccagctggaaggattggaccctgctaccgaggctagatataggcgggaaggggcacggttcatattcgatgtggggacgaggctggggttacactatgacacactggcaaccggaattatttactttcaccgtttctatatgttccactcattcaaacagttcccgcgttatgtcaccggggcttgctgtttgtttttagccggaaaggtcgaagaaactcccaagaaatgcaaagatatcattaagactgcaagatccctgctgaacgacgtgcagttcggacagtttggagatgatccaaaagaagaagtgatggtcttggaaagaattctgctgcaaaccattaagttcgacttgcaggtagagcacccctatcagtttttgctcaagtacgcaaaacagcttaagggcgacaagaataagatccagaagctggtgcagatggcctggactttcgtcaatgaccgtaccagtttgtgcaccacactgtctcttcagtgggagcccgagatcatcgcagtggccgtgatgtacctcgcgggacgcctgtgcaaattcgaaattcaagagtggactagcaagcctatgtacagacgatggtgggagcaattcgtgcaggacgttcccgtggacgtgctggaagacatctgtcaccagatcctcgacctgtactcacaagggaaacagcagatgccccaccataccccccaccagctgcagcagcccccaagcctccaaccaacgccccaagtgccacaagtccagcagtcccaaccatcccaaagtagcgaacctagccagcctcagcaaaaagatccacagcaaccagcccagcagcaacagccggcacagcagcccaaaaagcctagccctcagcctagtagtccaagacaggtgaagcgggcagttgttgtgagtccaaaagaggagaacaaagcagccggaaaagccagtttgaaacatacttggtag

SEQ ID NO: 219600 - DNA, 1743 bp, synthetic construct
  misc_feature 1..1743: note = Description of Artificial Sequence: Synthetic coding sequence
  source 1..1743: mol_type = other DNA
atgaaagagaataaggaaaattcaagtcccagtgtcacctccgcaaacctcgatcatacaaaaccctgctggtactgggataaaaaagacctagcccacacaccttctcagctcgagggacttgaccctgcaaccgaggccaggtatcgcagggagggcgcaagatttatctttgacgtgggcactagactggggctgcattacgacaccctggcaaccggtataatttattttcaccgattctacatgttccactcatttaagcaattcccgagatacgtgaccggggcttgctgcctgttcctggccggaaaggttgaggagacgccgaaaaagtgcaaggacataattaaaaccgctagaagcctcttgaacgacgttcagtttggacaatttggagacgacccaaaagaggaggtgatggtactggagcgaatcctccttcagacgatcaaattcgatttgcaggtcgaacatccctaccagttcctgctgaaatacgcgaagcaactgaagggtgataagaacaagatccaaaagttggtccagatggcttggacctttgtgaacgactccttgtgtacaaccctgtctttgcagtgggagccagagatcattgctgttgctgtcatgtatctagccggtcggctctgcaaatttgagattcaggagtggacctctaaacccatgtaccgacggtggtgggagcagtttgtccaggacgtgcccgtagatgtgctggaagatatctgccatcagatattggatctgtacagtcagggcaaacagcaaatgccacatcatacccctcatcagctgcagcagccacccagtcttcaacccacaccccaagttccacaggttcagcagtcacagcccagtcagagttcagaaccctcacagccgcaacagaaggatccccagcaaccagcacagcagcagcagcctgcacagcaaccaaagaaaccctctccccaaccttcgagtccaagacaggtgaaacgcgcagtggtagtgtcaccgaaggaggagaacaaagctgcagaaccacctccacccaaaattcctaagattgagactacccatcccccactgccacccgctcaccccccacctgatcggaagcctccccttgcggctgcccttggcgaggccgaacctcccggtccagtggatgcaacagatttgccaaaggttcagattccgcctcccgcacatcctgcccctgttcatcagcctccaccattgcctcatcgtccaccccctcctccccctagctcctatatgacagggatgtccacaacctcctcctatatgtcaggggaaggctatcagtctttacagagtatgatgaagacagaaggcccaagttatggtgccttgcccccagcctatggccctcctgcacacctgccctaccatccacacgtataccctcctaatcccccaccgcctcctgtgccccctccccctgcttcctttccacccccagctatccctcctcccacccctggataccccccaccccctccaacatacaatcccaatttcccccctccgcctccccgactcccccctacccatgcagttccaccccacccgccaccgggacttggactcccacccgcatcctaccccccacccgctgtgccacccggaggccagcctcctgtgcctcccccaatcccaccgccagggatgcccccagtgggtgggctgggcagggctgcctggatgcgctag

SEQ ID NO: 219601 - DNA, 1803 bp, synthetic construct
  misc_feature 1..1803: note = Description of Artificial Sequence: Synthetic coding sequence
  source 1..1803: mol_type = other DNA
atgaaagagaataaagagaatagttctccctcggtgactagcgccaaccttgaccacacaaaaccatgttggtattgggacaaaaaagacctagcacatacacccagccagctcgagggtctcgaccctgccacagaagcgaggtacagacgagagggggcaaggttcatctttgacgtcggcactcggcttggactgcactacgacacactggcgaccggcatcatatattttcaccgcttctacatgtttcacagttttaagcaattccctcggtacgtaactggagcctgttgtttgtttctggccggaaaagtagaggagaccccgaagaagtgcaaagatatcatcaaaaccgcgagatctctcttgaacgacgtgcagttcggacagtttggggatgaccccaaggaggaggtgatggtgcttgagcgcattctcctacagactatcaagttcgatctgcaggttgaacatccttaccagtttttgctgaagtatgccaaacagcttaagggggacaaaaacaaaatccaaaagctggtgcaaatggcttggacatttgttaacgactccctgtgcaccacgctgtctctccagtgggagcctgaaataattgcggtggccgttatgtatctggccggaagactgtgcaaattcgagatccaggagtggacctcaaagccaatgtataggaggtggtgggagcagttcgttcaggatgtcccagttgatgtgttggaggacatttgtcatcagattcttgacttgtatagtcaaggaaagcaacagatgccgcaccacacaccccatcaactgcagcagccgccatctttgcagcctaccccccaagtcccccaagtgcaacagtctcagccttcgcagtccagtgagccatcacagccccagcagaaggacccacaacagcccgctcagcagcagcagcctgcccagcagcctaaaaaacctagcccgcagccgtcaagtccacgacaggtgaagcgcgcagtcgtgtctgggctaaaacaggcactgggacgtgctggctttcctggtggtggcaacactacagtggtctcccccaaggaggagaataaggccgcagagcctccgcctccaaaaatccctaagatcgagactacgcatcctccactgccccctgcccatccccctccagaccgcaagcctccactggccgctgctctgggagaagctgaaccacccggaccagtcgatgctacggatctaccaaaagttcagatccctccacctgcccatcctgctccagtgcatcaacctccaccccttccacaccggcctccacctccaccaccaagctcctatatgaccggaatgtctaccactagttcctacatgtcaggtgaagggtaccagagtctccaaagcatgatgaaaacagagggtccatcctacggcgcactgccacccgcatatggccctcctgcgcaccttccatatcaccctcatgtgtaccccccaaatccacctccccctcctgtgcctccaccccctgcgtcttttcctccccctgcaattccccctcccaccccaggctaccctccgccaccccctacctacaaccccaattttccgccaccacccccaagattgcctcccacgcacgcggtacccccacaccctccacccggactggggctccccccagcctcctaccctccacccgcagtccctccgggaggtcagccgccagtgcctccaccaataccccctccaggcatgcccccagtggggggtttaggaagagcagcctggatgcgctag

SEQ ID NO: 219602 - DNA, 333 bp, synthetic construct
  misc_feature 1..333: note = Description of Artificial Sequence: Synthetic coding sequence
  source 1..333: mol_type = other DNA
atgaaggagaataaggaaaacagctcaccttcggttaccagtgccaaccttgaccacacaaagccttgctggtactgggacaagaaagatctcgcacacacgccaagccaactggaaggcctggatcctgccaccgaagcaaggtaccggagggaaggggctcgtttcatttttgacgtcgggactcgattagggctgcattatgacacactggcgactggcatcatttacttccacagattctatatgttccattcctttaaacagttccccaggtatgtaactggagcctgttgtctattcctggcaggtaaggttgaggaaaccccctag

SEQ ID NO: 219603 - DNA, 684 bp, synthetic construct
  misc_feature 1..684: note = Description of Artificial Sequence: Synthetic coding sequence
  source 1..684: mol_type = other DNA
atgaaggaaaacaaggaaaatagctccccatccgtgacaagtgcaaatttagatcacacaaagccgtgttggtactgggataagaaagatctggcccacacgccctctcagctggagggactggaccccgcaactgaggcacgttatagacgcgaaggagctcggttcattttcgatgtgggcactcgccttggactccactacgacaccttggcgactggtatcatctacttccacagattctatatgttccactctttcaagcagtttccgagatacgtcacaggagcttgctgcttatttctggccggtaaggtagaagagactccgaaaaaatgcaaggacattattaagacagccagaagcttactcaatgatgttcaattcggccagttcggggatgaccccaaggaagaggtaatggtcttggagcgaatcctcctgcagacaatcaagttcgacctgcaggtggagcacccataccagtttcttctaaaatatgcaaagcaactgaaaggtgataagaataagatccagaaactggtccagatggcctggacttttgtgaacgattcattgtgtactaccctgtccctgcagtgggagccggaaataatcgcagtggcagtcatgtatcttgcaggcaggctctgcaagtttgagatccaggaatggacctcctag

SEQ ID NO: 219604 - DNA, 519 bp, synthetic construct
  misc_feature 1..519: note = Description of Artificial Sequence: Synthetic coding sequence
  source 1..519: mol_type = other DNA
atggccagcggtcctcactctacagccactgcagccgctgctgcgagcagcgctgccccttctgcgggaggcagtagcagcggaacaacaacaactaccactactaccactgggggtatactgatcggagacagactatactccgaggtctctctcactattgaccacagccttattcccgaggaaagattgtctccaaccccctcaatgcaggatggattggatctgcctagcgaaacagatctccgcattctgggatgtgagctgatacaagcagccggaattctgctacgtctgccccaggtggccatggccacaggccaggtactttttcacagatttttctattccaaaagcttcgtgaaacactcttttgaaatcgttgcaatggcttgtattaacctggcatccaaaatcgaagaagcaccgcgtagaataagggacgtgattaatgttttccatcacctgcgccagctcaggggcaaaagtgaccaactgcatctgcctaaacctgggtag

SEQ ID NO: 219605 - DNA, 1581 bp, synthetic construct
  misc_feature 1..1581: note = Description of Artificial Sequence: Synthetic coding sequence
  source 1..1581: mol_type = other DNA
atggccagtggccctcattccaccgcgactgctgctgccgctgcttcttcagctgcacctagcgctggtggctcctcaagcggtactactaccaccaccacgaccaccacgggcggaatcttaatcggtgatcggctgtattccgaggtgtctttaacaattgaccacagcttaattccagaagaaaggctgtcacctactccctcaatgcaggacggcctggatttaccatcggagactgacctcagaatattgggctgcgagctgatacaggctgcaggcattctgcttcgccttccgcaggtggccatggcaaccggccaggtgcttttccataggtttttttactcgaaaagttttgtgaaacacagcttcgaaatagtggcgatggcttgcataaatctcgcctcaaagatcgaggaagcaccaagacgaattcgagacgtaatcaacgtgttccatcatctccgtcagctgcggggaaagcgtactccttccccattgatactcgaccaaaattatataaatacaaagaaccaggtgataaaagccgagcgacgggtgctcaaagagctggggttctgtgtccatgttaaacacccccacaagattatcgttatgtacctgcaagttctggaatgcgaacgcaatcagacactcgttcagacagcttggaattacatgaatgattccctgagaaccaatgtgttcgtgcgcttccaaccggagaccattgcatgtgcttgcatctacctagcagcccgtgccttgcaaatccccctgcccacaaggccccactggttcctactgtttgggactactgaggaggaaattcaagagatttgtatcgagacactgaggctctacacccgcaaaaagcccaactatgagctcctggaaaaggaggtggaaaaaaggaaggtggcattgcaggaggccaagctcaaagccaaaggccttaaccctgatggcacaccagctctttccacactgggtggattcagccccgcttcgaagccttcttcgcctcgcgaggtcaaagctgaggaaaaatcccccatttcaattaatgtgaagaccgtaaaaaaagaacccgaggatcggcaacaggcctctaaatcaccgtacaatggggtgcgcaaggattcaaaacgcagtaggaactcccgctccgccagccgatccaggtcccggaccaggagccgctctcggtcccacactccacggcgacattacaacaacagaaggtcacggtccggcacctattcatccagatcacgcagtcggagtcgaagtcactcagagtcacctcgcaggcaccacaaccacggctctccccatctgaaggcaaaacatacccgggatgaccttaagagttcgaataggcatggacataaacggaagaaatctagatccagaagtcagagtaagtcccgcgatcactctgatgccgcaaaaaagcacagacatgaacgcggtcaccatcgggatcgacgggaacgaagccgctcttttgaacggtcccacaagagtaagcaccacggcggttcacgcagcggtcacggcaggcataggcggtag

SEQ ID NO: 219606 - DNA, 1563 bp, synthetic construct
  misc_feature 1..1563: note = Description of Artificial Sequence: Synthetic coding sequence
  source 1..1563: mol_type = other DNA
atggcggcagcggcagccgctgcaggcgctgccggttcagcagctcccgctgctgcggctggcgcaccaggatccgggggagccccatccgggagccagggcgtgttgatcggagacagactttactctggcgtcctgattacactggagaattgtcttctacctgatgataaattgcgcttcacccccagcatgtcttctgggcttgacacagacaccgagacagatctgagagtggtgggctgcgagttgatacaggctgccggtattctcctgagattgcctcaagtggcaatggcaaccggtcaggtgctgtttcagcggtttttttacaccaaatctttcgtgaagcattccatggaacatgtttccatggcctgtgttcacttggcgagcaaaatagaggaggctcctcgaaggatccgcgatgtgattaacgtgtttcacaggctaagacagctacgggacaaaaaaaaacccgtacctctgcttctggaccaagactacgtaaacctcaaaaatcagataatcaaagctgagaggagggttctgaaagagctgggattctgcgttcacgttaaacacccacataagatcatcgtcatgtacttgcaggtcttggagtgtgaaagaaaccagcacttagtgcagacctcgtggaactatatgaatgattcccttcgcaccgacgtttttgtgcggttccagcctgagtccatagcctgcgcctgcatttacctggctgcaaggacactggagatccctctacccaatcgacctcactggttcctgctattcggggcaacagaggaagaaatacaagagatttgtctcaaaatactgcagctctacgctagaaaaaaagtggatctgacgcacttggagggggaggtggaaaaacgcaaacatgccatcgaagaagccaaggcccaggctagggggctcctgcccggagggacacaggtattggacggaacatctggctttagtccagccccaaagcttgtggaaagtccaaaggaagggaagggatccaaaccaagccctctgtctgtcaaaaacaccaaacgtaggctggaaggagctaaaaaagcaaaagctgactcaccagtgaacggactcccaaagggcagagaatcaagatctaggtccaggtcccgggaacagagctacagcagatcaccaagcaggagcgccagtcccaagaggagaaagtcagatagcgggtcgacctctggagggagtaagagccaaagccgatcgcggtccagaagtgacagcccaccaaggcaggcgccaaggagcgcaccgtataagggatcagaaattcgcggttcccggaaaagcaaggactgtaagtatccacagaagccacataaatcccgatctcgatcgtcaagtcggagccgctcacggagccgggagagggcggataatccaggcaagtataagaagaaaagtcactattacagggaccaacgcagagagcgcagcaggtcatacgaacgcacgggcagacggtacgagcgcgatcatcctggtcactcaaggcaccgcagatag

SEQ ID NO: 219607 - DNA, 681 bp, synthetic construct
  misc_feature 1..681: note = Description of Artificial Sequence: Synthetic coding sequence
  source 1..681: mol_type = other DNA
atggccgcagccgctgctgcagccggagccgcaggcagcgccgcacctgctgccgctgccggagccccaggctctggcggtgcgccaagcggtagtcagggcgtcctgatcggcgacagactctactctggcgtgcttatcaccctggagaattgcttgctgcctgacgataagttgcgctttactccgagcatgtcttccggattggacactgacactgagacagacctacgcgtggtcggctgtgaactgatccaggctgcaggaatcctgctccgcttaccacaggtggccatggccactggccaggttctgttccagaggtttttctacactaagagttttgtgaagcactccatggagcacgtgtctatggcatgcgttcatcttgccagtaagattgaggaggcccctcggaggatacgagacgtaatcaacgtttttcaccgtttacggcagttgcgggacaagaaaaaaccagtcccattactgcttgatcaagattatgtaaaccttaagaaccagatcatcaaggcagagaggagggttctgaaagaattaggcttttgtgtacatgtgaagcatccccacaaaattattgtgatgtaccttcaggttttggagtgcgaaaggaaccagcatctggtccaaaccagctgggtcgcgagtgagggcaagtag

SEQ ID NO: 219608 - DNA, 1044 bp, synthetic construct
  misc_feature 1..1044: note = Description of Artificial Sequence: Synthetic coding sequence
  source 1..1044: mol_type = other DNA
atgaacgacagccttcgcacagatgtgttcgtgaggttccaacccgagagtattgcctgtgcgtgtatctacttggccgctcgcaccttggaaatccccctaccaaaccgacctcattggtttctactcttcggcgctaccgaagaggagatccaggaaatctgtctgaagatcctccagctgtacgccaggaaaaaagtcgatctgacccaccttgagggcgaggtggaaaagaggaaacacgccatcgaagaggggccttctccgggaccagttgcttgggggcataccggagcaggatggtacctgggtgtgctgtcgtgccctcaggctggctgttgggactactcccttgagtgttcgggtgcaatatgggatcattgcaagctcaggctgccagactcaggtgatagttgtgcctccgcatcacaagtggcaggaattgccggtgcccatcaccatgcgcagagccttgctgtccttcccgtggaatcacctaaggaaggcaaaggttccaaaccaagcccgctgtccgtgaaaaacacaaaacgcagacttgaaggagctaagaaggcaaaggctgatagccccgtcaacggtcttccaaaaggacgggagtccagatccaggagtcggagtagagaacaatcttacagtagatctccctccagatccgctagccccaagaggagaaaatcggactctggaagcacttcaggaggctccaagtcacaatctaggagccgtagtagatccgactctcccccacgacaggccccacgttccgccccatacaaaggatcagaaattaggggctcaaggaagtcaaaggactgcaagtacccccaaaagcctcacaagtctcgctctaggtcttccagtcgcagcagaagcagatcacgggagagagctgacaatcccggaaagtataagaagaagtcccactattatcgggaccagcggagggagcgatctagatcatacgagcgcaccgggaggcgttacgagcgggaccacccaggtcattcgcgccatcggagatag

SEQ ID NO: 219609 - DNA, 2856 bp, synthetic construct
  misc_feature 1..2856: note = Description of Artificial Sequence: Synthetic coding sequence
  source 1..2856: mol_type = other DNA
atggccgctgctgctgctgccgcagctgccgtcggggtccgcctccgggattgctgctctcgcggagccgttctactcctgttttttagcctgagccctagacctcctgcagccgctgcatggctactgggcctcagacctgaagacaccgcagggggaagagtgtctctggaagggggaacacttagagccgcagaaggtaccagtttcctgctacgcgtctatttccagcccggacctcccgctaccgccgcacctgttcccagccctacactgaatagtggcgaaaatggtacaggagactgggcgcctagactggtcttcatcgaagagcctcctgggggaggaggtgtggcgccaagcgccgtgccaactaggcctcctggcccacaacggtgcagagagcagagtgactgggcgtctgacgtagaagtgttaggaccgctgaggcccggaggagtggccggaagcgcactggtccaagtgagagttcgggagctccggaagggcgaggctgagcggggaggggctggcggaggcggaaagctcttcagcttgtgtgcatgggacggacgagcctggcatcaccacggagccgcagggggatttttacttcgagtcagacccaggctgtacggcccaggcggtgacctgcttcctccggcttggctccgggcattgggagccttgctcctgctcgcactaagtgcgctgttctccggcctgcgcctgtcactgttgtctctggatcccgtggagctgcgggtgctgagaaacagcggatccgccgctgagcaggagcaggccagaagagttcaagccgtaagggggcgaggaacacacttactctgcactcttttacttggacaagccggtgctaacgcagctctggctgggtggttatatacttctctgccccctggctttggcggaacaggcgaggattactcagaggaggggatccattttccttggctccccgctttggtctgcactggagccgtgtttttgggagccgagatatgcccgtattctgtttgctctaggcacgggctcgcaatagccagtcatagtgtttgcctgacccgtctcttgatggccgctgcatttcccgtgtgttacccactaggaagactgctggattgggccctccgacaggaaatctcaactttctatacccgggagaaactcttagaaactctgcgagcagccgatccctattcggacctcgtgaaggaggagttgaatattattcagggtgcccttgagctccgcaccaaggtggttgaagaggtgcttacccctctgggcgactgtttcatgctgcgatctgacgccgttctggattttgccactgtaagcgaaatcctccggtccgggtatacccgaatcccggtgtacgagggcgaccagaggcacaacattgtagacatattgtttgtcaaggacttagcctttgtggaccctgacgattgcactccactactgaccgtaaccagattctataacaggcccttacattgtgttttcaatgataccagacttgacacagtgctagaagaattcaagaagggcaagtctcacctggctattgttcagagggtgaataatgagggggagggtgacccattctatgaggtgatgggcatcgtgacgttggaggatatcatcgaagagattattaagtcagaaattctggacgaaactgacttgtacaccgataatagaaaaaagcaacgggtgccccagagagaaagaaagaggcacgactttagccttttcaaactttcagacacggagatgcgcgttaagataagcccacaattactgcttgccacgcaccggttcatggcaacagaagtggagccatttaagagcctgtacttatcagaaaagatcctgctcagactcttaaagcatcctaacgtgatccaggagctcaagtttgacgagaaaaataagaaggctcccgaacattatttataccagcggaatagaccggtggattattttgtactgcttcttcaaggtaaggtggaggtcgaggtgggaaaggagggcctgagattcgagaacggtgcctttacatattatggggtgcccgctattatgaccactgcttgctcagacaacgatgtgcggaaggtcggatcattagcaggatcatcagtatttcttaaccgctcccccagcagatgctcaggcctgaataggagcgagtctccgaaccgggagcggagcgacttcggcggaagcaacactcagctctatagcagctcaaataacttgtatatgccagactactcggtgcatatcctcagtgatgtccagtttgttaaaattacacgccagcagtaccagaacgctcttaccgcctgtcacatggacagctccccccagagtccagatatggaggcgtttaccgatggcgattctacaaaagccccaacaacccgcggtactccacagacacccaaagatgatcccgctataaccctattgaacaatcgcaattcacttccatgctcaagatccgatggcttgcggagcccttctgaggtggtgtacttacgaatggaggagctggctttcacacaggaagagatgacagacttcgaagaacatagcactcagcagttgaccctctctcccgcagccgtgcccacacgagcagcgtctgattccgaatgctgtaacattaacttggacaccgaaactagcccatgctcatctgactttgaggagaatgttgggaaaaagctgctgcgaaccctgtcaggccagaagaggaaacgatcacctgagggcgagcgcactagcgaggataatagcaacttaacgcctctgataacgtag

SEQ ID NO: 219610 - DNA, 2493 bp, synthetic construct
  misc_feature 1..2493: note = Description of Artificial Sequence: Synthetic coding sequence
  source 1..2493: mol_type = other DNA
atggctgccgcagccgcagccgcagctgcagtaggcgtacggctgagagactgctgtagcaggggggcagtcctcctgttgtttttttccctgtccccaagaccccctgccgcagctgcctggctgctcggtctgagaccagaagacaccgccggaggaagagtctccttagaaggcggtacactgagagccgctgagggtacctcttttcttcttagggtctactttcagcctgggcctccaagatgtcgggagcagtccgactgggccagcgatgtggaagttctgggacctctgaggcctggaggcgttgccggtagcgccctggttcagctgttttcactgtgcgcatgggacggaagggcatggcaccatcatggcgctgcgggaggtttccttcttcgcgtgagacctcggctgtatggcccagggggtgacctattgccccctgcatggttaagggctttgggagccttgctgttactggctctgagcgccctgttcagtgggcttcggctttccctgctctccctcgaccctgttgagttaagggtgttgcgcaactctgggagtgctgcagagcaggagcaggcaaggcgcgtgcaagctgttcgtggtagaggtacgcatctcctttgcaccctcttgctaggccaggccggagccaacgccgctctggccggatggttgtatacttctctgccccctggatttggcggtactggagaggactactccgaggaaggaatccatttcccatggctccctgccctggtgtgtactggcgcagtctttctgggagccgaaatttgtccgtactccgtctgtagtcggcacgggctggcaatcgcatcgcactcagtatgtctgaccaggttgctcatggccgcagcattccctgtgtgttatccacttggtaggttgctcgactgggctctgcgccaggagatctccacattctatacgcgagagaagctgttagaaaccctgcgcgcagctgacccttactctgacctcgtgaaggaggagctgaacattattcagggagctctggagctgcgtactaaagttgtcgaggaagtgctgactcccctgggagactgcttcatgttgcggtcagacgccgtgctggattttgcgaccgtttccgagattctgagaagtgggtataccaggatccccgtgtatgaaggcgaccaaagacataacattgtggacatactgttcgtcaaggatctagccttcgttgatccggatgattgtacaccgctgcttacagtcactaggttctacaataggcccttacattgcgtgttcaacgacacaagactggacactgtgctggaggaatttaagaagggcaaatcccacttggcaatagttcagcgcgtgaacaacgagggagaaggagacccattttacgaggtgatgggcatcgtgaccctggaagatattattgaggagatcataaagtccgagattctcgacgagaccgacctatataccgataacaggaaaaagcagagagtgcctcaacgtgagaggaagagacatgacttcagcctctttaaactatctgatacagagatgagggtgaagatttcgccacagctcctgctggcgacccataggttcatggccacagaggtcgagcctttcaagtctctatacctgtcagagaagattcttctgagattgctcaagcacccaaatgtgattcaggaactgaagttcgatgagaaaaataagaaagcaccagagcactatctttaccagagaaatcgccctgttgattacttcgtgctgttgttgcaggggaaggtcgaggtggaggtggggaaagaaggacttcggtttgagaatggagctttcacctattatggcgtacccgctattatgacgactgcttgcagtgataatgacgtgcgaaaggttgggtccctggcaggcagtagcgtgttcttgaatcgcagtccctctcgctgcagcggcctcaacaggagcgagtcccctaacagagagagatcagactttggcggatcaaatacacaactgtattctagttctaacaacttgtacatgcctgattatagcgtccacattcttagcgacgtgcagtttgtgaaaataacaaggcagcaataccagaacgccctgacggcttgccatatggattcttcaccacaatctccagacatggaggcttttaccgatggcgattcgacaaaggcaccaaccacgcgtgggacgccacagacccccaaagatgaccctgccatcactctgcttaataaccggaactctttgcccagctccgacagcgagtgctgtaatataaatttagacacggagactagcccctgtagctccgactttgaggagaatgtgggaaagaaactactaaggaccctctcaggtcagaaacggaaacgaagccccgagggtgaacggacctcagaggataactcaaatttgactccactcatcacctag

SEQ ID NO: 219611 - DNA, 1824 bp, synthetic construct
  misc_feature 1..1824: note = Description of Artificial Sequence: Synthetic coding sequence
  source 1..1824: mol_type = other DNA
atggctgccgctttccccgtctgttatcctttagggcgattattagattgggccttaagacaggagatcagtacgttctacacccgagagaagctgttggagaccctccgcgcagccgacccttatagtgatctcgtgaaagaggaactgaacataatccagggcgctctggaactccgtaccaaggtagtagaagaggtactcacacccctgggtgactgtttcatgttgcgatcagacgccgtactagacttcgcaactgtttccgagatcctgcgcagtggttacacacgtattccggtatacgaaggtgatcaaaggcacaacatcgttgatattctgtttgtgaaagatcttgcgtttgtcgaccccgatgactgtacaccacttctgacagtaacaaggttttacaatcgacccttgcactgtgtattcaatgacactcgactcgacacggtgttagaggagttcaagaaggggaagagtcatctggccattgttcaacgggtaaataatgagggggagggcgatccattttacgaagtgatgggaattgtcactcttgaggatataattgaggagattattaagtcagaaatcttggacgagacggacctctatactgacaacagaaaaaaacagcgtgtcccccagcgagaacgcaaaagacatgacttttcgttatttaagctgtctgacactgaaatgagggtcaaaatctcacctcagttgttgttggccacacatagatttatggccacagaggtcgaaccatttaaatccctctatctttccgaaaagatcctgctgagactactgaagcacccaaacgtaattcaggaactgaagttcgacgagaagaacaaaaaggcacctgagcactatctgtatcaaaggaatcggcctgtagactattttgtactgctgttgcaggggaaggtggaggtggaagtggggaaggagggcctgcgcttcgagaatggggcttttacctattatggcgtgcctgcaatcatgacaacagcttgtagcgataacgacgtgagaaaggtcggaagcctggcaggctcttctgtgtttctgcctgtgtcagtatccagaacctttgcggtcagtaggggggatagtttggcgggaagtccggtgaacaggtccccatcccgatgctctgggctcaaccgcagcgaatctcctaaccgggagcgatccgatttcggaggcagcaacacccaattatactccagttccaacaatctgtacatgcctgattactcggtgcacatcctctccgatgtgcagttcgtgaaaattactagacaacagtaccaaaacgctctgaccgcctgccacatggacagcagcccacaatcgcctgatatggaggcctttactgatggggattccaccaaggctccgaccacaagaggtacaccccagaccccgaaggacgaccccgctatcaccttgttaaataaccggaactcgctgccgtgctcaaggtctgacggtctgcggtcaccatccgaggttgtgtatttgcggatggaggaactcgcttttacccaagaggagatgacggattttgaagagcacagcacacagcagctcactctgtcccccgctgccgtcccaacccgggcagcttcagattctgagtgctgcaacataaatctagacacggagacctcaccttgctcaagcgattttgaagagaacgtggggaagaaacttctacgcacccttagtgggcagaaacgaaaacgcagcccagaaggcgagagaacatcagaggacaactctaatcttacccccctgatcacatag

SEQ ID NO: 219612 - DNA, 2643 bp, synthetic construct
  misc_feature 1..2643: note = Description of Artificial Sequence: Synthetic coding sequence
  source 1..2643: mol_type = other DNA
atggccgctgccgcagccgcagccgctgctgtaggtgtgagacttcgtgattgctgcagccgcggagccgtcctgctactgttcttttctctgtccccccgtccgcctgctgctgcagcctggctcctgggtcttagaccagaggatactgccggaggtagggtgagcctggaggggggaactctacgggctgctgaaggtaccagtttcttgcttagggtctatttccaacccggacctcctcgttgcagagagcaatcggactgggcttccgacgtcgaggtgctggggccactgaggcccggtggggtggccggtagcgctttggtgcagctgttcagtctgtgcgcttgggacgggagagcatggcaccatcatggcgctgctggcggtttcctgctccgggtccgccctaggctgtacgggcctggaggggacctcctgcctccagcgtggctacgggctctgggggcactacttctcctggctctcagcgccctgttctctggactgcggttgtccctcctatccctggatcccgtggaactgagagttcttagaaactccggttctgctgcagagcaagaacaggcgaggcgcgtacaagctgtgcgcggacgcggtactcacctgctttgcacgcttctgttgggacaggcgggtgccaacgctgcactagccggttggctttacacttccctgcctccgggttttgggggtactggagaagactactctgaggaaggcatccatttcccttggctgcccgctctggtctgcacgggcgcagtctttctaggggcagaaatctgcccatactcagtttgcagtagacacggactggcaatcgcttcacactcagtttgtctcacgcgtctgcttatggcagccgcatttcctgtctgttaccctctgggcaggttactcgactgggcgctacggcaggaaatcagcaccttttatacccgcgagaagctcctggaaaccctgcgggcagctgatccttactctgacttggtgaaagaagagcttaatatcatccagggtgcattagagctacgtacgaaggttgtcgaggaggttctcacccccctgggggattgcttcatgctgagaagtgacgccgtcctcgatttcgccaccgtgagtgagatcttgcgctcaggttacacccggattccagtttatgaaggagatcagcggcataacattgtggacatcctcttcgtcaaggatctagcattcgtggatcctgacgactgcacccctctgctcaccgttacaaggttctacaacaggcccctgcactgtgtgttcaacgacaccaggttagatacggtcttagaagaatttaaaaaaggaaagagtcacctggcgatcgttcagagggtcaacaatgaaggggagggtgatcctttctacgaagtaatgggcatagtgactctggaggacatcattgaggagatcatcaagtcagagatactggatgagaccgacctatacacggataatcgaaagaaacagcgagtgccgcagcgtgagcgcaagcggcatgatttttctttatttaaactgtccgataccgagatgcgcgttaagattagtcctcagctgctgttagccacccacaggttcatggccaccgaggtggagccttttaaatcactatatctgtccgagaagatcctactgcggttattgaagcaccccaacgtcattcaggaattgaagttcgacgagaagaataagaaagctccagagcactacctgtaccaacggaacagacctgtggactatttcgtcctgctgctacaggggaaggtggaggtcgaggtaggaaaggagggtctgcgatttgagaacggcgctttcacctactacggagtccccgctataatgaccaccgcatgctccgacaatgatgtcaggaaagtagggtctctggccggatcttcggtgttcctcaaccggtccccatcgcgttgttcaggcctcaaccgcagcgaatctccaaaccgcgaacgatcagatttcggaggcagtaatactcagctctactcatcaagtaataacctctatatgcccgactatagcgtacacatactatctgacgtgcagttcgtgaagatcacccggcagcagtaccagaatgctctgactgcctgccatatggattcctcaccacaatcaccagatatggaagcttttaccgatggcgactcaacaaaagcaccaactacccggggaaccccacaaactcccaaggatgaccccgctatcaccctcctcaacaaccgaaacagtctcccgtgtagtcggagcgacggcctgcgctccccatccgaagtggtatatcttaggatggaagaactcgcgtttactcaggaagaaatgaccgattttgaagagcacagcactcagcaactgaccctgagccccgctgcagttcctactcgcgcagcctccgacagcgagtgttgtaatatcaacttggacactgagacctcaccctgcagtagtgactttgaggaaaatgtagggaaaaagctgttacgaaccctttccgggcagaagcggaaacgcagtcctgagggagaacggacgagtgaagacaattcaaatctgacccctcttattacgtag

SEQ ID NO: 219613 - DNA, 1215 bp, synthetic construct
  misc_feature 1..1215: note = Description of Artificial Sequence: Synthetic coding sequence
  source 1..1215: mol_type = other DNA
atggggatcgttactctggaagatattatagaggaaataatcaagtccgagatcttggacgagactgacctgtacacagataatcgtaaaaaacagagggtaccccagagggagagaaaacggcatgacttttctctatttaagctgagtgatacggaaatgcgggtcaagatttctccacagctactgctggctacccaccggtttatggctaccgaagtggaaccattcaaaagtctttacctgtccgaaaagattttgctgcgattgctcaagcatccgaatgtgatccaagagttgaaatttgatgaaaaaaacaaaaaagctcctgagcattatctatatcagagaaatagaccggtagactacttcgtcttgcttcttcagggaaaggtggaggtggaggtcggaaaggaaggattaagattcgagaacggggcattcacctactacggagtccctgcaattatgaccaccgcctgttcggataacgatgtacggaaggtgggttcgctcgcgggatccagtgtctttctgaaccggtcaccgtcgcgctgttctgggttaaatagatcagagagccccaaccgggagcggtcagactttggtggctcaaacacacagttgtattcgagttcgaacaatctgtacatgcctgactacagcgtacacatcctgagtgacgtacagtttgtaaaaattacacgtcagcagtaccagaatgctctgaccgcctgccatatggattcctctccgcagtcacccgacatggaagcatttactgatggagacagtaccaaagccccaacaacgagggggacgccgcagacccctaaggacgacccggcaatcactctgctgaacaacaggaacagcctcccatgctctagatcagacgggcttcggagcccctcagaagtcgtctacttgcgcatggaggagctggcgtttacgcaagaggaaatgaccgattttgaggagcattccacacagcagttgacactcagccccgctgcagtgccaacaagagccgcatctgactctgagtgttgtaacataaatctggacacagagacaagcccctgcagctcagacttcgaggaaaatgtgggcaaaaagctgctcaggactttgagtggccagaagcggaaacgtagcccggaaggggaaaggacctcggaggataactcgaatttaacccccttgattacctag

SEQ ID NO: 219614 - DNA, 2562 bp, synthetic construct
  misc_feature 1..2562: note = Description of Artificial Sequence: Synthetic coding sequence
  source 1..2562: mol_type = other DNA
atgatagggtgcggcgcatgcgagccaaaggtgaaaatggctgggggtcaggccgctgcagccctgccaacatggaagatggctgccagaaggtcattatccgccaggggccgagggattcttcaggctgcggctggcagactgctgcctttgctactgctgtcctgctgctgcggggcaggcggatgtgccgcagtgggggagaacgaagaaactgtgattattggcttgcgcctggaggatactaatgatgtgtctttcatggaaggaggggcactgagggtgtcggaacgcactagggttaagcttagggtgtacgggcagaacatcaataacgagacttggtccaggatcgctttcacagagcatgagagacggaggcacagccccggtgaacggggactcggtggtcctgccccaccagaacctgatagcggaccacagcgatgcgggattcggaccagcgatattatcattctcccccatattattcttaaccgcaggacatctggtattatagaaatcgagatcaagccgcttcgaaagatggagaaatccaagtcatactacctctgcacaagtctgtccacccccgctttgggcgctgggggaagcggcagtaccgggggagctgtcggaggcaagggcggatccggggttgccggactgcctccccctccgtgggccgaaacgacatggatctaccatgatggtgaagatactaagatgatcgtgggagaagaaaaaaagttcttgctgcccttctggttgcaggtgatattcattagcttattgctgtgcttgtcggggatgtttagcggactgaaccttgggttgatggctttggacccaatggaactcagaattgtccaaaactgcggtactgagaaagagaagaattatgcgaagagaatcgaaccagtgcggaggcagggcaactacctgctgtgtagtctattgctgggaaacgtattagtcaacaccaccctgactatcctgctggacgacatagctggcagcggattggttgccgtggtcgtcagcactataggcatcgtgatttttggcgagatcgtgccgcaggccatttgttctcgacacggattggctgtgggcgctaacacaatcttcctgactaaattcttcatgatgatgactttccccgcatcctaccccgtgtctaaactgctcgactgcgtcctgggccaggaaattgggactgtgtacaacagggagaagctgctagagatgttgcgcgtaactgatccttacaatgatctggtcaaggaggaacttaacatcatacaaggagcccttgaactgaggaccaagacagtggaagacgtgatgaccccccttagagattgcttcatgatcaccggggaggcaatcctggacttcaataccatgtctgagattatggagagcgggtacacacggatccccgtgtttgagggtgaaaggagtaatatcgtagacctcctctttgtgaaagatctggcctttgtggaccctgacgactgtacgccccttaagactataaccaagttctacaatcacccgctgcacttcgtttttaacgacactaagcttgatgcaatgctcgaagagttcaagaaggggaaaagtcacctggccattgtgcagagagtgaacaatgaaggcgagggtgaccccttttacgaagtcttaggaatcgttacactagaagatgttattgaagagatcatcaaatcggagattttagatgagactgacctgtataccgacaacagaacgaagaagaaagtggctcaccgcgagaggaagcaggactttagcgcctttaagcaaacggattctgaaatgaaagtaaaaatctctccacagctcttactggccatgcaccgattcttagccacggaggtcgaggcctttagtccgtcccagatgtctgagaagatattgttgagactccttaagcacccaaacgtaattcaggaattaaagtacgacgagaaaaacaagaaagcaccagaatattatctctaccagcgcaacaagccagtggattacttcgttctcatactgcaaggcaaggtggaagtagaagcaggcaaggagggaatgaagttcgaggcttcagctttcagctattacggagtgatggcgctcactgcgtcccctggcgaaaataaaagcccgccaaggccatgcggactgaaccattccgattccctcagtagatccgatcgcatcgacgctgtcacaccaaccctcggcagtagcaataatcaactcaattccagccttctgcaggtgtacatacccgactatagtgtaagggcactcagtgatctgcagttcgtgaagatttctaggcagcagtaccaaaacgccttgatggcctcccgtatggacaaaactccacaaagttccgactccgagaataccaaaattgaacttactctgacagaattacatgacggtctgccagacgagactgcaaatctactaaacgaacagaactgtgtgacccactccaaggctaatcattctctgcacaacgaaggcgctatttag

SEQ ID NO: 219615 - DNA, 1659 bp, synthetic construct
  misc_feature 1..1659: note = Description of Artificial Sequence: Synthetic coding sequence
  source 1..1659: mol_type = other DNA
atgattggctgcggggcatgtgaacctaaagtgaagatggcaggaggccaggcagccgctgccctgccgacctggaagatggccgcaagaagatcactctccgcaagaggaaggggcattctgcaggccgctgcgggacgactgctcccacttctgttattatcatgctgttgcggtgccggaggttgcgctgcagtgggcgagaacgaagaaaccgtcatcatcggactacgcctggaggacacgaacgacgtcagctttatggaaggcggtgcactgcgcgtcagcgaacgcacaagagtcaagttgagagtctacgggcagaacattaataatgagacctggagtcgaatcgctttcaccgagcacgagcggaggagacacagcccgggtgagaggggcctggggggtcctgcccctcccgaacctgatagcggaccccaacgttgcggcattagaacctctgacattatcatcctaccccatatcatccttaacagacgtacatctgggattatcgagattgagataaaacctctgagaaaaatggagaagtctaaatcctattacttgtgtacgagcctgtctactcccgcactcggagccggaggaagtggctctactggcggagcggtgggcggaaaagggggttcgggcgtagctgggctgcccccacctccttgggctgagaccacttggatctaccatgacggagaagacacaaagatgatcgtgggcgaggagaaaaagtttctcctgcccttttggctgcaagtcatttttatttctttactgctctgtctgtcgggaatgttttccgggcttaatttgggattgatggccctggatccgatggagctgcggatcgtacagaattgtggaactgaaaaggagaaaaactacgccaaacgtatcgagccagtccgacgccagggaaattatctgctgtgttcacttcttctggggaacgtgctggtgaataccacactcacaatcctgctagatgatatcgcaggctctgggttagtggcagtggtggtaagcacaatcggcattgtcattttcggcgagatagtccctcaggccatctgttctcgacatggcctggccgtgggggctaacactatattccttacaaaatttttcatgatgatgacgttcccagctagctatccggtatcaaaactcctggattgcgtgttggggcaggaaattgggaccgtgtacaatagagaaaagttactggaaatgttaagagtgacagacccctacaacgatttggtgaaagaagagttgaacatcatccagggggctttagagctccgaactaaaaccgtggaggatgtgatgactccactccgagattgtttcatgatcaccggtgaggctatcttagatttcaacaccatgagcgaaatcatggagtccggatacacgcggattccggtgttcgaaggagagcgctctaacatcgttgacctgctctttgtaaaggacttagcctttgtcgatcctgatgattgtactccgctgaagacaattaccaaattctataatcacccactccacttcgtcttcaatgataccaaattggacgctatgttagaagaatttaagaaggaacatacgaataagaagccgaagagctaccagcattag

SEQ ID NO: 219616 - DNA, 2628 bp, synthetic construct
  misc_feature 1..2628: note = Description of Artificial Sequence: Synthetic coding sequence
  source 1..2628: mol_type = other DNA
atgatcggctgtggcgcatgtgagcccaaggtgaaaatggcaggcggacaggccgctgctgccctccctacatggaagatggcggcacggaggagcctgtcagcaagagggcgagggatattgcaggcagcagcgggtcggctgctacctctgctcctccttagttgctgctgcggcgctggcggttgcgctgctgttggagagaacgaagagaccgtcataattggcctgcggctggaggataccaatgatgttagctttatggaagggggtgcactgagagtgtcagagagaacaagagtcaagttacgtgtgtatggccaaaacataaacaatgagacctggagtcgcatcgcctttactgaacacgagaggcgtagacattccccaggagaacgaggactaggcggaccagccccaccagaacctgacagcgggcctcagcggtgtggaattcgaacctctgacatcatcatcctaccacatataattttgaaccggagaacatcaggcattattgagatcgagataaagccccttcggaagatggagaaatccaaatcttattacttgtgcacaagcctttctacaccggctctgggggctgggggatccgggagcacgggaggggctgtgggaggaaagggagggagcggtgtggccggtttacctccccctccctgggccgaaaccacatggatatatcatgatggcgaggacacaaagatgattgtgggcgaggaaaaaaagtttttgctgccattctggctgcaggtgatctttatttctcttcttctgtgtctctccggcatgttcagcgggctaaatcttgggctaatggctttagaccctatggagctgagaatagtccaaaactgtggtaccgagaaagaaaaaaactacgcaaagcgcatcgagcctgtgaggagacagggtaattatctgctgtgctcactgctactggggaatgtcttggtgaacaccacactaactatcctcttggatgacattgcaggttctggcctggttgctgtggtcgtttccacaatcggcattgtcatttttggcgaaatcgtgccccaagccatctgctcgcgccacggtttggccgtgggggctaatactatctttttgaccaagttcttcatgatgatgacgttccccgcttcataccctgtctccaagctcctggattgcgtgctcggccaggaaatcggaactgtatacaacagagagaaactactcgagatgctgcgcgtgaccgacccgtataatgatctcgtcaaagaagagctgaatatcattcagggagccctggaactgaggacaaagaccgtggaagacgtgatgaccccactccgcgattgtttcatgattaccggagaagccattttagacttcaataccatgtccgagattatggagtcagggtacacccgcatcccggtgttcgaaggcgaacggagcaacatagttgatctgttattcgtaaaggatctagcgttcgtagaccctgatgattgtacacctctgaaaacaatcacaaaattttataaccaccccctacacttcgtgtttaacgatactaagttagatgcaatgttagaggagttcaaaaaagggaagtcgcatctcgcgatcgttcagcgagtgaataacgaaggggagggcgatcccttttacgaagtactgggcatcgtgacactggaggacgtcatcgaggaaataatcaagagcgagattctggatgagacagacctgtacactgataatcggactaaaaagaaagtagcccatcgtgagcggaagcaggacttctccgcatttaagcagacggattccgaaatgaaggtgaagattagcccccaacttctcctggccatgcaccggtttctcgccaccgaagtcgaggccttttcaccgtcacagatgtccgagaaaattctgctgaggctgctcaaacaccctaatgtcattcaggagttaaaatacgacgagaagaataagaaggcacccgagtactatttgtaccaaagaaacaaacctgtcgactacttcgttctgatcctacaggggaaggtcgaggtggaagctggaaaggagggcatgaagtttgaagcatcagccttctcttactatggggttatggctttaactgcatcccctgtgcctttaagcttatcccgaactttcgtagtcagtagaacggaattattggctgcgggaagtccaggcgaaaacaaatccccccctcggccttgtggcctgaaccatagtgattcattaagcaggtcggataggatcgacgcagtgacacccactcttggttcatcaaataaccagctgaattcatctctccttcaagtgtatataccagactattctgtgcgtgcgctgagcgacttgcagtttgttaaaatttctaggcagcagtatcagaacgcacttatggcttcccggatggacaagacgccacaaagctcagattctgagaataccaagatcgagttaaccctcaccgagttacatgatggtctgccagacgaaacggctaatttgctgaatgaacaaaattgtgtcacccatagtaaggcaaaccactctcttcataacgaaggggctatctag

SEQ ID NO: 219617 - DNA, 2565 bp, synthetic construct
  misc_feature 1..2565: note = Description of Artificial Sequence: Synthetic coding sequence
  source 1..2565: mol_type = other DNA
atgatcggttgcggtgcatgcgaacctaaagtgaaaatggccggaggtcaagcggctgccgcattacctacgtggaagatggccgctcggaggtccctgtctgctcgtggccgtggcatccttcaggctgccgctggacggctgctgcctctcctcttactgtcctgttgctgtggcgcaggaggttgtgccgctgtaggcgaaaatgaggaaacggtaattatagggttaaggcttgaagacacgaatgacgtgtcctttatggaaggaggagcccttcgagttagcgagaggacgcgtgtgaaactcagggtctacggacagaacatcaacaatgagacctggtctcgtattgccttcaccgagcatgagcggaggaggcactcccctggagagcgcggattgggcggtcctgccccaccagaacccgacagcggccctcaacggtgtggtatcaggaccagtgatatcataatactccctcacataatcctgaacaggcgcacctccgggattatcgaaatagagatcaagcccctgaggaagatggaaaaatcaaagtcatactacctttgtaccagtctttctactccggcactcggggcaggcggatcaggaagcacgggaggcgctgtgggtggcaaaggtgggtccggagtggccggactcccgcctcccccatgggccgagacgacttggatctatcatgacggcgaagataccaagatgattgttggtgaggagaaaaaattcctgctgccattctggctgcaggtgatattcatctctctgcttctttgcttaagcggcatgttctcaggtctgaacctgggcctgatggcactcgacccgatggagctgaggatcgtccaaaactgcggcactgaaaaggaaaaaaactacgccaagcggatcgaacccgtgcggcgacaaggcaactacctcctctgctcattgcttttagggaacgtgttagtgaataccacacttactatactgctggacgatatcgcgggtagcgggctggtggcggttgtggtcagcaccattggtatcgtcattttcggcgagatcgtcccacaggcaatctgcagccggcatgggttagccgtcggagccaacacaatttttttgacaaagttctttatgatgatgacattccccgcatcttacccagtgtcaaagctcttagattgtgtcctaggacaagagattggcactgtgtataatcgggagaaactgctggagatgctgcgcgtgactgacccttacaatgatctcgtgaaagaggaactgaatatcattcagggagctttagaattgcgcacgaagacggtggaggatgtgatgactccgctgcgcgactgtttcatgataactggcgaggctatcctcgattttaatacaatgtctgaaatcatggaaagcggctacacgagaattcccgtcttcgagggggagagaagcaatattgtggatctcctgtttgtgaaagaccttgcttttgtagacccagatgattgtacaccactcaagaccatcacaaagttttacaaccacccgttgcacttcgtttttaacgacacgaagctggacgctatgctagaagaattcaagaaggggaaaagtcatctcgcaatcgtgcagagagtcaacaatgagggcgagggtgaccccttttacgaggtgctcgggatagtcaccctcgaagatgtgatagaagaaataatcaaatccgaaatccttgatgagacagatctgtacacagacaaccgtactaagaagaaggtggcccatcgtgagcggaaacaggacttttctgcctttaaacagacggacagcgaaatgaaggtgaaaatttctccacagctgctgctggcgatgcatcttgtattcatatctattgaggtggaggcgttttcacccagtcagatgagtgaaaaaatcttgctccgtctgctgaaacatcccaatgttatacaggagttgaaatacgatgagaagaacaagaaggcccctgaatactacctctaccaaagaaacaagccagtcgactactttgttctgatcttgcaggggaaggtggaagtagaggctggcaaagaggggatgaagttcgaggctagtgcattctcatactacggcgtgatggccctcactgctagcccaggcgagaacaagagtcctcccagaccttgcggcctgaatcactctgactcactgagtcgttcggataggattgatgccgtcacacccaccctgggctcctcaaataaccaactcaacagcagcctgttgcaggtctacataccagactactctgtacgcgctttatctgatctgcagttcgtcaagataagcagacagcagtatcagaatgcgttgatggcaagcagaatggataaaacaccacaaagcagcgattcagaaaatactaagattgaacttacgttaactgagctccatgacggactgcctgacgagaccgccaacttactgaatgagcagaattgcgtgacccactccaaggctaaccattcattgcacaatgagggcgctatatag

SEQ ID NO: 219618 - DNA, 2631 bp, synthetic construct
  misc_feature 1..2631: note = Description of Artificial Sequence: Synthetic coding sequence
  source 1..2631: mol_type = other DNA
atgatcgggtgtggtgcatgtgaaccaaaggtaaaaatggccggtggacaggcagctgcagctctcccaacatggaagatggctgctcgacgatcgctgtccgccagagggagaggcatcctccaagccgctgcgggaagattgctccctctgctcctcctgagctgctgctgcggcgctgggggatgcgccgctgttggcgagaatgaagaaactgtaataatcggactacgactggaggatacaaacgacgtgagctttatggagggaggcgcattaagagtgtcagagcgcacccgcgtaaaactgagggtctacggacagaacattaataatgaaacctggagccgcatcgctttcaccgaacacgagcgtcggcgacactcgcctggcgagagaggtctgggcggacccgcacctcccgaaccagatagcggcccacagcgatgcggcattcggacctctgacatcatcatcctacctcacataatcctaaaccggaggacttcggggattattgagatagaaatcaaacccctccgcaagatggaaaaaagcaagagctattatctctgtaccagtctgtcaacgccagctctgggcgcaggcggtagcgggtcaacggggggagcggtgggtgggaagggtggatccggcgtggccggtctgccgcctcctccgtgggctgagactacctggatctatcatgatggcgaggacaccaagatgatagtgggtgaagaaaaaaagttcctgctgccattttggttacaggtgatttttatctctcttctgctctgccttagcggcatgtttagtggcctcaatctgggccttatggcccttgaccctatggagttgcgcatcgttcaaaattgcggcaccgagaaggagaaaaattatgcaaaacggatcgagcccgtgcggaggcagggaaactacctcttgtgcagtcttctcttaggtaacgtcctcgtgaataccaccttaacgatcctgctggatgatatcgctggctccggccttgtggcagttgtggttagtaccattggtatcgtgatctttggcgagatagtcccacaagcaatatgttcaagacatggcctggccgtgggcgcaaacacaattttcctcaccaagttttttatgatgatgacatttccggcaagctatccagtctccaaactgttggattgtgtactcggtcaggagatcggcaccgtctataaccgcgaaaaactgctggagatgctgcgcgtaactgacccatacaatgatcttgtgaaagaagagctgaacattatacagggtgccctggagctgcggaccaagaccgtggaggatgtgatgactcccctaagggactgttttatgatcacaggcgaagctatcctagatttcaatactatgtccgagatcatggaaagtgggtacaccaggattccagtctttgaaggcgaacggagtaacatagtcgacctactctttgttaaagatttagcttttgtcgatccagacgattgcacacctctgaagaccatcaccaaattctataaccacccacttcactttgtgttcaacgatacaaagctcgatgctatgctggaggagtttaaaaaaggaaagagtcatttggcaattgtacagagggttaacaacgagggagaaggcgaccctttttacgaagttcttggtatcgtgaccctagaagacgtaatcgaggaaatcatcaagagcgaaatcctggatgaaaccgatctctatacagacaaccgtactaaaaagaaggtggcgcaccgcgaacgcaagcaagatttttccgccttcaaacagaccgactccgagatgaaagtcaaaatctctcctcagcttctcttggcaatgcaccttgtgttcatctccatagaggtggaagcattcagtcccagccagatgagcgagaagatcctgctgagattactcaagcatcccaacgtgatacaggaactaaagtacgatgaaaagaataaaaaagcacccgagtattatctgtaccaaagaaataaaccagtagattattttgtgttgatcctgcaggggaaagttgaggtggaagctggcaaagaagggatgaagttcgaggccagcgcgttcagctattacggggttatggccctaaccgccagccctgtaccactgtcactctccaggacctttgttgtgagtagaaccgaacttctcgccgctgggagccccggagaaaataaatctcccccacggccttgtggacttaaccattccgacagtctctcccggagtgataggatcgatgccgtgactccaactttaggctcttcaaacaaccagctgaatagctcactcctgcaggtgtacataccggactactctgttagagcgctgagtgatctgcaatttgtgaaaatcagtagacaacaatatcagaatgccctcatggcttcgcggatggataaaaccccacaaagttcagatagcgaaaacaccaaaatcgaactgacactgactgaactgcatgatggtctccccgatgaaacggccaatctccttaatgaacagaattgtgtcacacactcaaaagcaaatcacagtctgcacaatgagggcgctatctag

SEQ ID NO: 219619 - DNA, 1725 bp, synthetic construct
  misc_feature 1..1725: note = Description of Artificial Sequence: Synthetic coding sequence
  source 1..1725: mol_type = other DNA
atgataggctgcggcgcatgtgaaccaaaagttaagatggccggaggacaggctgccgcagcccttccgacatggaaaatggcagctcgccgatctcttagcgccagaggtcggggtattctgcaggccgctgccggacggctgctgccgcttttgctcctctcctgctgttgcggggcaggagggtgtgccgcagtcggagaaaatgaggaaactgtcatcattggtctccgtttggaagacacaaacgacgtctcctttatggaagggggagctctgagggtgagcgagagaacccgcgtcaaactacgggtatacggccagaacataaacaacgagacttggtcacggattgccttcactgagcatgaaaggaggcgacacagcccgggagagagaggcctcggcggtcctgccccacccgagccggactcagggcctcagcgttgcgggatacgcacaagcgatattatcatcttaccacacattatattgaataggaggacgtctgggataattgagatcgaaataaaaccactgcgtaaaatggagaagtcaaaatcatattatctgtgcacttccctctccactcctgccttgggagccggtgggtcaggatctacgggcggagcagtcggtggcaaggggggatcaggggtggctgggctgccaccgcctccctgggcagaaaccacctggatataccatgacggagaggacacaaagatgattgtaggagaggagaagaaatttttgttgcccttctggttacaagtgatttttatcagcttgcttctttgcctgtcaggaatgttcagtggtctcaacctgggactgatggccctcgaccctatggaactgcgtattgtgcagaactgtgggactgagaaggaaaaaaactatgcaaaacgcatcgaaccagtcaggcggcaaggcaattacctcctgtgcagcctgctgctgggaaacgtgctggttaataccaccctgactattctcctggatgacatcgcaggaagtggcttggtagctgtcgtcgtgagtaccatcggcattgtgattttcggggagatcgtcccccaggcgatttgcagccggcatggattagctgtgggtgctaatactatctttctcaccaagttcttcatgatgatgacatttcccgcaagctatcctgtttccaagttgctggattgtgtcctaggtcaggagatcgggaccgtgtacaatcgcgagaagttgctagaaatgcttcgagtgacggatccctacaatgatctcgtaaaggaggagctgaacatcatccaaggtgctcttgagctccgaaccaaaaccgtcgaggatgtaatgacccctctgagggattgttttatgattacgggcgaggcaattctcgatttcaacacaatgtcagagattatggagagtggctatacgcgcatccccgtttttgaaggcgaacgctccaatatcgttgaccttctttttgtgaaagacctggcttttgttgacccggatgactgcactcctctcaaaaccattaccaagttctataatcaccctttacatttcgtcttcaacgacaccaaactggacgcgatgttggaagaattcaaaaaggaacacaccaacaagaagcccaaaagctaccagcactgtaatgaacagaattgcgtgacacatagcaaagcaaaccacagcttgcataacgagggagccatctag

SEQ ID NO: 219620 - DNA, 2124 bp, synthetic construct
  misc_feature 1..2124: note = Description of Artificial Sequence: Synthetic coding sequence
  source 1..2124: mol_type = other DNA
atggctgccgcagtggctgctgccggaaggctgggatggctttttgccgctttgtgtttaggcaatgctgcaggtgaagccgctccaggtccgagagtcctcggattctgtttggaggaggatggggcagccggagcagggtgggtccggggaggcgctgccagggatacccccgatgcaacgttcttgctgcggctgttcggccctggtttcgctaactcctcatggagttgggttgcaccggaaggcgctggctgccgcgaagaagccgcaagcccagctggggaatggcgagcactgctacggctgaggcttcgggcagaagccgttagaccgcatagcgcactgttggcggttagagtcgaacccggaggaggagcggctgaggaggcagctccaccatgggccctcggtctaggtgctgcgggtttacttgccctggctgccctggctaggggacttcagttaagcgctttagctctagcacccgcagaagttcaggtcctcagggaaagtggcagtgaagcagaaagggcggcagctagacggctggagcccgctagaaggtgggcgggatgcgccctaggtgccctgctcctactggcctcccttgcacaggcagccctggccgttttgctgtaccgcgcagccggacagcgggctgtccctgccgtgcttgggagcgccggactggtgtttttagtgggagaagtggtacccgcagccgtctccgggaggtggactctcgccctcgcccctagagccctcggactgtccagacttgcagtcctactgacactccccgtggcgctgcctgtgggacagctccttgagttagccgctagaccaggtcgtctccgggaacgcgtccttgagctagctcgcggtggcggagatccctactctgacctatccaagggagtgctcagatgccgtaccgtcgaagacgtcctgactcctttagaagactgtttcatgctcgatgcctcaactgtgctggattttggtgttctggcatctataatgcagtcaggccatacacgcatccccgtttacgaagaagagaggagcaacatcgtggatatgttgtacttaaaggatttggcctttgtggatccggaggactgtacacccttgtcaactataactcgcttttataatcaccctctgcacttcgtttttaacgacactaaactagacgcagtcctcgaggaatttaagcggggaaagagtcacttagcaatcgtccagaaagtgaataatgaaggagagggtgaccctttctacgaggtgctcggtcttgtgacgctggaagatgtgatagaggagatcatccgttctgaaatcctggatgaaagtgaagactaccgcgatactgtggtgaagcggaagccagcctcattaatggccccacttaaaaggaaagaagagttctccctgtttaaagtgagcgacgacgaatataaggtgaccatttctccgcagctattgttggcgactcaaagatttttaagccgcgaggttgatgtcttctctcccctgcggatctcagaaaaggttctgcttcatctgctcaaacatccgtcagtcaatcaggaggtcagattcgatgagtctaataggctggctactcatcactacctgtaccagcgcagccagcctgtggactactttattttgatcctgcaggggagagtggaggtagagatcggaaaagaaggtctgaagttcgaaaatggggcattcacatattacggagtttccgctctaactgtgcctagtagcgtacaccagtcaccagtcagcagtctccagccaatccgtcacgacttgcaacccgatcccggagacggcacccacagtagtgcttactgccctgactatactgtcagggcactttccgacctgcagctgattaaagtcactagattgcagtacctaaacgcgttattagcgacacgcgctcagaatttgccacagagtcctgagaacaccgacttgcaggttattccagggagccagacaaggctcctcggggagaaaaccactacggctgcagggagtagccattctcggccaggcgtacctgtcgagggaagtcctggtcggaatcccggagtatag

SEQ ID NO: 219621 - DNA, 1980 bp, synthetic construct
  misc_feature 1..1980: note = Description of Artificial Sequence: Synthetic coding sequence
  source 1..1980: mol_type = other DNA
atggcagctgccgtcgctgccgctggacggttgggctggctgtttgctgctctatgtctgggtaatgcggcaggtgaagctgcccctgggcctcgagttttgggattctgtctagaagaggacggcgctgctggcgctgggtgggtgagaggcggagccgcaagggatacacctgacgcaacattcctgctacgactatttgggcctggcttcgctaactccagctggtcatgggtggctcccgaaggtgccggatgtagggaggaggccgcatctcccgcaggcgaatggagagctcttctgcgtttgcggcttagagctgaggccgtccggccacattccgcactgctggccgttcgcgttgaacctggaggcggtgcagcggaggaggctgcccctccctgggcactcggtctcggcgctgccggactgttggccctagccgcactggcacgcggacttcaactcagtgccctcgcccttgcacccgcagaggtgcaggtactgcgtgaatcaggctccgaagctgagagggccgcagccagacgactcgaacccgctcgaagatgggccggatgtgccttgggagccctgcttctgctggcatcactggcccaggccgctctagccgtcctcctgtacagggccgctgggcaacgggctgtccctgccgtgcttggttcagcgggactggtcttccttgtcggagaggttgtgcccgctgccgttagtgggcgttggaccctggcacttgccccacgagccctggggttgagtagattggcggtactcctgaccctgcctgtcgcccttcccgtaggacagctgctggagttggcagccaggcccggacgcctgcgggaaagagtgcttgagctggccaggggcggaggcgatccatacagtgatcttagtaaaggagtcctgcgctgccgtactgtggaagatgttctcactcccctggaagattgtttcatgctcgacgccagcacagtgcttgacttcggagtccttgcatcaattatgcagagcggacacacccgcatccccgtgtacgaagaagagcggagcaatatcgtagatatgctttacctcaaggacctggccttcgtcgacccagaggactgcacaccgctctcgacgatcactaggttctacaaccacccactccatttcgtcttcaatgacacaaaacttgatgccgttctggaggaattcaaacgtggagataccgtggtaaagcgtaagcccgcatcattgatggcccctctaaaacgaaaagaagaattcagcctctttaaggtcagtgatgatgagtataaagttacaattagcccacagctgctcctcgccacacagcggttcctgagccgggaggtggacgttttcagtcccttacggatctctgagaaagtgttactccacttattgaagcatcccagcgtaaaccaggaggtgcgatttgacgagtctaaccgcctcgcgactcatcactatttataccagcggtctcaacccgtggactattttattctcatacttcaaggtagagtggaggtggaaatcggcaaggagggtctgaaattcgaaaacggcgcattcacctattatggcgtatccgcactcaccgtgccctctagtgtccatcaaagcccggtgtcttctcttcagcctatccgacacgacctgcagccagacccaggcgacgggactcatagcagcgcctactgccctgattatacagtgcgggctctttccgacctccagctcatcaaggtcacgcggctccagtacctgaacgcgctgctcgctaccagggctcagaacctgccacaaagcccggagaacacagacctccaggtgattcccggttcccagacacgtttgctgggcgaaaagactacaacagccgctggcagttctcattcacggccaggggtgcccgttgaaggcagtcccggacgaaacccaggagtgtag

SEQ ID NO: 219622 - DNA, 2043 bp, synthetic construct
  misc_feature 1..2043: note = Description of Artificial Sequence: Synthetic coding sequence
  source 1..2043: mol_type = other DNA
atggccgctgccgtagccgcagctggacggttaggctggctgttcgcggctctatgtctgggaaatgcagccggagaagccgctccaggaccacgagttctcggcttctgtctagaagaggatggcgcagccggtgccggttgggtccgcggaggcgctgctagggatacacctgacgccaccttcctgctgcgcctgttcggccctgggttcgcaaacagctcctggtcttgggtcgcccctgaaggagctggctgcagagaggaggctgcctctccagctggtgaatggcgggctctcctgcgactgaggctgcgcgcagaagcagtgcgacctcatagcgcactcctggcagtgcgggtcgagccaggcggaggagccgctgaagaagctgcccctccatgggctctaggactcggcgctgccggtctacttgctctggctgccctggctcgcggacttcagctgtctgctctggctctggcccctgctgaggtccaggtgctcagagaaagcggaagtgaggccgagcgggctgcagcccgtagactcgaacctgctagaaggtgggctggctgcgcattgggagcattactgttattagccagcctggcccaagcagccttagccgtgcttctctatagagctgcaggtcagagagccgttcctgcagtgctcgggagcgccggactggtgtttctcgttggagaggttgtgcccgcagccgtgtcagggagatggaccttggccctagcacctcgagcccttggcctgtcacgccttgcagtgttgctgacccttcctgtcgccctgccagtgggccagttgctcgagctggcggctcgcccaggcagattaagggagcgcgtgctggaattagccagggggggaggcgacccttatagcgatctttcgaagggggtgctgcggtgcaggacagtagaagacgtcctgactccactcgaggactgttttatgttggacgcctccacagtactcgacttcggcgtcctggccagcatcatgcagtcaggacatactaggatccccgtatatgaagaagaacggtccaacatcgtggatatgctgtacctcaaggatctcgcttttgtggacccagaagactgcaccccccttagtactatcactagattttataatcaccctctgcatttcgtctttaatgatacaaagcttgacgcagtgctggaagaatttaagcgtggggataccgtagtcaagcgaaagccggcatctttgatggcaccactgaaaaggaaggaggaattttctctgtttaaggtgtccgacgatgagtataaggtcaccatctccccacaattgcttctggctacccaacgatttctgtccagggaagttgatgtgttctcccccttacgaatcagtgagaaggtcttactgcacctattgaagcatccatctgttaatcaggaagtgaggttcgacgagtcaaacaggttagcaacacaccactatctttaccagcgaagtcaacccgtcgattactttattttgatcttacagggccgagttgaggtggagataggcaaggaaggtttgaaattcgaaaatggagcattcacgtactacggggtgagtgcactaaccgtgcctagttctgttcaccagtccccggtgtcctcccttcagcccataagacacgatctgcagcctgaccctggcgatggtacccactcttcagcatattgccctgattatacagtcagagccctgtctgaccttcagctcatcaaggtaaccaggctgcaataccttaacgcactcctagccactcgcgcacagaatctcccgcagtcgcccgaaaatactgatctgcaggttattccgggtagccagactagactgctcggagagaagaccacaaccgcggctggctcctcgcattctagaccttctctgccgctgctgccgagagggagagattcagcagcttactcagattccgatttgttcggtctgtcccacctagtgagtgccgttacggccttcgtttggccctag

SEQ ID NO: 219623 - DNA, 2328 bp, synthetic construct
  misc_feature 1..2328: note = Description of Artificial Sequence: Synthetic coding sequence
  source 1..2328: mol_type = other DNA
atggctcccgtaggcggaggcggaagaccagtgggaggccctgctcgcggtagattgctgttggccgcaccagttctcctcgtgttactttgggccctaggggctagggggcaaggatcacctcagcagggcactattgtgggaatgcgtctcgccagctgcaataaaagctgcgggaccaacccagatgggatcatattcgtctctgagggctctacagtgaatctgcgcctctacggctactcacttgggaacatctcttctaatttgattagctttactgaagtcgatgacgccgagaccctgcataaaagcacgtcctgcctcgagcttaccaaagatctggttgtccaacaactcgtgaatgtctcccgcggtaacactagcggtgttctggtggtgttgacaaaatttctgcggaggtctgaatctatgaaactgtacgctctctgtacgagggctcagccagacgggccatggcttaagtggacagataaggatagcttattatttatggtcgaagagcctggtcggttcttacctctctggctgcatatcttgctgattaccgtcttactggttctctcaggcatattttctggcctaaatttaggcctgatggcgctggatcccatggagctgagaatcgtccaaaactgtggaacagaaaaggagagacgatacgccaggaaaattgagccaatccgccgtaagggcaattacctgctgtgctccctgctgctaggaaacgtcttggtgaacacgagtctgactatattacttgacaacttgatcggcagcggcttgatggcggttgcttcatctaccatcggaatcgtcatcttcggagaaattctgccgcaggccttgtgtagccggcacggtttggccgttggagccaatacaatcctcctgactaagttcttcatgttgctcacctttccactgtcttttcccatctcgaaacttctcgactttttcctggggcaagagatacggactgtctacaatagagagaaactgatggaaatgttaaaggtgaccgagccgtacaacgatctggttaaggaggagctgaacatgatacagggggctttggaactgagaaccaagaccgtagaggacataatgacacagctgcaggattgtttcatgataaggagcgacgcaatcctggattttaacaccatgtcggaaatcatggagagcggctatacccgaatcccggtctttgaggacgagcagagcaacattgtcgatatattatatgtcaaggacctggcctttgttgaccccgacgattgcacacctctcaaaacaattactagattttacaaccaccctgtccatttcgtatttcacgacacaaaactggatgcaatgctcgaggagtttaagaagggtaaatctcaccttgctatcgtccaaaaggtcaacaacgagggggagggggacccattctacgaggtgctggggctggtaacattggaggacgtcatcgaagagatcattaaaagcgaaattctcgatgaaagcgacatgtatactgacaatcgtagcaggaaacgggtgtctgagaagaacaaacgtgacttcagcgctttcaaggatgcagacaatgagcttaaagtgaaaatttcccctcaactccttctcgccgctcaccgctttctcgcaactgaggtcagccaattcagcccctccctgatctccgaaaagatcctgctgcgcttgttaaaatacccggacgtcatccaagagctgaagtttgacgaacacaataaatactatgctcgccactacctatacaccagaaataaaccagccgattactttatcctcatactccagggcaaagtggaagtggaggccggaaaagaaaacatgaaattcgaaacaggtgcatttagctattatggcaccatggctcttacaagtgttccctctgaccgctctcctgcacaccctacacctctgagccggtcagcctctctttcttaccctgataggaccgacgtgtctaccgctgccaccctcgcgggaagcagcaatcagttcggcagtagtgtcctgggccagtacattagcgattttagtgtgagggctctcgtggacctccagtacatcaagattacacgtcagcagtatcagaacgggttgctagcctctcgaatggagaatagcccccagttcccaatcgacgggtgtactacacatatggaaaacttagctgagaaatctgaattgccagtggtggatgagaccaccaccttacttaacgagcggaacagtctgctccacaaagccagtcacgagaacgctatctag

SEQ ID NO: 219624 - DNA, 792 bp, synthetic construct
  misc_feature 1..792: note = Description of Artificial Sequence: Synthetic coding sequence
  source 1..792: mol_type = other DNA
atgtacaccgacaacagatcacggaaacgggttagtgagaaaaataaaagagacttttcagcattcaaggatgccgataacgagctgaaggtgaagatatcccctcagctcctgctggccgctcaccgtttcctcgcaacggaagtttcccagtttagcccatccctcatttctgaaaagatcctcctcagactgttgaagtaccctgacgtcatccaggaattgaagttcgatgagcataacaaatattatgctcgacattatttgtacaccagaaacaagcctgccgactacttcattctcatccttcagggcaaagttgaggtagaagctggtaaggaaaacatgaagtttgagacaggcgctttctcctactatggaaccatggcactgacatccgttccatcagatcgaagcccagcacacccaacacctcttagccgttctgcgagtctaagctatcccgaccgcacggatgtgagtacagccgctacccttgctggatctagcaaccagtttggtagcagtgtgctcggccagtacatcagcgattttagtgtgcgcgctctggttgatcttcagtatatcaaacctcaaagttggccttgtttttctagacctggggatcgcgtgtgcttgcccgctccaccgtcaatgaatagttcactgcctcacgccgaccactccgcggcagtacccgagcgcgctgctgggttctctcatggagagcagccatctgtctcccaccgcagagtgcaccatcctcatggcgagctgggcagggaagtgtag

SEQ ID NO: 219625 - DNA, 2193 bp, synthetic construct
  misc_feature 1..2193: note = Description of Artificial Sequence: Synthetic coding sequence
  source 1..2193: mol_type = other DNA
atggccagcgggagaggagcatcctcacgctggtttttcacccgcgagcagctcgagaacacccctagcaggaggtgcggggtagaagcggataaggaactgtcatgccgccaacaggctgcgaacctgattcaggagatgggccagcgcctcaatgtctcacagttgactataaataccgcaatcgtctatatgcataggttctatatgcaccacagcttcactaagtttaacaaaaatattatttcatccacagccctgtttctggcggcaaaagtggaagaacaggcaagaaagctcgagcacgtcatcaaagtcgcccatgcctgcctgcatccacttgaaccccttcttgacacaaaatgtgatgcatacctacagcaaacgcaggaactggtaattttggagacaatcatgctgcagactctaggctttgagataaccatcgagcacccacacacggatgtggttaaatgcacacagttagtgcgcgcaagcaaggatctggcacagactagctattttatggcaactaatagcttgcaccttacgaccttttgtctgcagtataagccaaccgtcatcgcctgcgtctgtatccacttagcgtgtaagtggagcaattgggagatcccggtgtcgacagatggcaagcactggtgggagtatgtggaccctacagttacactggagctcctcgatgagcttacccatgaatttttgcagatactggagaagactcctaaccgcctaaaaaaaatcaggaattggcgagcaaaccaagctgcccgaaagcccaaggtagatggccaggtgtccgagacacccctgctgggttcctccctcgtgcagaattcaatcctcgtggattcagttacaggcgttccaactaacccctcattccagaagccctccacgagcgcattccccgctccagtgccactcaactcagggaatatctctgtgcaggattctcacacatcagacaacctctcaatgctcgccacgggaatgcctagtaccagctatggcttatcatcacatcaggagtggccgcagcatcaagatagcgccaggacagaacagctgtattcccagaaacaggaaacttctctctcaggctctcagtataacataaattttcagcagggtccttccattagcctgcactctgggctgcaccataggcccgacaaaatttcagatcactctagcgtgaaacaggagtatacccacaaagctggatcaagcaagcaccatggtcctatctccacgaccccaggcatcatcccccagaagatgagccttgacaaatacagggaaaagcgaaaattggagaccttggacctcgatgtcagagatcactacatcgcagcacaggtcgaacagcaacataagcaggggcagagccaagcagcatcctcctcatcagtgaccagccctattaagatgaagattcctatcgccaatactgagaaatacatggcagataaaaaagagaaatctggttcactcaagcttagaatacctattcctcccacagacaagagtgcttcaaaagaagagcttaagatgaaaatcaaggtctcttcatccgaacggcacagctcttctgacgaggggtcaggcaaatcaaaacacagcagccctcatatttctcgggaccataaagaaaagcataaggagcatccctccagtcggcaccacaccagctctcataagcacagtcatagccactccgggtctagcagtggtggcagcaaacactcggcagacggcattccccctaccgtccttagatctcccgtgggtctttccagtgatggcataagctcctcttcaagcagctctcgcaagcggcttcacgtaaatgacgcgagccacaaccaccactccaaaatgtcaaaatcttccaagtcctcaggttcctccagctccagcagttcctccgtaaagcagtatatctccagccataacagtgtgttcaaccaccctctgcctccgcctccaccggttacataccaagtcggatatggtcacctgtctactctggttaagttagacaagaaacctgttgaaaccaacggccctgatgccaaccacgagtactctacgagctcgcagcacatggactacaaggacacttttgatatgttggacagcttgttgtcagcacagggtatgaatatgtag

SEQ ID NO: 219626 - DNA, 1992 bp, synthetic construct
  misc_feature 1..1992: note = Description of Artificial Sequence: Synthetic coding sequence
  source 1..1992: mol_type = other DNA
atggcctccgggcgtggagcctcctcacggtggttttttacccgggaacaactcgagaatactccaagtcgcagatgtggtgtcgaggctgacaaggagctaagttgcagacagcaggctgcaaacttgatccaagagatggggcagaggctcaacgtctcccagctaactattaacactgcgattgtgtacatgcaccgattctacatgcaccacagcttcacaaaattcaacaaaaatattattagcagcactgctctctttctcgctgcgaaggtcgaagagcaggccagaaaacttgaacacgtgatcaaagtcgcacacgcctgtcttcaccccctagaacctctgttggataccaagtgcgatgcttatttgcagcagacccaggagttggtcatccttgagacaattatgcttcagactttgggattcgaaattacaatcgagcacccacatacagatgtcgtcaaatgcacccagctggtccgagcttccaaagacctcgcccagacttcttacttcatggcaactaatagcttgcacctgacaactttttgccttcagtacaagcctaccgtcattgcttgcgtgtgcatccaccttgcttgcaaatggtctaactgggaaattcccgtgtctaccgatggaaaacattggtgggaatacgtcgacccgaccgtgaccctcgagctcctggatgaactgacacacgaatttcttcagatcctcgaaaagactccaaatcgactgaaaaaaatccggaactggagagctaaccaggcggcacgcaaacccaaagttgacgggcaggtatccgagacaccactgttaggatcttcccttgtccagaactcaattctcgtcgattctgtcactggcgtgcccactaacccctccttccagaaacctagtacatctgcttttcctgctccagttccactaaactcagggaacatcagcgtgcaggacagccacacttcagacaacttaagcatgctcgcaacaggcatgccgagcaccagttatggcctttccagccatcaagaatggccacagcaccaagactctgcccgaacggaacagttgtattctcagaagcaggagactagcctgtctggtagccagtataatatcaacttccagcagggtccgtctatttctctgcattccgggctgcaccatagaccagacaaaatttctgaccattcttcagtgaaacaggagtacacacacaaggccggttctagtaaacatcacgggccaattagcaccaccccagggataatcccccagaagatgtccctcgataagtaccgcgagaaacggaaattggagacgctcgacctggatgtgagggatcattatatcgctgcacaggtggagcaacagcacaaacagggacagagccaggccgctagcagcagttctgttacaagtcccattaaaatgaaaatccccattgccaatacagaaaagtacatggcagacaagaaggaaaagtctggtagtctgaaactgcgcattcctatccccccaacagacaagagcgcttctaaggaggagttgaaaatgaaaatcaaagtttcctccagcgaaaggcatagctcctcggacgagggatctgggaagtctaaacattccagcccacatatcagtcgagatcacaaggagaagcacaaggagcacccctctagcagacatcatacaagtagtcataagcatagtcacagccattctggtagttcctcagggggtagtaagcattcggcagatggtatacccccaactgtacttcggagccctgtggggctgagctcagatggtattagcagtagcagctcctcttcaaggaaacgtctgcacgtaaatgatgcttctcacaatcaccatagcaaaatgtctaagtcaagtaagtcctccggaggtctcagaacatcccagcaccctcgcgaaactggccaagaggccagtggagatcagagatcatag

SEQ ID NO: 219627 - DNA, 1467 bp, synthetic construct
  misc_feature 1..1467: note = Description of Artificial Sequence: Synthetic coding sequence
  source 1..1467: mol_type = other DNA
atggctacaaattccttgcacctgacgacattttgtctgcagtataaacctacagtcatcgcctgtgtgtgtatccacctggcatgtaaatggagcaactgggaaatcccagtgtccactgatgggaaacactggtgggagtatgttgaccccacggtaaccctagagctactcgatgagctgacccatgaattcctgcaaatcctcgagaaaactccaaaccgtctgaaaaagattcgcaattggcgggctaaccaggcagccaggaaacccaaagtcgacggacaagtttcagaaactcctctgcttggctccagtctggtgcagaattccattctcgtggactccgttaccggtgtgcccaccaacccctccttccaaaaaccctctacaagcgctttccctgcaccagtgcctttgaatagtgggaacatttcggtgcaggatagccatactagtgataatctctccatgctggcaactgggatgcctagcacatcatacggcctcagcagccatcaggagtggcctcagcatcaggactcggcgaggacggaacagctctattcacagaaacaggaaactagcctttcgggatctcagtacaatattaacttccagcaaggcccaagtattagtctgcattcaggactgcatcatcggccagataaaatatctgaccactcctctgttaagcaggaatacacccataaggcagggtcgtccaaacaccacgggcctatatccacaactcctgggatcattccacagaagatgtcactcgacaagtacagggagaagagaaaacttgagaccctcgatctggacgttagagatcactatattgctgcacaagtggaacagcagcataaacaggggcaatcacaagccgcaagttcctcttctgtgacttctcccattaagatgaagatccccatagctaataccgagaagtacatggcagataagaaagaaaaatccgggtccttgaaactccggattcccatccccccaaccgacaaaagcgcatcgaaagaggagcttaagatgaaaatcaaggtatcaagcagcgagaggcacagcagcagtgacgaggggtcagggaagtcaaagcattcctcaccccacatttcaagagaccacaaagagaaacataaggaacacccatccagtcgccatcatacatcttcccataagcactcacacagtcatagtggttcttcctctgggggttcgaaacatagtgccgatggcatcccaccgaccgtgctccggagccccgttggcttaagctctgacggcatttcgagtagcagctcatcttcgcgcaagcgtcttcacgtcaacgacgccagtcacaatcaccatagcaaaatgagcaagtctagcaagtcttccggcggtcttaggacatcacagcatcctagagagacaggccaggaggcttcaggtgatcagaggtcttag

SEQ ID NO: 219628 - DNA, 864 bp, synthetic construct
  misc_feature 1..864: note = Description of Artificial Sequence: Synthetic coding sequence
  source 1..864: mol_type = other DNA
atggaattcaacccttctgaccatcctagggctagtactatctttcttagcaaatcacagacagacgtgcgcgagaagaggaagagcctgttcattaaccaccaccctcctggacagattgccaggaaatacagcagctgcagcaccatcttcctggacgactcaacagtctcccagcccaacctgaagtacactattaagtgtgtggccctcgccatttactaccacataaaaaatagagacccagacgggagaatgctactcgacatattcgatgagaatctgcaccctctcagcaagagcgaggttcctcctgactacgataagcataatccggagcagaagcagatttataggttcgtgaggaccctttttagcgcggctcagttaacagccgaatgcgctatcgtcaccctagtgtacctggaacgcttgctgacctacgccgaaattgatatatgccctgccaattggaaaagaattgtgctgggggctatactactggctagcaaagtgtgggatgatcaagcagtatggaacgttgactactgccagatcctcaaggacataactgtggaggacatgaatgagctcgagcgacagttcttggaattattgcaatttaacatcaacgtgccctcatctgtgtatgcgaaatattatttcgatctccgaagccttgcagaagcaaacaatctttccttcccattggaaccattgtccagggaacgcgctcataagctggaagcgatatcacgcctatgtgaggataaatataaagatcttagaagatccgccagaaagcggagcgcctcggctgacaatctgacactccctcgatggtctcctgctatcatttcttag

SEQ ID NO: 219629 - DNA, 951 bp, synthetic construct
  misc_feature 1..951: note = Description of Artificial Sequence: Synthetic coding sequence
  source 1..951: mol_type = other DNA
atggggaataccacatcttgctgcgtaagctcctcaccaaaattgaggaggaacgcccatagtcgtctggagtcatataggcccgacaccgacctgagcagagaggacactgggtgtaacctccagcatatcagcgaccgcgaaaacatcgacgtacgggaaaaaagaaagagcctgtttatcaaccaccatccacccggacaaatcgcgagaaaatattcatcctgttccactatatttcttgacgattcaactgtttcgcagcctaatctgaagtacaccatcaaatgcgttgctctcgcaatctactaccacatcaaaaatcgcgacccagacggcaggatgcttttggatattttcgatgagaatttgcaccctttgtccaagtctgaggtccccccagactatgataaacacaaccccgagcagaagcaaatctaccgatttgttagaacgctgttcagcgcagctcagttgaccgcagaatgcgctatagtgacattggtgtatctcgagcgcttactaacctatgccgagatagatatttgtcccgcaaactggaaaaggattgttctcggcgctatccttttagcatccaaggtgtgggatgatcaggccgtgtggaacgtcgactattgtcagattcttaaggatattacagttgaagatatgaatgagctcgagcgacaatttttagaattgttgcaatttaacattaacgttccgtcatccgtttatgcaaaatattacttcgatctgagaagtctggccgaggcaaataatttatctttcccccttgaaccattaagccgagaacgggcacataagttagaggccatctcacgcctgtgcgaagacaagtacaaggacctgaggcgctccgctaggaagcgtagtgcctcagcagataacctcacccttcccagatggagccctgccattatctcttag

SEQ ID NO: 219630 - DNA, 1026 bp, synthetic construct
  misc_feature 1..1026: note = Description of Artificial Sequence: Synthetic coding sequence
  source 1..1026: mol_type = other DNA
atgggcaacaccacctcctgttgtgtcagttcctcaccaaaactgcggcgtaacgcacattccaggctggagagctatcgccctgacactgacttatcacgggaggatactgggtgtaacctgcagcacatttctgaccgcgaaaatatcgacgacctgaacatggaatttaatccaagcgatcatcccagagcctcgacaatctttttaagcaaaagtcagactgacgtgcgggaaaagaggaagtcactattcatcaaccatcaccctcccggacagatcgcaaggaaatatagctcatgtagcactattttcctagatgatagtaccgtaagtcaacctaacctgaagtacactataaagtgcgtcgccctggcaatatattaccatattaaaaaccgagatcccgacgggcgaatgcttctggacatctttgatgagaatttgcaccccttgagcaaatcagaagtgcctcctgactatgataagcacaaccctgagcaaaagcagatttaccggtttgtcagaaccctgtttagcgcagctcaactgaccgctgagtgcgcaatcgtgactcttgtgtacctggaaagactgctgacttatgctgaaatcgatatatgtcctgccaattggaagcgcattgtgctcggggctattctacttgcttctaaagtctgggacgatcaggccgtctggaatgtcgactattgtcagatactgaaagacattacggtggaggacatgaacgagctcgagaggcagtttctcgagctgctccaattcaatattaatgtcccctccagtgtgtatgctaaatattactttgacctgagaagcctcgccgaggcaaacaatttgagttttcctctggagcctctgtctagggaacgtgcccacaaattagaagctatttctcgcctttgtgaagacaagtataaggaccttcggaggtcagctagaaagcgatcagcgagtgccgacaacctcacacttccgcgatggagcccagccatcatttcctag

SEQ ID NO: 219631 - DNA, 864 bp, synthetic construct
  misc_feature 1..864: note = Description of Artificial Sequence: Synthetic coding sequence
  source 1..864: mol_type = other DNA
atggagttcaacccctcggatcacccacgcgcatctaccatcttcctcagtaaaagccaaaccgacgtgcgggagaagaggaagtcactctttattaaccatcatccccctggccaaattgccagaaagtattctagctgcagtaccatctttctggatgatagcaccgtcagccaacccaatttgaagtatacgattaagtgcgtggcactggctatttattaccatatcaagaatcgcgaccccgacggacgtatgctgttagatatattcgacgagaatcttcaccccttgagcaagagcgaagtgccacctgactacgataagcataacccagagcagaagcagatttacagattcgtgcggactctattttcggccgctcaacttactgcggagtgtgccatagtgactttggtttacctggaacggctattaacctatgctgagattgacatttgcccagcaaactggaagaggatcgtgctcggggctatcctgctggcttctaaggtttgggatgatcaagctgtctggaatgtggactattgtcagatcctgaaggacattaccgttgaggatatgaacgaactcgaacgtcagttcttggagttacttcaatttaatattaatgtgccctcctcggtgtatgccaagtattattttgatctgcgctccctggccgaggctaataatttgagcttcccactggagccactatcaagagagagggctcacaagttagaggcaatcagccgcctctgtgaagataaatacaaggacctcagaagatcggcccgaaagcgatccgcctcagcagacaatttaacactgccaagatggtcgcctgccattatcagttag

SEQ ID NO: 219632 - DNA, 627 bp, synthetic construct
  misc_feature 1..627: note = Description of Artificial Sequence: Synthetic coding sequence
  source 1..627: mol_type = other DNA
atggaccctgacggtaggatgctgctggacatattcgatgagaatttgcacccgctgtctaagagtgaggtaccccctgattatgacaagcacaacccagagcagaaacagatctaccgctttgtcaggacattatttagcgcggctcagctcaccgccgagtgtgccatcgtcaccttagtttacttagaaagactccttacatacgctgagatcgacatctgcccggcaaactggaagagaatagttctgggagccatcttactggcatcaaaggtctgggacgatcaggcagtctggaatgtggattattgccaaatactaaaggacataacggtcgaggacatgaacgagctggagagacagttcctggaactgctacaattcaatatcaatgttccctcgagcgtttatgccaagtactacttcgacctaaggagtctggcagaagccaataacctgtcgttccccctcgaacctctatctagagaaagagcccacaaacttgaggccatatccaggttatgcgaggacaaatacaaggatctgcggaggagcgctagaaaacggagcgcctccgctgacaatctgactctcccacgctggagtcccgctattattagttag

SEQ ID NO: 219633 - DNA, 1026 bp, synthetic construct
  misc_feature 1..1026: note = Description of Artificial Sequence: Synthetic coding sequence
  source 1..1026: mol_type = other DNA
atgggtaacaccacgtcctgttgtgtgagctccagtcccaagttacggaggaacgcccatagccgactggagtcatacaggcctgacactgatctgtcgcgggaggacactggttgcaatcttcaacacatttccgacagagaaaatatagatgatctgaatatggagtttaacccaagtgaccatccacgagcctccacgatttttctcagtaagtctcagacagatgtaagagaaaagagaaaaagccttttcatcaatcatcatcctcccggacagattgctaggaagtactcctcatgttcaaccatctttcttgatgactcgaccgttagtcaacctaacctgaagtacacgataaagtgcgtcgcgctggctatatactaccacattaagaatagagatccagacgggaggatgttgctggatatctttgatgagaatttgcatcctctgtcaaagtccgaagtgcccccagactatgacaaacacaaccctgagcagaagcagatttaccgattcgtaaggaccctgttctcagctgcgcaattgaccgcagaatgcgcaatcgtcactctagtctacctggaacgtctgttaacttatgcagagatagatatctgccctgcaaactggaagagaatagtgctgggtgccatcttgcttgccagtaaagtgtgggacgaccaggctgtatggaatgtcgattactgtcagattctgaaagacatcacagtggaggatatgaacgagctcgagcggcagttcctggagctccttcagtttaacataaatgtgccgagctccgtgtatgccaaatactacttcgacctccgtagcctcgctgaagccaacaatctgtccttcccccttgaaccgctgagccgggagcgagctcataaacttgaagctatttcacggttatgtgaggataagtataaagacctgcgcaggtctgcaagaaagcggtcggcttccgctgataacttaaccctaccgagatggagtcctgctatcatttcatag

SEQ ID NO: 219634 - DNA, 942 bp, synthetic construct
  misc_feature 1..942: note = Description of Artificial Sequence: Synthetic coding sequence
  source 1..942: mol_type = other DNA
atggagccaatgtatcaggaccgggctcgcgatacgcaaacggatgagattgtggccttaaaaaaggtccggatggataaggagaaagacgggattccaatttcctccttaagggaaattaccctcctcctgcggttacggcacccaaacatcgtcgaactgaaggaggtggtagtgggtaaccatcttgaaagcatcttcctggttatgggctattgcgaacaggatctggcctctctcctggaaaacatgccaactcctttctctgaggcccaggtgaagtgcattgtattacaggtgttgcgcggtctccaatacctccatcgcaattttatcatccaccgggatctcaaggtgagcaatcttctgatgaccgataaaggttgcgtgaagactgccgattttggcctcgcgagagcctacggggtgcccgtaaaaccaatgacgcccaaggtggtgactctctggtatagggctcccgagttgctgctcggcactaccactcagacaacatccatcgatatgtgggctgtggggtgcatcttagccgagctgctggcccacaggccactgctgccaggaacttccgagatccatcaaattgatctcatagtccagttacttgggacacccagtgagaacatctggcctgggttcagcaagctcccactcgtgggacagtactctctgagaaagcaaccctataataatctcaagcataaattcccctggctctctgaagccggactcaggctccttcactttctgttcatgtacgaccctaaaaaacgcgcaacagccggagactgtctggaatccagctatttcaaggagaagcccctgccttgcgagccagaactaatgccaacctttccacaccaccggaataaacgggcagcccctgctactagcgagggccagagtaagcgttgtaaaccttag

SEQ ID NO: 219635 - DNA, 1083 bp, synthetic construct
  misc_feature 1..1083: note = Description of Artificial Sequence: Synthetic coding sequence
  source 1..1083: mol_type = other DNA
atggcggaacccgatctcgagtgcgaacagatccggcttaaatgcatcagaaaagaaggattctttaccgtaccccctgagcacagattggggagatgcagaagcgttaaagaatttgagaaactgaatcgtattggagaaggaacttacgggatcgtttatagggcaagagatacccagactgacgagattgtggccctgaagaaggttcgcatggataaagaaaaagatggtatccccatctcctctctgagagagattactttactgctgcggctgcgccaccccaacattgtggaactgaaggaggtggttgtcggtaatcatctggagtctatcttcctggtgatgggttactgtgaacaggatctggctagcttgctagaaaacatgcctactccatttagtgaggcccaagtgaaatgcattgtgttacaagtgcttaggggactgcagtatctccaccgtaactttatcatacaccgagatcttaaggtgagtaatctgctaatgactgacaaaggctgtgttaagaccgctgacttcgggctcgctcgcgcttacggggtccccgtcaaaccaatgacacctaaagtggtgacactctggtatagagcccctgaactgctgctgggcacaaccacccagaccacaagtatcgacatgtgggccgtgggttgcatcctggccgagcttctggcccaccgccctctcttgccgggtacttcagagatccatcagatcgacctgatcgtccagcttcttggaactccctcggaaaacatctggcccggattcagcaagctgcccctggtcgggcagtattctctaaggaaacaaccttacaacaatctaaagcataagtttccatggctgtccgaggcgggactgaggctcctccattttctgttcatgtacgaccccaagaagagggccacggctggcgattgtctggagtcgagctacttcaaagagaaaccgctgccgtgcgaaccggagctgatgccaacattcccacaccaccgaaacaagagggccgctccagctacctcagagggccagtccaagcggtgtaagccttag

SEQ ID NO: 219636 - DNA, 819 bp, synthetic construct
  misc_feature 1..819: note = Description of Artificial Sequence: Synthetic coding sequence
  source 1..819: mol_type = other DNA
atggataaggaaaaggacggcatacccatctcttcactccgcgagatcacactcctccttagacttcggcaccccaatatagtcgaactcaaggaggtggtggtagggaatcacttggagagcattttcttggtgatgggttattgtgagcaagacctagccagcctactcgagaacatgccaacgccattttccgaagctcaagtgaagtgtatcgtgctgcaagtgctacgagggctgcagtaccttcaccgcaatttcatcatccatcgggatcttaaagtttcaaatctcttgatgacagacaagggttgtgtcaaaaccgctgacttcgggctggcacgcgcatatggagttcccgtaaagccaatgacgcccaaagtggtgactttatggtatcgcgctcccgagctcctgttggggacaacgacccagaccaccagcatcgatatgtgggctgtcggatgcattctcgccgagctgctggctcatcgcccattgctgccgggaacatcagaaattcaccagattgatctcattgtgcagctgctcggaacgcctagcgagaacatctggcccggattcagtaaactgcctttagtcggccaatactcacttcgcaaacagccctacaacaacctgaaacataaattcccctggctgtccgaggccggactccgcttattgcacttcctgttcatgtacgatcccaagaaacgagccaccgccggagattgcctggagtcctcttatttcaaagagaagcccctgcgacttccaatttccggagtgtgcgaaggttgtcgtgagcccggttag

SEQ ID NO: 219637 - DNA, 504 bp, synthetic construct
  misc_feature 1..504: note = Description of Artificial Sequence: Synthetic coding sequence
  source 1..504: mol_type = other DNA
atggggaaaaccgaagaaaaggggaacggcaaaggcgcattccaggagaggaagggtccactaggagccgttcggaaggaagctggtgccggagctcaggacgccggagctgccgaaggcgctgccgttaagaaaatgacattctctgaacacccctacaacaacctccggaaacgttttggtgccctgctctccgaccaagggttcgatctaatgaacaaatttctgacttatttccccggaagacgtattagtgcagaggatggtcttaaacacgagtacttccgggaaacacctcttccaatagacccatcaatgtttcctacctggcctgcaaaatccgagcaacagcgcgtgaaacgaggaaccagtccacgtcctcctgaaggcggtctgggctactctcagctcggcgatgacgacctgaaggaaaccggctttcatctaacaacaacaaaccagggagcctccgcagccggtcccggattctctctgaagttttag

SEQ ID NO: 219638 - DNA, 2241 bp, synthetic construct
  misc_feature 1..2241: note = Description of Artificial Sequence: Synthetic coding sequence
  source 1..2241: mol_type = other DNA
atgtctcagagtgacgatcgagattctaagcgggactctcttgaggagggtgagctgcgtgaccattgtatggagattaccatccgcaacagcccgtatagacgggaagattctatggaagatagaggagaagaggatgactccctggccataaaacctccacagcagatgtctcgcaaggaaaaagttcatcatcgcaaagacgaaaagagaaaggagaaatgccgccaccatagccactccgctgaggggggtaagcacgctagggttaaagagcgcgagcatgaaagaagaaaaagacatagagaagagcaggacaaagcaagacgagagtgggagcggcagaagcgccgagaaatggccagagagcatagtagacgagagagggacaggttggaacagctggagcgtaagagagaacgcgaaaggaagatgcgggaacaacagaaggagcagagagagcagaaagagcgggagagacgggctgaggaaagaagaaaggagagggaggcgcgacgcgaggtgtcggcccatcaccgtactatgcgagaggactacagtgataaggtgaaggcgtcccactggtctcgcagcccgccaagacctccacgggagagatttgaactcggagacggccgaaagcccgtgaaagaagagaagatggaagagagagacctgctgagcgatcttcaggatatcagcgattcagagcgaaaaacgagcagcgcagaatcgagcagcgctgaatccggaagcggttcagaggaggaggaagaagaagaagaagaggaggaggaagagggttcaacatcggaggagtccgaggaggaggaagaggaggaagaagaggaagaggaggagaccggctccaatagtgaggaggctagcgaacaaagcgctgaagaagtctccgaagaggaaatgtcggaagatgaagagagagaaaatgagaatcatctgcttgtggtgcccgagagcaggttcgacagggacagcggcgagagcgaagaagcagaggaagaggtgggcgagggcacccctcagagttcagctctgacagagggtgactacgtaccagatagcccagcacttctcccaattgaactcaagcaggagctcccgaagtacctgcctgctttacagggctgtaggtccgtggaagaattccagtgcctcaataggatagaagaggggacatatggagtggtctatcgcgctaaggacaagaaaactgacgaaatcgttgcgctcaagaggcttaagatggaaaaagaaaaggagggattcccgattacatcccttcgagaaatcaatacaatcttaaaggcccagcacccaaacatcgtcacagtgagggagattgtggttgggtctaatatggacaaaatctacatcgtcatgaattacgtggaacacgacttgaagtctcttatggagaccatgaaacagcctttcctgcctggggaagtgaaaactttgatgatccagctgctgcgaggggttaagcacttgcatgacaattggatcttgcaccgggatctaaaaactagtaacctgcttctgagccacgctgggattctcaaagtgggagatttcggtctagccagagaatatggaagtcccctgaaagcgtacactcctgtcgtcgtgactcaatggtatcgggcaccggaactgctgttaggagcgaaggagtattctactgcggtggatatgtggtccgttggatgtatatttggcgaattgctgacccagaagcccctttttcccggaaactcggagatcgatcagattaacaaagtgtttaaggagcttgggacaccttcagaaaagatctggcccggatacagtgagctccctgtcgtgaagaagatgaccttctcagagcatccatacaacaacctgaggaaacggttcggcgctttgctgagcgaccagggattcgatcttatgaataaattcctaacctatttcccaggccgtagaatctctgcagaagatgggttgaagcatgagtactttagggagactcccttgccaatagatccttctatgtttcctacttggccagccaaatccgagcagcagcgagtgaagcgtggaaccagtcctcgcccacctgaaggtggcttgggatattcccaacttggcgacgatgatctcaaggagaccggtttccaccttacgacgacgaaccagggtgcctccgccgcaggccctggcttcagccttaagttctag

SEQ ID NO: 219639 - DNA, 2340 bp, synthetic construct
  misc_feature 1..2340: note = Description of Artificial Sequence: Synthetic coding sequence
  source 1..2340: mol_type = other DNA
atgggcgacgagaaggactcatggaaagtgaagaccctagacgaaatactgcaggaaaaaaagcggcgtaaggagcaggaagaaaaggccgaaataaaaaggctgaagaactcagatgaccgagattcgaagcgggactcgctcgaagagggtgagctgagagatcactgtatggagatcacgatccgtaattccccttaccggagagaggacagtatggaggatagaggagaggaagacgactcactggccattaaaccaccacagcagatgtcgagaaaggagaaggtgcatcaccggaaggatgaaaagcggaaggagaaatggaagcacgccagagtgaaggagagggagcacgaacgaagaaagagacaccgggaggaacaggacaaggccaggcgggagtgggagcgtcaaaagcgcagggagatggccagggaacactcaaggcgagagcggggtaacgatggagtgtgtctctttagagataggttggaacagctcgagagaaaacgggagcgggaacgcaagatgcgggaacaacaaaaagaacagcgtgaacagaaggagcgggaacgtcgggctgaagaaaggcggaaagagcgggaggctcgacgggaggtctcagctcaccataggaccatgagagaagactacagcgacaaagttaaggcgtctcactggagcagaagcccccctcggcctccgcgagagcggttcgaactcggagatggacgcaaacccgtcaaagaggaaaaaatggaggaacgtgatttgttgtcagacctgcaggacatctcagacagtgaacggaagacctcttcagctgagtctagcagtgccgaatcaggtagcggctcagaggaagaggaggaagaggaggaggaggaagaggaggaggggtccacaagtgaagagtccgaggaggaggaggaggaagaagaagaggaggaggaagaaaccggctccaattctgaggaagcttccgagcagtccgccgaggaggtttcagaggaggagatgtcagaggatgaggaacgcgagaacgagaatcacctactcgttgtgcccgagagtcgatttgaccgagactctggcgaaagcgaagaagccgaagaggaggtaggcgagggaacccctcagtcctccgcccttaccgaaggagactacgttcccgattcccctgctttgctgcctattgaactcaaacaggaactccctaagtacctacctgccctccaggggtgccgctctgtcgaagagtttcagtgtcttaacaggatagaagaaggtacatacggcgtagtgtatagagctaaggataagaaaaccgatgaaatcgtcgcactcaaaagactgaaaatggaaaaggaaaaggaaggtttccccattacttcactccgagagatcaacactatactgaaagcccagcaccctaacattgttactgtgcgcgagattgtcgttggcagcaacatggacaagatttacattgtcatgaactatgtcgagcacgatctgaaaagtttgatggagaccatgaagcagccatttcttcccggagaagttaaaaccctcatgattcaattgttgcggggagttaagcacctccatgacaactggatcctccatagagacctcaagaccagtaacctcctgctgtcacacgcaggcattctaaaggtgggggacttcggtttggccagagaatacggcagccccctcaaagcttatacacctgtggtcgtgactcaatggtatagggctcctgagctcttgcttggagctaaggaatatagcactgcggtagacatgtggtcagtgggctgcatattcggcgaactactcacacagaaaccgctgtttcccggtaattcagaaatcgaccagatcaataaagtgttcaaggagctcggtaccccatcggagaagatttggcctggctactccgagctccccgtcgtgaagaaaatgacatttagcgaacacccatataacaatctgcgaaaacgcttcggcgctctgctctccgaccaggggttcgacctgatgaataaattcctgacttactttcctgggaggaggatttccgctgaagacggcctgaaacacgagtattttagagaaactcctctcccaattgatccaagcatgtttcctacatggcccgctaagtctgagcaacagagggtgaagaggggcactagtcctaggccacctgaaggcggtctgggctactctcagctgggcgatgatgatctcaaagaaaccggcttccacctgaccactacaaatcagggagcttcagcggcaggcccaggcttcagcttgaagttctag

SEQ ID NO: 219640 - DNA, 2313 bp, synthetic construct
  misc_feature 1..2313: note = Description of Artificial Sequence: Synthetic coding sequence
  source 1..2313: mol_type = other DNA
atgggggacgaaaaagactcctggaaggtcaagactctggacgagattctccaagagaaaaaacgccgtaaggagcaggaagagaaggccgaaatcaaacgactgaaaaattcagacgaccgggacagtaaaagggatagcctggaggagggggagctcagggatcattgtatggagatcaccatccgaaattcgccctatagacgcgaagattctatggaggaccggggagaggaggacgacagtttggccatcaagcctccccaacaaatgtcccgcaaggagaaagtgcaccaccggaaggatgagaagagaaaagagaagtggaaacatgcaagggtgaaagaacgggagcatgaacgaagaaagcgccaccgagaagagcaggacaaggcgcgtcgagagtgggagaggcaaaagagaagagaaatggccagggagcattcccggagagagcgcgacaggctcgaacagctcgaacgtaagagagagcgcgagcgaaagatgcgggagcagcaaaaggaacagcgggagcagaaagaacgggagcggagggccgaagaacgcagaaaggaacgggaggccagaagagaagtgtctgctcaccaccgcacaatgcgtgaagactactctgataaagtaaaagcttcgcattggagccgctccccacctcgaccacctcgcgaacggtttgagctaggcgatggccgtaaacctgtaaaggaggagaaaatggaagaaagggatctcctttctgacctgcaggacatttcagacagcgagcgcaaaacttctagcgccgagtccagttcagctgaatctggctctgggtctgaggaagaggaagaggaggaagaagaggaggaagaggaggggagcacctctgaggaatctgaagaagaggaggaagaggaggaggaggaggaagaggagaccgggagcaactccgaggaggcatccgagcagtctgccgaagaagtgtcagaggaagaaatgtctgaggatgaagaaagagagaacgagaaccatttattagtggtgcccgaatctcgtttcgacagggatagcggcgagagcgaagaagccgaggaagaagtgggagaagggacaccacaatcgagcgctcttacggagggcgactacgtccctgattcacccgctcttctccctatcgagcttaaacaagagttgcctaagtatctgcctgccctgcaaggctgtcgaagtgtggaagagttccagtgccttaatcggatcgaagaaggcacctacggagtggtgtatcgagctaaagacaagaaaacagacgaaattgtcgctctgaagcgtctcaagatggaaaaagagaaagagggctttcccatcacttctctgagggagattaatacgatcctcaaagcccagcatcccaatattgtgacggtacgggagatcgtagtcgggagcaacatggacaagatatacatcgtgatgaattatgtggagcacgacctcaagagcttaatggaaactatgaagcagccctttctacccggtgaagtaaagacattgatgatccaattgctccgcggtgtgaagcaccttcacgacaattggatcttacatagagacctgaagacctccaatctgcttctttctcatgccggaatccttaaagtcggcgacttcggcttggccagagagtatggttctccgttgaaagcttatacaccagtggtggttacacagtggtaccgagccccagaactcttgcttggtgccaaggagtactctacggccgttgatatgtggagcgtgggctgcatcttcggggaactgctcactcaaaagccactgtttccaggcaattctgagatcgaccaaattaacaaggttttcaaagaattaggaacccctagcgagaagatttggcccggatacagcgagctgcccgtcgtcaagaaaatgactttctccgagcacccatataataatctgaggaagcgcttcggggcactcctgtccgatcagggattcgacttgatgaacaaattcctgacctatttcccagggagaaggatcagtgccgaagatggcctgaagcatgagtatttcagagagacaccattgcccattgacccgtctatgtttcccacatggcccgctaagtcggagcagcagagggtcaagcgcggaacgtcaccacgccctcctgaaggagggcttggctattcccaactgggggacgacgacctcaaggagactggtttccatctgacaactaccaatcagggtgcctctgctgcaggtcctggtttttcacttaagttttag

SEQ ID NO: 219641 - DNA, 2241 bp, synthetic construct
  misc_feature 1..2241: note = Description of Artificial Sequence: Synthetic coding sequence
  source 1..2241: mol_type = other DNA
atgtcgcagtcagatgatcgcgattcaaaacgggattccctcgaggaaggagagttgcgtgaccactgcatggagatcaccataaggaattctccataccgcagggaggatagtatggaagacaggggggaagaggatgatagcctggccattaaaccgccacaacagatgtcaaggaaagagaaggtgcatcataggaaagatgagaagcggaaagaaaaatgcaggcaccactcccactctgccgaggggggaaagcacgctcgggttaaagagcgcgagcatgagcgcagaaagcggcatcgggaagaacaggacaaagccaggcgtgaatgggaaaggcagaaacgacgcgagatggccagggagcattcgaggagagagcgagaccgtctcgagcagttggaaagaaaaagggagcgagagagaaagatgcgagagcagcagaaagaacaacgagagcagaaagaacgagagagacgggcagaggagaggaggaaagaacgtgaagcccgacgagaagttagtgcgcaccaccgaactatgcgcgaggattacagcgacaaggtaaaagccagtcattggtctaggagtcctcccagaccaccacgtgagcgcttcgaactcggtgatgggagaaagcctgttaaagaggagaagatggaggaaagggacctgctgagtgatctgcaggatatctcagattccgaaaggaagacgtcgagcgcagagagtagctccgccgaaagtggtagcgggtccgaggaggaagaggaggaagaggaggaggaggaagaagagggtagcacctccgaggagtcagaggaagaggaggaggaggaggaagaagaggaggaagagactggcagcaatagtgaggaggctagtgaacagtctgctgaagaggtaagcgaggaggagatgtctgaagatgaagagagggagaatgagaatcacctcctggttgtgcccgagtctagatttgaccgagacagcggggaaagtgaagaggccgaagaggaagtcggggagggcactcctcaaagctccgctctgaccgagggggattacgtcccagacagccccgcactgctgccgattgagctcaagcaggaactgcccaaatatcttccagcattgcagggctgtaggtcggtggaggagtttcagtgtctcaaccggattgaggaaggaacctatggggtggtttaccgagcaaaggacaaaaagaccgatgaaattgtcgctctcaagagactcaaaatggagaaggagaaggaaggctttcctatcacatcactgagagagattaatacaattttaaaagcacagcacccaaatattgtgaccgtgagagagattgtagtcggctccaatatggacaaaatctatatcgtaatgaactatgtggaacacgacctgaagagtctaatggaaacgatgaagcagcccttcctccctggagaggtgaaaacactgatgattcagcttttacggggagtgaagcacctccacgacaactggattctgcatagagacctaaagacttcaaaccttctgctcagtcacgcaggtatcttgaaagttggtgactttggcctggccagagagtacggcagtcccctgaaggcctacactccagtagtagtgacccagtggtatcgcgcaccggagttacttctgggcgctaaagaatactctacagccgttgacatgtggtccgttggatgcatctttggcgagctgctaacccagaagcctcttttccctggaaatagtgagatcgaccagatcaataaagttttcaaagaactcggcactcctagcgagaagatatggcccggatattcagagttacctgtcgtgaagaagatgacatttagcgaacatccctacaataatttacgaaaaaggtttggtgccttgctcagtgaccagggttttgatctgatgaataagtttctcacctacttccctgggcgacgcatctctgcggaagatggactgaagcatgaatatttcagggagactcccctcccaatcgatccgtctatgttccccacatggcccgctaagtccgaacagcagcgcgtgaaacgcggaacttctccacgaccccctgaagggggtctgggatattcccagctcggcgacgatgatttgaaggaaactggttttcacctcactacaacgaaccaaggggctagcgcagcaggaccgggattctctctaaaattttag

SEQ ID NO: 219642 - DNA, 2352 bp, synthetic construct
  misc_feature 1..2352: note = Description of Artificial Sequence: Synthetic coding sequence
  source 1..2352: mol_type = other DNA
atgggggatgagaaggatagttggaaggtgaaaaccttagatgagattcttcaagagaagaaacgcagaaaggagcaggaggaaaaagccgagatcaaaagactgaaaaatagtgacgaccgcgattctaaaagagatagtctggaggagggagagcttcgtgaccattgtatggagattaccatccgcaacagcccataccgacgggaggacagtatggaagatcgtggcgaagaagacgactcgctcgccataaagccccctcaacagatgagccgaaaagagaaagtgcatcataggaaagatgagaagcgcaaggagaaatggaagcatgcacgagtgaaagagcgcgagcacgagcggcgtaaacgccacagggaggagcaggataaagctagaagagagtgggagaggcagaaacgacgggagatggctcgggagcattccagacgagagcgggaccgtctggagcagctggagaggaagagggaacgcgaaaggaagatgcgggaacagcagaaggagcagcgcgagcagaaggagagagagcgcagagccgaagaaaggcgtaaggaaagggaggccaggcgtgaagtgagcgcgcatcaccggaccatgcgtgaggactatagcgataaggtgaaagcttctcactggtctcggtcacccccacggcctccaagagagaggtttgagctcggcgatggcagaaagcctggcgaagccagacccgcacccgcacagaagccagctcagctcaaagaagaaaaaatggaggagcgagatttgcttagcgacctacaggatattagcgacagcgagcggaagacaagcagtgcagagtcctccagcgctgagagtggttccggttccgaggaggaagaagaggaagaggaggaagaagaggaagagggctcgacaagtgaggagtccgaggaggaggaagaagaggaggaggaagaggaggaagagacaggcagtaacagtgaagaggcctcagagcagtccgccgaagaggtttccgaagaggaaatgagcgaggatgaagagagagaaaatgagaatcatcttttagtggttcccgagagcagatttgaccgcgactctggagagtccgaggaagcagaggaagaagtgggcgaggggaccccccagagctccgccttgacagagggggactacgtccctgattcacccgcattgcttcctatagagttgaaacaggagctgcccaagtacctgccggcattgcagggctgtcggagtgtggaagaatttcagtgtcttaatagaatcgaagaggggacgtatggggttgtctacagggctaaggacaagaaaactgacgagattgtagcattgaagcgtctcaaaatggaaaaggaaaaagaagggttccccattacatcactgcgagagataaatactatacttaaagcccagcaccctaacattgtcacggtgagagaaattgttgttggctccaacatggacaaaatatacatagtgatgaattacgtcgaacacgacctgaagagcctcatggagaccatgaagcagcctttcctgcctggtgaagtcaaaacattaatgattcagcttctgcgcggagtgaagcacctgcacgataattggattttgcatagagacctgaagaccagcaatcttctcctatctcatgctggtattttaaaggtcggcgatttcgggctggccagggaatatggcagtccacttaaggcatacactcccgtggtggtaacacaatggtatcgagctcctgaattactgctcggggctaaagaatactccaccgccgttgacatgtggtctgtgggctgcatttttggcgagttgcttacccagaagccccttttccctggaaattcggaaatcgaccagatcaataaggttttcaaagagctcgggacaccatccgagaagatctggcctggatactctgagctgcccgtggtcaagaaaatgaccttcagcgagcatccctataacaacctgagaaagcgattcggcgcactcctctccgaccagggattcgatctgatgaataagtttttaacctacttccctggtcggcgaatcagtgcagaggatggcttgaagcacgaatacttcagggagaccccacttcctattgatccttctatgtttcctacatggcccgctaagtccgaacagcagagagtcaaacgcggtacatccccaaggccacccgaaggaggcctgggttattctcagctgggggacgacgatctgaaggaaactgggttccacctgactaccacaaatcagggagcctccgctgccggtccaggattcagtctcaagttctag

SEQ ID NO: 219643 - DNA, 699 bp, synthetic construct
  misc_feature 1..699: note = Description of Artificial Sequence: Synthetic coding sequence
  source 1..699: mol_type = other DNA
atgggcgacgagaaggacagctggaaagtcaaaacactcgatgaaatacttcaagagaagaaacgccgtaaggaacaggaggaaaaagcggaaatcaaaagactgaagaacagtgatgaccgcgattccaagagagacagccttgaggaaggtgagttgcgagaccattgtatggagatcacgattagaaattctccatatcggagggaggatagtatggaagataggggcgaagaggatgacagcctggccattaaacccccacagcagatgtcaaggaaagagaaagtccaccataggaaagacgagaagcggaaagaaaagtggaagcacgctcgcgtcaaagagcgagaacatgagagaagaaaacggcaccgagaagaacaggataaggctagacgggaatgggagcgccagaaacggagggagatggctcgcgagcattcccgccgtgagtccgtctgcacctctccaaacgacgaacgtggacttcaacggcagtcagaatctcagcctcttgaatctcagccagcctccgctgccgcaggggctgtccgcgtcggacgcaggccagaagcatcaaagcgtcgcgagaatggcaggaagggccctgcggtcaggctgacaggtcatcagaggcagcgcgaagaggaccagctcggcagagtattggttagcggaatccgtctgcggttctag

SEQ ID NO: 219644 - DNA, 2241 bp, synthetic construct
  misc_feature 1..2241: note = Description of Artificial Sequence: Synthetic coding sequence
  source 1..2241: mol_type = other DNA
atgtcacagtccgatgatcgcgactcaaaacgggattccttggaggaaggcgagctgagagatcactgtatggagataaccatcaggaactctccctacagacgcgaggattccatggaggatcgcggagaagaagatgattctctcgccatcaaaccaccacagcagatgagtcggaaggagaaagtgcaccacagaaaagatgagaagagaaaagaaaaatgccgtcatcacagtcatagtgccgaggggggaaagcatgcccgtgtgaaggagcgcgagcacgaaaggagaaaacgccatcgcgaagaacaggataaggctaggagggagtgggagcggcagaagagacgggagatggccagagaacacagcaggcgcgaacgagacagactggaacagctggagcgcaaacgggagcgtgagaggaaaatgcgggagcaacagaaggagcagcgggagcagaaggaacgagaacggagggccgaagaacgcagaaaggagagagaagcacgcagggaggttagcgctcatcaccgcaccatgagggaggattactctgataaagtgaaagccagccattggagccgctcgcctccacgccctcccagagagcggtttgagttgggtgatggcaggaagcccgttaaggaagagaaaatggaggagagggacctcttgtctgacctgcaggatatctctgacagcgagcgcaagacttcttcagcagagagctccagtgccgaaagcggctctggctcagaggaagaggaggaagaagaggaggaggaggaagaagaaggatccacttcagaagagtctgaggaagaagaggaagaagaagaggaggaggaagaagagaccgggagtaatagtgaggaggcctctgaacagtccgcagaggaggtgtcagaggaggaaatgagtgaagacgaagaaagggagaatgagaaccacctcctggtagtgccagagagtcgatttgacagagatagtggcgaaagcgaggaagccgaggaggaggtgggcgaagggacccctcaaagctccgctttgaccgagggggactacgtgccagactctccagcattactgcccattgaactgaagcaggagctgcccaaatacttgcccgcactccaggggtgtcgctcagttgaagaattccaatgcttgaacagaatcgaggaaggaacttatggggttgtctaccgcgctaaggataaaaagacagacgaaattgtggcattgaaacgcctgaaaatggaaaaagagaaggagggcttcccaatcaccagcctgcgcgagatcaacaccattcttaaagcccagcatccgaatattgttactgtgcgggaaatcgttgtgggatcgaacatggacaagatctatatcgtgatgaattatgtagagcatgatctgaaatccttaatggaaactatgaagcagcccttcttaccaggcgaggtgaagacccttatgatccagttactgagaggcgtgaaacacctgcatgataactggatccttcatcgggacctgaagacctcgaatctactcttgtctcacgcaggtattttaaaggtcggcgactttgggctagccagggagtacggctcccctcttaaggcctatacacccgtggttgtcacacagtggtacagggctccggaattgttactgggagccaaagaatattcaactgctgtggatatgtggagcgtcggctgtatttttggagaactattaacccagaaacctttattccccggaaacagcgagatcgaccaaataaataaagtgttcaaagagctgggcacacccagcgagaagatatggcccggttacagcgaactcccggtcgtgaagaagatgacttttagtgagcatccttataacaatttgaggaaaaggtttggtgccctgctcagtgaccaaggattcgacttgatgaataagttccttacctacttcccgggtcggcgtattagcgccgaggatggcctgaagcacgaatatttccgcgagactcccttacccatcgacccaagcatgtttcccacctggccagcaaaaagcgagcagcagcgggtgaaacgaggtacttctcctcgcccacccgaaggcggactggggtattctcagctgggagatgatgatctgaaagagacaggtttccacctgactaccacaaaccagggagcatcagctgccggacctggattttcgctcaagttttag

SEQ ID NO: 219645 - DNA, 114 bp, synthetic construct
  misc_feature 1..114: note = Description of Artificial Sequence: Synthetic coding sequence
  source 1..114: mol_type = other DNA
atgggcgacgagaaagactcttggaaggttaaaactttggacgaaattttacaagaaaagaagcgcaggaaagagcaggaggagaaagccgagatcaagaggttgaaaaattag

SEQ ID NO: 219646 - DNA, 2343 bp, synthetic construct
  misc_feature 1..2343: note = Description of Artificial Sequence: Synthetic coding sequence
  source 1..2343: mol_type = other DNA
atgggcgacgaaaaggactcttggaaggttaagaccctggatgagattctgcaggagaaaaaaaggcggaaggaacaggaggaaaaggcagaaatcaaacgccttaaaaactctgatgatagagactcaaagagagactctctggaagagggagaactaagagatcactgtatggaaatcaccatcaggaattcaccttatcgtagggaagactctatggaagaccggggagaggaagatgattctctcgcaatcaagcctcctcagcagatgtctagaaaggaaaaagtgcaccaccgcaaggatgagaagcgtaaggaaaagtgtaggcatcactcacactccgccgaggggggaaagcatgctcgtgtgaaggagcgggagcacgagaggcggaaacggcaccgtgaagaacaggacaaggcaaggagggagtgggaacggcaaaaacgtagagagatggcgagggagcattctcgcagagagcgggaccggcttgaacaactggagcgaaagcgcgaaagagaacgcaaaatgcgtgaacagcagaaagagcaaagagaacagaaggaacgtgagcgcagagctgaggagcgaaggaaagagcgcgaagcacggcgagaagtctccgcccatcaccggacaatgcgagaagattatagcgataaggttaaagcttctcactggtcaaggtcaccccctcgccctccgcgtgaacggttcgagctgggggacggtaggaaaccagtaaaggaagaaaaaatggaggaacgcgatttgctgtccgatctgcaggatatcagcgacagcgagcgcaagacctcgtctgccgaatccagttcggcagaaagcggtagtggaagcgaggaggaagaagaagaagaggaggaagaagaggaagaagggtctacttccgaggagtccgaagaggaggaggaagaggaggaggaggaagaagaggagacaggctcaaattcagaggaggcctcagagcagagcgccgaggaagtgagtgaagaagagatgagtgaagacgaagagagagaaaatgaaaaccatctgctggtcgtccccgagtcccggttcgatcgcgactcaggagagtctgaggaggcagaagaggaagtgggcgagggtactccccagtcttctgcattgacggagggtgactatgttcccgactctccagccctgctcccaatcgagttgaaacaagaacttccgaaatacctgcccgctcttcagggctgtcgtagcgtagaggagttccagtgtttgaatagaatcgaggaggggacatatggcgtcgtatatagagccaaagacaagaaaactgacgagatcgttgctctgaagcgcctgaaaatggaaaaagagaaggagggctttcccatcaccagtcttcgggagattaataccatactcaaggcacagcatcctaacattgtgaccgtgcgcgagattgtggtggggagcaacatggataaaatatatatcgtgatgaactatgttgagcacgacttgaaatcattaatggagaccatgaagcagcccttcctccccggtgaagttaagaccctcatgattcaactgttgcgtggagtgaagcacctgcatgacaactggattctgcaccgcgacctcaaaacatcaaacctgctgctctcccacgcagggattctgaaagtgggcgactttggtcttgctagagagtacggatcccccctcaaagcttatacccctgtcgtagtcactcagtggtatcgtgccccagagctcctgttgggggcaaaagaatattccaccgcagttgatatgtggtcagtaggatgtatttttggcgaactgttgacgcagaagcccctctttcctggcaatagcgagatcgaccaaattaataaagtgtttaaggaattgggcaccccctccgagaaaatttggcctggctactccgaactgcccgtggtaaaaaaaatgaccttctccgagcacccatacaataaccttcggaagcgcttcggagccctcctcagcgaccagggcttcgatctgatgaacaaattcttaacctactttccgggacggcgaataagtgccgaggatggactgaaacacgagtacttcagagaaaccccccttcccatcgatccttccatgtttcccacttggccagcaaagagtgagcagcaacgcgtcaaacggggaaccagccctagaccacccgagggcggtctaggctactcccagctaggcgacgatgatcttaaagaaacaggttttcacctaacaacaacaaaccagggggcaagtgccgctggacctggttttagcctgaagttttag

SEQ ID NO: 219647 - DNA, 456 bp, synthetic construct
  misc_feature 1..456: note = Description of Artificial Sequence: Synthetic coding sequence
  source 1..456: mol_type = other DNA
atgggcgacgagaaggattcctggaaagtgaagaccctagatgagatactgcaggaaaagaagcgcaggaaagagcaagaagagaaagccgaaatcaaacgcctcaagaacagcgacgaccgagactcgaagagagattctcttgaggaaggtgagttacgagaccactgtatggaaattactatccgcaactccccgtaccggagagaagactccatggaggaccggggagaggaggacgactcactcgctatcaagcccccacagcagatgagcagaaaggaaaaagtgcatcacaggaaagacgaaaagcgtaaggaaaagtggaagcacgccagggttaaggagcgcgagcacgagcgaaggaagagacatcgtgaggaacaggacaaggccaggagggagtgggagagacagaaacgcagagagatggccagagagcactcacgcaggtag

SEQ ID NO: 219648 - DNA, 1263 bp, synthetic construct
  misc_feature 1..1263: note = Description of Artificial Sequence: Synthetic coding sequence
  source 1..1263: mol_type = other DNA
atgggagacgagaaggatagctggaaagtcaagacgctggacgagatactgcaagaaaagaagagaaggaaggaacaggaggaaaaagccgagatcaagcggcttaagaatagcgacgaccgagatagtaagcgcgattccttagaagagggcgagcttagggaccattgcatggaaatcacgattcggaactcgccttaccggagagaggattccatggaggaccggggagaagaggacgacagtctggctattaagccaccacagcagatgagtaggaaggagaaagtacatcatcggaaggacgaaaagagaaaagaaaaatgcaggcaccactcccactcagcggaggggggaaaacacgccagagtgaaggaacgggaacatgaaaggcgtaaacgacatcgcgaggagcaggacaaagccagacgggagtgggagagacagaagcgcagagagatggcccgagaacactcccgtcgcgagagagatcgactcgaacagctggaaagaaaaagggagcgtgagagaaagatgagagaacagcagaaggagcaaagagagcagaaagagagagaacggagagccgaggaaaggagaaaggagagggaggccagaagggaggtgagtgcccaccatcggaccatgcgcgaggattacagtgataaagtgaaagcttctcactggagcagaagcccaccacgaccacccagggagcggttcgagctgggagacggaaggaaaccaggcgaggcgaggccagccccagcacagaagccagcgcagctgaaggaggagaaaatggaagagagggatttgctgtccgaccttcaggacatcagcgactctgagcgaaagactagctccgcagagtcaagttctgcggagtccgggagcggcagcgaggaggaagaagaggaggaagaagaggaagaagaagagggaagcacttctgaggaaagtgaggaggaggaagaagaagaggaggaagaagaggaggaaacaggaagtaactcggaggaagcttcagaacagtccgccgaggaggtctctgaggaggaaatgtctgaggacgaggagagagagaatgagaatcatctgttggtggtgccagagagtcggttcgaccgtgatagtggcgagagtgaggaggcagaagaggaagtaggcttaccggaacggcgaggtgtgcccgtgcccgagcaggacaggggaggtcacttgtggtccgggctccagagtaagaggcaggagaacagatag

SEQ ID NO: 219649 - DNA, 1686 bp, synthetic construct
  misc_feature 1..1686: note = Description of Artificial Sequence: Synthetic coding sequence
  source 1..1686: mol_type = other DNA
atggcaatagccacgtcaacacaactcgctagagccctctatgataacaccgccgagtctcctcaggagctctcctttaggaggggggatgtcctgagagtgctgcagcgtgaaggagcaggaggcctagacggttggtgcctttgctccctgcacgggcagcagggtatagtcccggctaatcgggtgaagttacttccggctgggccagctccaaaaccaagtctttctcctgcctcaccagcgcagccaggctcaccttatccggcaccagaccattcgaatgaagaccaggaagtctacgtggtgcccccaccagcccgaccttgccccacatccgggcctcctgccggtccttgccctccgagccccgacctgatctacaagattccacgcgcaagtgggactcaactggctgccccacgcgacgcattagaagtctatgatgttcccccaaccgcgctccgagtgccatcttccggcccatatgactgccctgcgtccttttcacatcccctgaccagagtggctcctcagccgccaggcgaagatgatgcgccttatgatgtccccctgacgccgaaaccccctgcagagctggagcccgatctggagtgggaggggggaagggaacctggcccacctatctacgctgcaccgtccaacttgaagcgggcatccgctttgctgaacctgtacgaggctcccgaggagctgctcgccgacggggaggggggtggaacggatgaagggatctacgatgttcccctgctcggacctgaggcacccccttcacctgagccacctggcgcactagcatcacacgaccaagacacactggctcagctccttgcgagatcccccccacctccgcacaggcccaggctcccttctgctgagtccttaagtcgtcgacccttaccagcactgcctgtgcccgaggcgccaagcccgagccctgtgccatctccagctcctggcaggaagggatcaatccaggatcgcccacttccccctccgccaccacggcttcccggatacggcggaccaaaagttgagggggaccctgagggacgcgagatggaggacgatcccgcaggccaccataacgagtacgaggggatccccatggctgaggaatatgattatgtgcatttgaaaggtatggataaggcccagggatccagacccccagaccaggcctgtacaggtgacccggagctgcccgagcgcggtatgccggctccccaggaggctttatctcctggcgaacctttagttgtctctacaggtgatctgcagttgttgtacttctacgcaggacagtgccagagtcactattccgccctgcaagccgcagttgctgccctgatgtccagtactcaagcaaaccagcctcccagactgttcgttccccactcaaagcgagtcgtcgttgctgcgcaccggctggtgtttgtgggtgataccctcgggaggttggccgcttcagcccctctgcgggcacaggtaagggctgcagggactgccctcggacaggcccttagagccaccgtcctggcagtgaaaggcgcagccctagggtacccatcttccccagcaatccaagagatggttcagtgtgtcacagaactcgctgggcaggctctgcagttcacaaccctcctgacatcactcgccccatag

SEQ ID NO: 219650 - DNA, 684 bp, synthetic construct
  misc_feature 1..684: note = Description of Artificial Sequence: Synthetic coding sequence
  source 1..684: mol_type = other DNA
atgaacgggactatttacgccaacgaatgtcagcagatccggcatcccaacagcaaaactttggggacagtgacccctcgtaagcccgtcttgtccgtatccgctcgcaagatcaaggataacgcagcagactggcataaccttatcctgaaatgggaaaccctgaatgatgctgggttcaccacagctaataacatagctaaccttaagatatcactactaaataaggataagatagaactcgactcctcttcgcccgcatcaaaggagaatgaggagaaggtctgcctggagtacaatgaggaactggagaagctatgtgaagagcttcaggctaccctggacggcctgacgaagatacaggtgaaaatggagaaactcagcagtactacaaaggggatctgtgagctggagaactatcattatggggaagagtccaagagacccccactgtttcacacttggcctaccacgcatttctacgaggtttcgcataaactactggaaatgtatcggaaagagctgttgttgaagcggaccgtcgccaaggaactcgcacacactggcgacccagatctgactctttcctatctcagcatgtggctgcaccaaccatatgttgaatctgattcaaggcttcacttggagtcaatgctgctggagaccgggcaccgggctctctag

SEQ ID NO: 219651 - DNA, 357 bp, synthetic construct
  misc_feature 1..357: note = Description of Artificial Sequence: Synthetic coding sequence
  source 1..357: mol_type = other DNA
atggaagccaagactttaggaactgtgaccccccgaaagccagttctatcagtctctgcacgaaaaatcaaggataacgccgcagattggcacaacttgattttgaagtgggagaccctcaatgatgccggttttaccacggctaataatatcgctaaccttaaaatatccctgctcaacaaggacaaaatcgaactcgacagctccagccccgcatccaaggaaaacgaagaaaaggtatgcctggagtataacgaggagctggagaaactctgtgaagaattacaggcgaccctggacggcctcatgcgctttaggattagctcatggcgttgcaccggaagaagttgcagttag

SEQ ID NO: 219652 - DNA, 639 bp, synthetic construct
  misc_feature 1..639: note = Description of Artificial Sequence: Synthetic coding sequence
  source 1..639: mol_type = other DNA
atggaggcgaagacactgggcactgtgacccccagaaaacctgttctgtctgtgtctgctcgcaaaatcaaagacaacgctgctgattggcacaacttaatcttgaaatgggagacactcaacgatgctggttttacaactgccaataacatagccaatctcaaaattagcctgcttaacaaagacaagatcgagttagattccagttccccagcctccaaagagaatgaggagaaggtttgcttggagtacaatgaagaactcgaaaagctgtgtgaggagttacaggccacactggacgggttaaccaaaatccaggttaagatggagaaactgagttcaacaacaaaaggaatttgcgagctggaaaactatcattacggagaggagtccaaacgaccgccactctttcatacctggccaaccacccatttttacgaggtttcacacaaactgctcgagatgtacaggaaagagctcctgctcaagcgtacagtggcaaaggagctcgcccacacaggcgatcccgatctcaccttaagttatcttagtatgtggctgcatcagccatacgtggagtctgactcaaggttgcaccttgagagcatgctgctagaaacagggcacagggctttgtag

SEQ ID NO: 219653 - DNA, 918 bp, synthetic construct
  misc_feature 1..918: note = Description of Artificial Sequence: Synthetic coding sequence
  source 1..918: mol_type = other DNA
atggacatgtttcagaaggtggaaaagattggcgaaggcacttacggagtggtgtacaaggccaagaacagagagaccggccaactggtggcgctcaaaaagattcggcttgatctcgagatggagggcgtgccttcaactgccattcgggaaatcagtctcttgaaggagctgaaacatcctaatattgttcggcttctcgatgtggtgcataatgagaggaaactgtatttagttttcgaattcctctcacaggatctgaagaaatatatggattcaacccccggaagtgaactcccacttcatctgattaagagctacctgtttcagttactgcagggggtgagtttctgccattctcatagagtgatccacagagacttaaaaccccaaaacctgctcatcaacgagctcggagccattaaattggctgattttggcctcgctcgcgcttttggtgtaccactgcgtacatacacacacgaggtcgtgaccctttggtatagagcgccagagattctgctgggcagtaagttctatacgactgctgtggacatttggagcattggatgcatatttgcggagatggtgacaagaaaagctttgttccctggagacagtgagatcgaccagttgttcaggatcttccgcatgcttgggaccccatcggaagacacatggcctggcgtgacgcagcttcctgattataagggatccttccctaaatggacccggaaggggcttgaagagatcgtgcccaacctagaacctgagggtagggacctgctgatgcagctgctacagtatgatccatctcagagaatcacagctaaaacagctctggctcacccatatttttccagcccggagccatcccccgcagccaggcagtacgtcctccagcgtttccgccactag

SEQ ID NO: 219654 - DNA, 918 bp, synthetic construct
  misc_feature 1..918: note = Description of Artificial Sequence: Synthetic coding sequence
  source 1..918: mol_type = other DNA
atggacatgtttcagaaagtggagaaaattggagagggcacttacggagtggtttacaaggctaaaaatagagagaccggacaacttgtagctctgaaaaaaattcgactggacctggaaatggagggcgtgcctagtactgccattagggagattagcctgttaaaggagcttaaacatcctaacatcgtgaggctgctggacgttgtgcacaatgagagaaagctgtatctggtattcgaattcctcagccaggacctgaagaagtacatggacagcactccaggcagcgaacttcctctgcatttgattaagtcttacctttttcagctcctgcagggagtcagcttctgccactcccatagagttatccaccgcgatctaaagccccagaatctgctgataaatgagctgggagcaataaagctggcagattttggactggccagagcattcggcgtgccactccgaacatatactcatgaagtcgtgacattgtggtaccgggctccagagatcctactcggttctaaattttacactaccgctgttgacatctggtcaatcgggtgtatattcgccgaaatggttacacggaaagcactgttccccggagattcagagattgaccagttattcagaatcttcagaatgttaggcacgccatcggaggacacttggcctggtgtgactcagctgcctgactataagggaagttttcctaagtggaccagaaaggggctggaggagattgttccaaatttggagcctgagggcagagacctgttgatgcagctccttcagtacgatccctcccaacggatcaccgctaaaacggccctagcacacccctacttttctagccccgagccttctcctgctgcccgacaatacgtgctccagcgtttccgccattag

SEQ ID NO: 219655 - DNA, 879 bp, synthetic construct
  misc_feature 1..879: note = Description of Artificial Sequence: Synthetic coding sequence
  source 1..879: mol_type = other DNA
atgcaaaagtatgaaaaactagagaagatcggggagggcacatacggcactgtctttaaggcaaaaaatcgggagacacacgaaattgttgccctgaagcgcgtcagactggatgatgacgatgagggagtaccttcttcggcactgagggagatttgcctgctcaaggagctgaagcacaaaaacatcgttcggctgcatgatgtgctgcactccgataaaaaactgaccttggttttcgagttttgcgatcaggacctgaaaaaatacttcgattcgtgcaacggggacctagacccggaaattgttaagtccttcctgttccagcttctgaagggccttggattctgtcattctagaaacgtactgcaccgagacttgaagccccagaacttactgatcaacaggaacggagaactgaagctcgccgatttcggcctggcgagggcctttgggattcctgttcggtgttatagcgcggaggtcgtgaccctctggtacaggcccccagatgtgctttttggtgctaaattatatagtacaagcatcgacatgtggtccgccggttgcatttttgccgaattggcaaatgcaggacggcctttattccctggaaatgacgtggatgaccagttaaagaggattttcaggctgctggggacccctacagaggagcaatggcctagcatgactaagctccctgactacaaaccgtacccgatgtaccccgcaaccacctccctggtcaacgtagttcccaagctcaacgcaactgggcgagatctactgcagaacttgctgaagtgtaatccagtacagcgaatatccgccgaagaggcgttacagcacccctatttttcggatttttgccctccctag

SEQ ID NO: 219656 - DNA, 783 bp, synthetic construct
  misc_feature 1..783: note = Description of Artificial Sequence: Synthetic coding sequence
  source 1..783: mol_type = other DNA
atgcagaaatatgaaaaactcgagaagatcggcgaggggacttatggaacggtgttcaaagctaaaaaccgagagactcacgaaatcgttgcgctcaaacgcgtgcgactcgacgatgacgacgaaggcgttccttcatccgcgttaagagaaatctgtctgcttaaagagttgaagcataagaacattgttagactccacgacgtcctccattctgataagaagctgactttggtgttcgagttttgcgaccaggatcttaaaaaatattttgatagttgcaacggagatctcgaccctgagatagttaagaatggcgagctgaagttagctgactttggattggccagggccttcggcatccccgtgagatgctattctgcggaggtcgtgaccctgtggtatagaccacctgacgtgctgttcggcgcaaaactctattctacatcaatcgatatgtggagtgccggttgcatatttgccgaactcgctaatgcaggcaggccccttttccccggtaacgatgttgacgatcagctgaaacgaatttttcgcctgctaggaacacccacagaagaacaatggccttctatgactaaactgcccgattacaaaccctaccctatgtatcccgctacaaccagcttggttaacgtcgtcccaaaacttaatgcaaccgggcgtgaccttctgcagaatctgctgaaatgtaatcccgttcagcggatctcagctgaagaagccctacagcatccgtacttcagtgacttctgtcctccctag

SEQ ID NO: 219657 - DNA, 1104 bp, synthetic construct
  misc_feature 1..1104: note = Description of Artificial Sequence: Synthetic coding sequence
  source 1..1104: mol_type = other DNA
atgggaacggtcctgagcctctcgccagcttcttccgccaaaggccgtcgacccggtgggctcccggaggagaaaaagaaagcccctcccgctggagacgaagccctggggggatatggagcaccccctgtcggaaagggaggcaaaggcgagagccggttgaagcgcccaagcgtactgatcagcgcgcttacatggaagagattagtggccgcaagtgctaagaaaaaaaagggcagcaagaaagtgaccccgaagcctgccagtacaggtccagatccattggtgcagcaacgcaatagagagaatctgctgcgcaaggggagggaccccccagacggcggtggcaccgctaagccacttgctgtcccagtgccaacggtccccgctgcagcagccacctgtgagccccctagcggagggagcgcagccgcacagccccctggatctggagggggtaaaccccctcctccaccacctcctgcaccgcaagtggctccccctgtgccgggagggagccctagaagggtgattgttcaggcttcgacaggagagctgctgaggtgcctgggtgacttcgtgtgcagaaggtgctaccgcctaaaagaactctctccaggtgagctggtgggatggttcaggggggtggatcgcagcctcctgcttcagggctggcaggaccaggctttcatcactcccgctaaccttgtgtttgtgtatctgttatgcagggaaagcctccgaggagatgaactcgcctccgctgccgagctccaggctgcatttttgacgtgtctgtatttagcctattcctatatgggcaatgagatctcatatcctctgaagccctttcttgtggaacctgacaaggagcgtttttggcagcgatgccttaggcttattcaacgcctctcgccacaaatgctccgtctgaatgccgacccccacttctttacacaggtttttcaggatctcaaaaacgaaggagaagctgccgctagcggtgggggacctccttcagggggagcaccagcagcttcatctgccgcacgtgattcctgcgccgctggtaccaaacattggaccatgaatcttgataggtag

SEQ ID NO: 219658 - DNA, 1779 bp, synthetic construct
  misc_feature 1..1779: note = Description of Artificial Sequence: Synthetic coding sequence
  source 1..1779: mol_type = other DNA
atggaaatgtacgagaccctcgggaaggtcggagagggctcctacggaactgtgatgaaatgcaaacataagaacaccggccagatagtggctatcaagatcttttacgagagaccggaacaatccgtcaacaagatcgcgatgcgagagataaaattcctgaaacagttccaccatgagaatcttgttaatctcatcgaagtgtttagacagaaaaagaaaatacacctggtgtttgaattcatcgaccataccgtactcgatgagctgcaacactactgtcacggcctcgagagcaagaggcttcgcaagtacctgtttcaaatcctgagagctattgactacctgcatagtaataacattattcacagagacatcaagccagagaacattctggtttcccaatcggggatcactaagctttgcgattttggatttgcgagaacattggctgcacctggagacatctacaccgattatgtggccacccggtggtaccgggctcccgagctcgtcctaaaggacacatcgtacggcaagcctgttgacatctgggctctaggatgcatgatcatcgaaatggcaacggggaatccttacttgcccagctccagcgacttggacctcttgcacaaaattgtactcaaagtgggaaatttatctccacatctgcagaacattttctccaaatcacctatatttgcaggtgtcgttcttccccaggtgcagcatcctaaaaacgcaagaaagaagtaccctaagctgaacggtctgctagctgatatcgtccatgcctgtttgcagatagaccccgctgatcggatctcttcttcagacctgcttcaccacgagtacttcaccagagatggcttcatcgaaaaatttatgcctgagctcaaagccaagctgctgcaagaggcaaaggttaattctctgatcaagccaaaagagagctcaaaagaaaacgaactccggaaggatgagagaaaaactgtgtataccaatacactcttatcctcaagtgtgctgggcaaagaaattgagaaggagaaaaagccaaaggagattaaggtgcgagtgattaaggtcaaaggcggacggggagacattagcgagccaaaaaaaaaggagtacgaaggtggactggggcagcaggatgctaacgagaacgttcatccaatgtcccccgacacaaagctggttacgatcgagcctcccaatcccatcaatccttccacgaactgcaatgggctgaaagaaaatccccactgcgggggatctgttaccatgccaccaataaacctaaccaacagcaatctgatggcagcgaacctctcctccaatctgtttcatccatccgtccggctgacagagcgcgcaaagaaacgcagaactagttcccaatctattgggcaggtgatgccaaattccagacaggaggatccagggcctattcaatctcagatggagaaaggtattttcaacgaacggacaggtcattctgaccagatggctaatgaaaacaagcgcaaattaaacttcagtaggtccgacaggaaagagttccattttccagaactgccagtgactattcaatccaaagatacgaagggcatggaggtcaaacagatcaagatgctcaagagggagtccaagaaaacagaatctagcaaaatccctacattgttaaacgtggaccagaatcaggaaaaacaggaaggtggagacggccactgtgaggggaaaaacctcaaacgtaacaggttcttcttttggtag

SEQ ID NO: 219659 - DNA, 1368 bp, synthetic construct
  misc_feature 1..1368: note = Description of Artificial Sequence: Synthetic coding sequence
  source 1..1368: mol_type = other DNA
atggagatgtacgagactttaggcaaagtcggagagggatcctacggaacagttatgaaatgcaagcacaaaaatacaggacagatagtagctataaaaattttttacgagcgtcccgaacaatccgtaaataagatcgccatgcgagaaattaaattcctcaagcagttccaccacgagaatttggtgaacctgatcgaggtgtttcgacaaaagaagaagattcacttggtgttcgagttcatcgatcatactgtgctggacgagcttcaacactattgtcacggcctggagagcaagcgtcttagaaagtacctgttccagattttgagggcgatagactaccttcacagcaacaatatcatccatcgcgatatcaagcccgagaatattttggttagtcagtctggtatcactaagttgtgtgactttggattcgccaggaccctcgccgctccaggcgacatttatacagactatgtagcaacaagatggtaccgcgcacccgagctcgtgctgaaagacaccagttatggcaagccagtcgatatctgggctttgggttgtatgattatcgagatggcaaccgggaatccctacttgccaagttccagcgatctggacctgttgcataagattgtgctgaaagtggggaacttgtcaccacacctccagaatatcttcagcaagtctccgatttttgccggagttgtcttgcctcaagtgcagcaccccaagaacgcgaggaagaaatatcctaagctcaatggactccttgccgatatagtgcacgcttgcctgcaaattgatccagcggatcggatctctagctccgacttgctacaccatgagtatttcacacgggacggcttcattgagaagtttatgccagagttaaaggctaagctcctgcaggaggctaaagtcaacagcctgattaaacctaaggaatcgtcgaaggaaaatgaattgaggaaagatgagaggaaaactgtgtatacaaacaccctgctctcctcttccgtgttgggtaaggagattgagaaagaaaaaaaacccaaggaaatcaaggttcgcgtaatcaaggtgaaaggcggacgcggagatataagcgaacctaaaaaaaaagagtatgaaggcggtctgggccaacaagacgcaaacgaaaatgtacatcccatgtcacctgatactaaactggtgaccattgaacccccaaacccaatcaatccgagcactaactgtaatggcctgaaagagaatccccactgcggcggatcagtgacaatgccgccaattaacctgaccaatagcaatttgatggcagcaaatctgtcaagtaacctgtttcacccaagtgtgcgctag

SEQ ID NO: 219660 - DNA, 1092 bp, synthetic construct
  misc_feature 1..1092: note = Description of Artificial Sequence: Synthetic coding sequence
  source 1..1092: mol_type = other DNA
atgccagaattaaaggcgaagctgctgcaggaggctaaggttaactccctgatcaagccgaaggaatcctctaaggagaacgaactccgcaaggacgagaggaaaacagtatatacaaatactctattgtcttccagcgttctgggaaaggagatagagaaagaaaagaagccaaaggaaatcaaggtccgcgtgataaaggtcaagggcggacgcggtgatatatctgagcccaaaaaaaaggagtacgagggtggactgggccagcaggacgccaacgagaatgtacaccccatgagtccagatacgaagctggttacgattgagccacccaatccaattaacccatccaccaactgcaatggattaaaagagaacccacactgcgggggatcggtcacaatgcctcccattaatctgactaatagtaacttaatggctgcaaacctgtcttcaaatttgttccatccctctgtcagactgaccgaacgggcaaagaagcgcaggacttccagccagtcgatcgggcaggtaatgccaaattcacgccaggaggatcctgggccaattcagagccagatggagaagggcatttttaacgagaggactggtcatagcgaccagatggctaacgaaaacaaacgaaaactgaacttttctcgctcggaccgcaaagaatttcactttccggagctgcccgttactattcagtctaaggataccaagggcatggaagtcaaacagattaaaatgctgaagcgagaatccaagaaaaccgagagttctaagattccgacactgctcaacgtggaccagaaccaggagaagcaagagtttattccgctctcgttattgagcgcctgctgtccaatttttacaaatatatgctcacagcttactatcaggtatgtattcattagtggaatgaagaccgaccagtacagtgagctggtgcccgtcgagtggggcatcgctgaaaagatccccaaaaacgtcgaagcgaccctcgagctcgggaataggcagcgctttgagcagtttggtgagctgaggcgccgtcaggaaaatgtgggaaagttcggtaccttctag

SEQ ID NO: 219661 - DNA, 1773 bp, synthetic construct
  misc_feature 1..1773: note = Description of Artificial Sequence: Synthetic coding sequence
  source 1..1773: mol_type = other DNA
atggagatgtacgaaacactggggaaggttggagagggatcctacggaaccgttatgaaatgtaaacataagaatactggccagatcgtggcaatcaagatcttctacgagcggcctgagcagtccgtcaacaagattgcgatgcgggagataaaatttctaaaacagttccaccacgaaaacctcgtgaatttgattgaagtcttcagacagaaaaaaaagattcacctggtgttcgagtttatcgaccatacggtcttggatgagctgcagcactactgccatgggctggagtccaagagactgcggaaatacctgttccagattctgagggctatcgactatctgcatagtaataatattattcatcgggatatcaagcccgaaaacatactggtcagccagagtggcatcaccaagctgtgcgatttcggtttcgcgagaaccctggccgctcccggagatatctatacggactacgtggcaacacgctggtacagggctcccgagcttgtgctgaaggacaccagttatggtaaacctgtggatatttgggcgctgggatgcatgatcatcgaaatggctacgggcaacccctatttgccttcatcatccgatctggacctgctccacaagattgtgctgaaagtggggaatctctctccacatctgcaaaacatcttcagcaagagccctattttcgccggagttgtcctaccccaggtccagcacccaaagaacgcccgtaaaaaataccctaaacttaatggtctgctggccgacattgtacatgcatgtctgcaaatcgatcctgccgaccgaatctcctcatctgatctgcttcaccacgaatactttacccgggacggatttatcgaaaaattcatgcccgaactcaaggccaagcttctccaagaggccaaggtcaactcactgatcaaacctaaggagagttctaaggagaacgagctacgcaaagacgaacgcaagacggtgtacaccaataccctcctgtcgtcatctgtcctcggaaaggaaatcgagaaggaaaaaaaaccaaaggaaattaaggtccgtgtcataaaagtaaaaggaggtcgtggagacatttccgaacccaaaaaaaaggaatacgaagggggattgggacagcaggatgctaatgagaacgttcaccccatgagtccagataccaagctggtgacgatcgagcccccaaatcctattaatccctctactaactgcaacggattgaaggaaaatccccactgcggagggtccgtgacgatgcctcctattaatctcacgaattccaaccttatggcagcaaatctgagttccaatctgttccaccctagtgtcagactcactgagcgggctaaaaagaggagaacatcctcccaaagcatcgggcaggtaatgcccaattctcggcaagaggatcctgggccaatccagagccagatggagaaggggatctttaacgagcgcacagggcattcggatcaaatggcaaatgagaataagcgcaaactgaacttcagccgatccgacaggaaagagttccatttccctgagctgccagtgacaatacagagcaaggacactaaggggatggaggtgaaacagataaagatgctgaagcgtgaatctaagaagacagaatcaagcaagattcccacattacttaacgtggaccagaatcaagaaaagcaagaaaataccggtaatgctcagacagaaagaaaaaaaaacttgccagatgtcgaatag

SEQ ID NO: 219662 - DNA, 1368 bp, synthetic construct
  misc_feature 1..1368: note = Description of Artificial Sequence: Synthetic coding sequence
  source 1..1368: mol_type = other DNA
atggagatgtatgaaaccttagggaaggttggagaaggatcctatggaaccgtgatgaaatgcaaacataagaacaccggacagattgtggccattaagatattttacgagaggcccgagcagtccgttaacaaaatcgctatgcgagagataaagttcctgaaacaatttcaccatgagaatctggtaaacttgattgaagtgttccgccagaagaagaagatccacctcgtgttcgagttcatcgaccacaccgttttggatgagctgcagcactactgccatgggcttgaatctaaacgccttcgcaaatacctctttcagatactgcgggctatcgactatttgcactctaataacattatccatagggatatcaaacctgaaaatatcctggtaagccagtcggggataactaaattatgtgatttcgggtttgctagaacccttgcagctccaggggacatctatacagactatgttgctacccgatggtatcgagccccagagttagtgctgaaagacacgtcctacggcaaaccagtggatatttgggcgcttggttgtatgattattgagatggccactggaaatccataccttccatcaagctcagatttagatctacttcataaaatcgtgctcaaggtcgggaacctctcccctcatctgcagaatatcttcagcaaatctccaattttcgctggtgtggtgctgccgcaagtgcagcatcccaaaaacgcacgtaagaagtatcccaagctgaacgggctgcttgctgacatcgtccacgcctgtctccagattgatcccgcagaccgaatcagcagtagtgatctactgcatcatgaatattttactagagacggctttattgagaagttcatgccagaattgaaagctaagttgttgcaagaagcaaaagttaactccctgattaagccaaaggagtccagtaaagaaaatgagcttagaaaggatgagcgaaagaccgtctacacaaatacacttctgtccagcagcgtcctgggaaaggagatcgaaaaggaaaaaaagcccaaagaaattaaagtgcgggtgatcaaagtgaagggtggcagaggagatatctcagaacctaagaaaaaagaatacgaaggaggcctaggccagcaggatgccaacgaaaatgtccatccaatgtcaccggacaccaagcttgttacaatcgaaccacctaatcctataaacccttctacaaactgtaacgggttgaaggagaacccccattgcggagggagcgtcacaatgccacccattaacttaaccaatagtaacttgatggccgcaaacctctctagtaatctgtttcacccctcggtcaggtag

SEQ ID NO: 219663 - DNA, 876 bp, synthetic construct
  misc_feature 1..876: note = Description of Artificial Sequence: Synthetic coding sequence
  source 1..876: mol_type = other DNA
atgccggagttgaaagccaagctgctgcaggaagcaaaggtgaatagccttatcaagcctaaggagtcatccaaagagaacgaactgcgtaaagacgagagaaagaccgtctacacgaacaccctcttgtctagctccgtgctgggaaaagagatagaaaaggaaaagaagcctaaggaaattaaggtaagggtcattaaggtcaagggaggtcggggagacatcagtgaacccaaaaaaaaggaatacgaaggtggcctcggccagcaggatgctaatgagaatgttcacccaatgtccccagacacaaagctggtcaccattgaacccccaaatccgatcaaccctagcaccaactgcaacggtctgaaggagaacccgcactgcggaggaagcgttacaatgccccctatcaatcttaccaattctaacctcatggccgcaaatttgtccagcaaccttttccatcctagcgtcagactgaccgagagagcgaagaagagacgcacatcttcccagtcaatcggccaggtgatgccaaattctcgacaggaggatcccggtccgatacaatcccagatggagaaaggtatattcaatgagcgtacagggcattccgaccagatggctaacgaaaataagcgcaagctgaacttttctaggagcgacaggaaagaattccacttcccagaactaccagtaacaatccagtctaaagacaccaaaggcatggaggtgaaacaaattaagatgctgaagcgagagtctaaaaagaccgagagtagcaaaatcccaacactgctaaacgtcgatcaaaaccaggagaagcaggaggtacggctttaccagcggcacgaggatagacctatccaatag

SEQ ID NO: 219664 - DNA, 3093 bp, synthetic construct
  misc_feature 1..3093: note = Description of Artificial Sequence: Synthetic coding sequence
  source 1..3093: mol_type = other DNA
atgaagattccaaatattggcaacgtaatgaataaattcgagattctgggtgtggttggcgaaggggcttacggcgtcgtgttgaagtgtcgtcataaagagactcacgagatcgttgccatcaaaaagttcaaagacagcgaagaaaatgaggaggtcaaagagacaaccctgcgggagttaaaaatgctgaggacgctgaagcaggagaatattgtggagttaaaagaggccttcagaagaaggggaaaactctacctggtgtttgaatatgtcgagaaaaacatgctcgagttactggaggaaatgcccaacggtgtccctcccgagaaagtgaagagttatatttaccagctcatcaaggcgatccactggtgtcataagaacgacattgttcatagggatatcaaacccgagaatctgctcatctcccacaatgacgtgttaaaactttgtgacttcgggtttgctagaaatttgagcgaaggaaataatgctaattacactgagtacgtcgctacacgttggtaccgatcccccgaactactcctgggtgcaccttacggtaagagcgtcgatatgtggtccgttggctgcattttaggggagctcagtgatggacagccgctcttcccaggagagagcgagatcgaccagctcttcaccatccagaaggttttgggccctctgcccagcgagcaaatgaagctgttctacagcaatcccaggtttcatggactccgctttcctgcagtcaaccatccacaatccctggaacggcgttatctggggatcttgaactcggtgctcctcgacttaatgaagaatcttctaaagcttgacccagcagaccggtatttgaccgagcagtgcctcaatcatcccacattccagacccagcgcctcctcgatcgttctccttcacggtctgccaagagaaaaccatatcacgtggagtcgtcaacactcagtaatcgcaatcaagctgggaaaagtacagccctacagagtcatcaccgatctaacagcaaggacatacaaaacctgtcagtgggcctgcctagggccgacgaaggcctcccggctaacgaatctttcttgaacggaaacttggccggagcatctctctcccccctgcacactaaaacatatcaggcctctagccagccgggaagcacctctaaggacctgacaaacaataatatcccgcatctactgtctccgaaggaggcaaaatcaaagacagagttcgattttaatatcgaccctaagccaagcgagggacccggaactaagtatctgaaatccaattctcgcagccaacaaaatcgacatagttttatggagtccagtcagagcaaggcaggtactctgcagccaaacgagaaacagagccggcactcatacatcgataccataccccaatccagtcgcagcccgagttaccggacgaaggctaagtctcatggcgcactgagtgattcaaagtccgtgtctaacctgagtgaagccagagcccaaatcgcggagccatccacttccaggtattttccctcctcttgtctggatttgaactcacccacatcacctacacctacccgtcatagcgacaccaggacactgctaagcccctcaggccgaaataaccgtaatgaaggcaccttagacagtcgacgcaccaccactcgacattccaagacgatggaggaactcaaactcccagagcacatggattcctcccatagtcattcactctccgccccacatgagagcttcagttacggtttgggctatacctctcccttctcatcccagcagagaccccaccggcactccatgtatgtgaccagagataaggtaagagccaaggggctggacggcagcctgagcatcgggcaagggatggccgctagagcaaactctctgcagctcctgagccctcagccgggagagcagttgccacctgaaatgacagtcgccagatcctcggttaaggaaacctcaagagagggcacgtcctccttccacacccgtcagaagtccgagggaggagtctatcacgatccacacagtgacgatggtacggctcctaaggagaaccgtcacctgtacaacgaccctgtcccaagaagggttggcagcttctatcgggtgcctagtcctaggccagacaactccttccacgaaaataacgtaagcactagagttagctctttgccctcagaatctagtagcggtaccaatcatagtaaacgtcagccggctttcgacccatggaagagccctgagaacatctcccattctgagcaacttaaagaaaaggagaagcagggctttttccgttccatgaagaaaaagaagaaaaagtcgcagaccgttccaaacagtgactcaccagacctgctgaccttgcagaagagtattcattctgcttccacccccagctccaggcctaaagagtggagacccgaaaagatctctgatctacaaacgcagtcacaacctctgaagagcctaaggaaattattacacctctcatcagcgagcaatcaccctgctagcagcgatccccgttttcagccactgaccgcacaacagacaaagaattctttcagtgagattcggatccaccccctgtcgcaagctagtggcggttcatccaacattcgccaggaacccgctccaaagggcaggcctgctttgcaattaccagacggtggttgtgacggtagacggcagaggcaccacagcggtccgcaggatcggcgtttcatgctaagaacaactgagcaacagggagagtatttttgttgcggcgatcccaagaaaccccacacaccttgtgtgccaaatcgcgcactccatcgaccaatcagctcccctgcgccataccctgttttgcaagtacgagggaccagtatgtgtcccacactccaagtccggggtaccgatgcattctcttgcccgacccagcaatccgggttttcatttttcgtgaggcacgtgatgcgggaggccttgatccatagagctcaagtgaaccaagccgcacttctgacgtatcatgagaatgcggctctcacaggcaagtag

SEQ ID NO: 219665 - DNA, 3093 bp, synthetic construct
  misc_feature 1..3093: note = Description of Artificial Sequence: Synthetic coding sequence
  source 1..3093: mol_type = other DNA
atgaaaattccaaatatcggtaacgtgatgaacaagttcgagattcttggagtcgtgggggaaggcgcttacggcgttgtgctcaagtgtagacataaagagacccatgaaatcgtcgccatcaaaaaattcaaagacagcgaggaaaatgaggaggttaaggagaccacactgcgagagttaaaaatgctgcgcactcttaagcaggagaatattgtggagttgaaggaggctttccgacggaggggcaagttgtacctcgtgtttgagtacgtcgagaagaacatgttggaacttttggaagagatgccgaacggagtgccccctgaaaaagtgaagtcatatatctaccagcttattaaggcgatccactggtgccacaagaacgatatcgtgcatcgagacatcaaaccggagaatcttctgatttcacacaacgacgttctgaaattgtgtgatttcggttttgcacggaacctttccgagggcaataacgctaattacactgaatatgtcgccacaaggtggtatcggtcaccagaactgctgctaggggcaccttacggaaagtcagtggacatgtggagcgtgggatgcatcctcggggaactttctgacggccagccactatttccaggtgagtcggagattgaccagctatttacaattcagaaggttctggggcctcttccctctgagcagatgaaattgttctattcgaaccccagattccatggcctccgtttcccagcagtcaatcacccacagagtttggagcgtagatatcttgggatattgaactcggtgctcctcgatttaatgaaaaacctcctgaaactcgaccccgctgataggtacctgacggagcaatgtctaaatcatccaacattccagacgcaacggctgctggatcggtccccatcgagaagcgccaaacgaaaaccctatcacgtggaaagctcaacactgagcaacagaaatcaagcgggaaagtccaccgcattgcagtcacaccatcgctctaattccaaagacatacagaacctgtcggtgggcctgccaagagccgacgagggcctgcctgctaatgagtcattcttgaatggcaacctggccggagcaagcttgtccccattgcacacaaaaacgtatcaggctagctcacaacctggttccacgagcaaagacctaaccaacaacaacatcccgcatctgctaagcccaaaggaagctaaaagcaaaacagagtttgatttcaacatcgatcccaagccgtctgagggcccaggaaccaaatatttgaagtccaattctaggagccagcagaatcgacacagctttatggagtcctcacagtccaaagctggaactctccagcctaacgaaaagcagtcccggcactcttatatagacactattccccagtcaagccggtctccgagctatcgcacgaaagccaagagccacggcgctctgagcgattccaaatcggtgtcaaatctgagcgaggccagagcccagatcgcagagccctctacatctaggtacttcccttccagttgccttgatctgaactcacctacctcacccactccaactaggcactcagatacgcgtacactcctttccccatcaggaagaaacaacagaaacgaagggactctcgactcccggaggaccacaacccgccacagtaagacaatggaggagcttaagttgcccgagcatatggattcatcccactcacacagcctatcagctccacacgaaagcttcagctacgggctgggatacacctctccattcagctcccaacagagaccccatcggcattccatgtacgtgactcgggataaggttagggccaaggggctggacggcagcctctcgataggccagggcatggctgccagagccaacagtcttcagctcttatctccacagccgggagagcagctgccgcctgagatgacggtggccagatccagcgtcaaggagacctctcgcgaagggacgtccagctttcatactaggcagaagagtgaaggcggtgtgtatcacgatccccacagcgacgacggcaccgcacctaaagagaacagacatctctacaatgacccggtccctcgacgggtggggagcttctatcgggtcccctccccacggcctgataacagttttcacgagaataatgtgagtactagggtcagcagcctcccatccgagtcctcctctggcaccaaccattccaaaaggcaacctgccttcgatccgtggaagtcaccggagaacatttcacactccgagcagctcaaagagaaggagaagcaggggttttttaggtctatgaagaaaaagaaaaagaagtctcagaccgtgccaaatagcgactctccggatctcctgaccctccagaagagcatacattctgccagcacaccctcctcaagaccaaaagaatggagacctgagaagatctccgatctccagacccagtcccagcctctaaaaagtctgagaaagctgctgcatctaagctctgcttcgaatcaccccgcatcctcggaccccaggttccaaccattaacagctcagcagacgaaaaattccttctctgaaatccgcatccaccctctcagtcaggcctctgggggtagctcaaatattcgccaggaaccagcccctaagggtaggcctgccttacaattacctgatggaggatgcgacggcagaaggcagagacatcacagcgggccacaagaccggaggtttatgttacggaccactgagcagcagggcgagtatttttgctgtggagacccaaagaagccccacaccccatgtgttcctaacagggcccttcacagacctattagtagccctgccccatacccagttttacaggttcgtggcaccagcatgtgccccacgttgcaggtgagaggcactgatgcttttagctgtcctacccagcagtccggatttagctttttcgtgcgccacgtcatgcgggaagctctgattcaccgcgcacaggtgaatcaggccgcattactgacataccatgaaaatgccgctctgacgggcaagtag

SEQ ID NO: 219666 - DNA, 1956 bp, synthetic construct
  misc_feature 1..1956: note = Description of Artificial Sequence: Synthetic coding sequence
  source 1..1956: mol_type = other DNA
atgtctttgccaagactgctgaaggtgaacattaggacatacgacaattccattcccatcagtgaatcgtctcgtaagtcgtggaatcagaagcatttcgccttaacatttcctaagcctctccagcgcggtactaatgacaagtcacgacctctgaagagtcaaatcaccgttacccgacatgataagaggaagttggaagaggggcaaaagccggctcataaatggatccgtcactctttccggaagattcttcagtggccgcctatttatacagccgcaagagagcaaactcccttcaggcacctatacactagtaagacccacctcaaaaaagctgagtataaaaagagcaaggatgaaaaaggtggaacacccctaaagaaggacagcaagaagaagggcggatcatatgctacgaatccagaaagcaagcagatcgtcgaggagaaaacaaagagacagaatgaggcggacaaaacacccctaaagtcctctcatgagaacgagcagtcaaaaaaaagcaaaagttcaagtgagactaacccagaaagccagaactctaagaccgtttctaaaaactgcagccagaaagacaaaaaggactcaaagaactcaaagaaaacgaatacggaattcctgcacacaaaaaacaacccgaaaaaagatctcaagcgatccaagactagcaacgacccgatatctgaaatttgttccgaaaattctctcaacgtggatttcctgatgctggtcggtcagtctgacgacgaatcaatcaacttcgatgcatggctgcgcaactactctcaaaataatagcaaaaattacagcctaaaatacactaagtacacaaaaaaggacaccaagaaaaacgctaaaaaaagcagcgacgctgagagtgaagattctaaggatgccaaaaaagattcaaaaaaagtgaaaaagaacgtaaagaaggatgacaaaaaaaaggacgtcaaaaaggataccgaatccaccgacgcagaatcgggcgactcaaaggacgagcgcaaggataccaagaaagacaagaagaaactcaaaaaggacgataagaagaaggacacaaagaaataccctgaaagtaccgacactgagagcggggatgccaaggatgcaaggaatgacagccgaaacctcaaaaaagcaagcaagaatgacgacaaaaaaaaagacgcgaaaaagattaccttctctaccgattccgagtcagagctggaaagtaaagagagtcaaaaggacgaaaaaaaggacaagaaagattccaaaacagataacaagaagtctgtgaagaacgacgaagaatccactgacgcagatagcgaaccaaagggcgattccaaaaagggcaagaaagacgagaaaaaaggcaagaaggacagtaaaaaagatgataagaaaaaagatgccaagaaaaatgcggagagcactgagatggaaagcgatctggagctgaagaaggataaaaaacacagtaaagagaagaaaggctcaaagaaggacataaagaaggacgctcgcaaagatacagagagcacagacgctgagttcgacgaaagttctaagaccgggttcaagacttctaccaaaatcaagggatccgacacagaaagtgaagaaagcctgtacaagccaggcgctaagaaaaagattgatgagtccgatggcacaagtgctaattcaaaaatggaggggctcgagtctaaacgaggcttccgcatgagttccaagaagaccacattcaatgaaaagggagagaaggcgtcaactggcagggttccaccttcccgcgaaaagccaccgcttcctgcttgcgagccctcacttccttcccctaaggtccggcgtctttgctggtgcaagatgccacccccaccacctaagccaaggtatgcaccactgccggaggccccatggatccataaactgctttag

SEQ ID NO: 219667 - DNA, 1974 bp, synthetic construct
  misc_feature 1..1974: note = Description of Artificial Sequence: Synthetic coding sequence
  source 1..1974: mol_type = other DNA
atgtcactgccacgtttactcaaggtgaacattcggacgtatgacaatagtataccgatctctgaaagcagtcggaagtcttggaaccagaaacacttcgcactaacatttcctaaaccactccagagggggaccaacgataaaagtaggccgctcaagagtcagattacagttactaggcacgacaaacgcaaactggaagaagggcagaagcccgctcataagtggattagacatagctttcggaaaatcttgcagtggccacccatatacaccgcagcccgagagcaaacacctttccgtcatctctatacatccaagacacatttaaaaaaggccgagtataaaaaatccaaggacgaaaaaggcggaacccctctgaagaaagactcaaagaagaaaggcggaagttacgccaccaatcctgagtcaaaacagattgtggaagaaaaaacaaaaagacagaacgaggcagataagactcccctgaaaagctcgcatgagaatgaacaaagtaagaaatcgaagagcagtagcgaaacaaaccctgagagccagaactcgaaaactgtctctaaaaattgtagtcagaaagacaagaaggacagcaaaaattctaagaagacaaatacggagttcttgcataccaaaaataatcctaagaaagatctgaaaaggtctaaaacttccaacgatcccatcagcgagatctgcagcgagaactcccttaatgtcgactttctgatgctcgtggggcaatcagacgatgaatcaatcaacttcgatgcatggcttcggaattactcacagaacaacagcaagaattattcactcaagtataccaaatacacaaagaaggataccaaaaagaatgccaaaaaatcatccgatgccgagtcagaggacagtaaggatgccaagaaagatagcaaaaaggtgaagaagaacgtgaagaaggatgataagaaaaaagatgtaaaaaaggacaccgaatcaacagatgcggagagcggcgatagcaaagacgaaagaaaagacacgaagaaggacaaaaaaaaactcaagaaggacgacaaaaagaaggatacaaaaaagtatcccgaatccaccgatacggaatctggagatgctaaggacgctcgtaatgacagtcggaacctgaaaaaggcatccaagaatgacgataagaaaaaggacgctaaaaagataaccttctccacagactcagagagcgagttggagagtaaagagagtcagaaggacgagaaaaaagataaaaaggacagtaagacggataacaagaaatccgttaagaatgacgaagaaagcaccgacgcagactccgagccaaagggcgactctaaaaagggcaaaaaagatgaaaagaagggaaagaaagatagtaaaaaggatgataagaagaaagacgcaaagaaaaacgccgagagtacagaaatggagtctgacttggagctgaaaaaggataagaagcactctaaagaaaaaaagggatctaagaaagatataaagaaagatgccagaaaagacacggagagcacagacgctgagttcgatgagtcttccaagaccggatttaagacttccacaaaaattaaaggctcagatactgagtccgaggaatcgctctacaagccaggcgctaagaagaagattgatgaaagcgatggaacttcagccaacagcaagatggaaggactggaaagcaagcgtggctttcggatgtcatcaaaaaaaacaaccttcaatgaaaaaggcgagaaggcctcaacgggcagagtgccgccaagcagggaaaagcccccacttccagcctgcgagccctccttaccatcaccgaaggtgcggagattgtgttggtgtaagatgcctccaccccctccaaagcctagatacgccccattaatacagcgacgtcagcgcctgggagtgcgcaggtgccaattgctcatgtag

SEQ ID NO: 219668 - DNA, 1086 bp, synthetic construct
  misc_feature 1..1086: note = Description of Artificial Sequence: Synthetic coding sequence
  source 1..1086: mol_type = other DNA
atgcaggagaaagacgcctccagccagggattcctccctcactttcaacacttcgccactcaagctattcatgtcggacaagaccctgaacaatggacttcccgggctgtggtgcctcctatctcactatctactacattcaagcaaggagctccgggacagcattcaggctttgagtactctcgatccggcaatccaactcgaaactgtttagagaaagccgtggcagccctggacggcgctaagtattgcctggccttcgcctccgggctcgccgcaaccgtgacgatcacacatctgctgaaggctggtgatcagattatctgtatggacgacgtctatggaggtactaacaggtactttcgacaggtagctagcgagtttgggttgaagatctcttttgtggattgctcaaagataaaactactcgaggcagctataacaccagagacaaagagacccctggctcttggggctgatatatcaatgtactctgccaccaaatacatgaacgggcattccgacgtggtgatgggcctggtgtctgtaaactgcgagtctttgcacaatagactgcggtttctccaaaattcactgggcgcagtgccgtccccaattgattgttatctctgcaatcgtggtctgaagaccctccacgtcaggatggagaagcacttcaagaacggcatggctgtagcccagttcctggaaagcaatccctgggtagagaaagtcatataccctggacttccaagtcacccgcagcatgaattagtcaaaagacagtgtactggctgtaccgggatggtgaccttctacattaagggcactctacaacacgccgaaatcttcttgaagaacctgaaactgttcacgctggccgagagcctgggaggattcgagagccttgcagagttgccagctattatgacccacgcaagtgtgttgaagaatgaccgtgacgtgctaggaatatcggacacactaatacgcttgagtgtgggactcgaggacgaagaggacttgttggaggacttggatcaggcccttaaggcggctcaccccccatcgggtagccactcttag

SEQ ID NO: 219669 - DNA, 1218 bp, synthetic construct
  misc_feature 1..1218: note = Description of Artificial Sequence: Synthetic coding sequence
  source 1..1218: mol_type = other DNA
atgcaggagaaggatgctagttcacaggggtttttgcctcactttcaacatttcgccacacaggccatccacgtggggcaggaccctgagcagtggacatccagagccgttgtgcctccaatctctctgtctactacattcaaacaaggcgctcccggacagcactcagggtttgaatactctcgctcaggaaaccccacccgcaattgcctggagaaagccgtggcggctcttgacggagcgaagtactgtctggccttcgcctccgggctggccgcaactgtgaccattactcacctccttaaggcaggcgaccagattatttgcatggatgacgtctatggtggaacaaacagatactttagacaggtagccagcgaatttgggttgaagattagcttcgtcgactgcagtaagatcaagctactcgaagcggctattacaccagagacgaagcttgtgtggatcgaaacacctaccaatccgacccaaaaagtaatcgatatagagggctgtgcacacattgtgcataagcacggcgacatcattttagtggtggacaacacatttatgtcaccatatttccagcggccattggctcttggcgcagatatctctatgtactctgccactaaatatatgaatggacacagcgacgtcgtgatgggtctcgtgagcgtgaattgtgagagtctgcacaatcgcctgcgatttctgcagaacagtctcggggctgtgccatctccaatcgactgctacctttgcaataggggacttaagacgctgcatgtgcgcatggagaagcactttaaaaacgggatggcggttgcccaatttctggaatctaacccctgggtggagaaggttatctaccctgggctgccttcccatccccagcacgaacttgtcaaacggcagtgcacagggtgcacagggatggttactttttatatcaagggaaccctccagcacgccgagatctttctaaaaaatctcaagctgtttactctggccgagagtcttggaggatttgagtccttggccgagctgcctgccattatgacacacgccagtgtgctgaagaacgacagagacgtcctcggcataagcgacactctgattcgcctgtccgttggccttgaagacgaggaagatcttctggaagatttagaccaggcgttgaaggctgcacacccgccatctgggtctcattcctag

SEQ ID NO: 219670 - DNA, 1122 bp, synthetic construct
  misc_feature 1..1122: note = Description of Artificial Sequence: Synthetic coding sequence
  source 1..1122: mol_type = other DNA
atgcaagaaaaggacgcctcttcacagggatttctgccccactttcagcacttcgccacacaggccatccatgtgggacaggatccagagcaatggacctcccgggctgtggtgccccctattagtctctccactacattcaaacagggggcacccggacagcactcaggtttcgagtattctcgatctgggaacccaactcgcaattgtctggagaaagccgtagcggctttagacggtgcaaagtactgcaccaatcggtacttccggcaggtggcatctgaatttggcctgaaaatctcattcgtagactgctctaaaatcaaactgctggaggcagctatcacacccgaaaccaaactggtctggatcgagaccccaaccaacccaactcagaaggtaattgatattgaaggctgcgcgcacattgttcacaaacacggagacattatactggtggtggacaatacttttatgagcccttatttccaacggccactggctttgggcgctgatatctccatgtattccgcaacaaaatacatgaatgggcacagtgatgtggtgatggggctcgtgagcgttaactgcgagtctcttcacaatcggcttagattcctccagaactcgctgggagctgtgccgtctccaatcgactgctatctttgcaacagaggactgaagaccctgcacgttcgcatggaaaagcacttcaaaaatggaatggcagtggcacaatttctggagtcgaacccttgggtggaaaaagtgatctatcccggactgccgtcccatccccagcatgaattggttaagagacaatgcacgggttgtacaggcatggtgactttttacataaaaggaactttacagcatgcagaaatctttctgaagaacctgaaactcttcacgctggccgaatctctgggagggttcgaatcattggcggagctgcccgcaatcatgacccacgctagcgtgctcaagaatgaccgggacgtacttggcataagcgacacattgatcagactgagtgtaggtctagaggatgaggaggatctgctcgaagaccttgatcaggcattaaaagctgcccaccctccatccggtagtcacagctag

SEQ ID NO: 219671 - DNA, 1656 bp, synthetic construct
  misc_feature 1..1656: note = Description of Artificial Sequence: Synthetic coding sequence
  source 1..1656: mol_type = other DNA
atgccctcagagacacctcaagcagaggtgggtcccactggttgtcctcacagaagcggcccacactcagctaagggtagtctggagaaggggtcccccgaggataaagaggcgaaggagcctctctggatccgtccagacgccccttcacgatgtacgtggcagttaggtcgaccagcaagcgagtcgccgcatcatcacaccgctccagccaagtccccgaaaattctgcctgatattttgaaaaagataggggacacacccatggtaaggattaacaagatcggcaagaaattcggcctcaaatgcgagctgctggctaaatgtgagttttttaacgctggaggtagcgttaaagaccggataagtctgaggatgattgaggatgccgaacgcgacggaacccttaaacctggagacacaattattgagcctacaagcggtaatacaggtattggactggcactcgctgctgcagtaagggggtaccggtgtattatagtcatgcccgaaaaaatgtcttcagagaaggttgacgtcctgagggcgctaggggcagagattgttagaacccccacgaatgctcgcttcgactcccccgaatcacacgtcggggttgcttggcgccttaagaacgagattcccaattcccacatcctggaccagtaccgcaacgcctctaaccctctggctcactatgacaccactgccgacgagatcctccagcagtgcgacggaaaactcgatatgctggtagcaagtgtcggaacggggggaactatcacaggtatcgctcgcaagctcaaggagaagtgccctgggtgccgcatcatcggagtggatcccgaagggtccatactagctgaacccgaagaactcaatcaaaccgaacaaactacatacgaagtagaaggcatcggctatgactttatccccaccgtgttagatcggacagtggtggataagtggtttaagtctaatgacgaagaggcttttacgttcgcaaggatgctgatagcacaggaagggctgctgtgcggaggctctgccggaagcacagtggccgttgccgtgaaggccgctcaggagctgcaggaaggtcaaagatgcgtcgttattctcccagactccgtcagaaactacatgacaaagtttctcagtgatcgatggatgttgcagaagggatttctgaaagaggaagatctaactgaaaagaagccatggtggtggcatttgcgggtgcaggagctgggactgtcagccccactgacagtgctccctactatcacatgcggccatactatcgaaattctgcgtgagaaggggtttgaccaggcgccagttgtggatgaggctggagtgatcctcggtatggttacccttggcaacatgttgagcagtctgctggctggtaaagtccagccctctgaccaagttggcaaggtgatctataagcagttcaagcaaataagactgactgacaccctcggtcgcttatcacacatcctggagatggatcacttcgctcttgtcgtccacgagcagattcaatatcatagcacaggcaagtcaagtcagcggcaaatggtgttcggcgtggtgaccgcgatcgacctgctgaacttcgtcgcagcccaggaaagagaccagaagtag

SEQ ID NO: 219672 - DNA, 1656 bp, synthetic construct
  misc_feature 1..1656: note = Description of Artificial Sequence: Synthetic coding sequence
  source 1..1656: mol_type = other DNA
atgccgtccgagacgccacaagctgaagtaggacccactggctgcccacacagatccggccctcattccgcaaagggaagtctcgagaagggtagcccagaggacaaggaagctaaggaacccctgtggatccgcccagacgctccttcgcggtgtacatggcagctcggcagaccagcaagtgaatccccgcaccaccacacagcgccagccaaatcgccaaagattcttccagatattctgaaaaaaatcggggatactccaatggttaggattaataaaatcggcaaaaagttcggcctcaaatgcgagttacttgccaagtgcgagttcttcaacgcaggcggaagtgtgaaagatagaatcagcctgcgcatgatcgaagatgccgagcgtgatggaacattaaaaccaggtgataccattatcgaacctacatcggggaacacaggaatcggcctggcactcgccgcagcggtgcgtggctatcgatgcataattgtcatgccagagaagatgtccagcgagaaggtggacgttttaagagccctgggtgccgaaattgtgaggactcccaccaatgcccgatttgattctcccgaatcccatgtaggcgtcgcatggcgactgaagaacgagatccctaattctcacattttggaccagtatcgtaacgcttctaaccccctggcccactacgacacgactgcagacgaaatcctccagcagtgcgatggcaaacttgacatgctggtggcatcagtcggcactgggggtactataacgggcatagcgaggaaactgaaagaaaaatgcccaggttgtaggatcatcggcgtggatccagagggtagtatactggccgaacccgaagaacttaatcagacagagcaaaccacatacgaggtggagggcataggctacgacttcatcccaacagtgctggaccgaaccgtggttgataagtggttcaagagtaacgatgaggaagctttcacctttgcgcgaatgctcatcgcccaggagggactcttgtgcggaggatccgctggcagcaccgtcgccgtggccgttaaggcagctcaggagttgcaggagggccagcgatgcgtggtgatacttccagactcagtgcggaattacatgacgaaatttctatccgatagatggatgttacagaaaggatttcttaaggaagaggacctgacagagaaaaaaccttggtggtggcacctgagagtccaggagctcgggctctctgccccactcacggttctgcccacgattacatgtggacacaccatagagatcctaagagagaaaggttttgaccaggccccagtggtggatgaagccggtgtaatcctcggcatggttacactggggaatatgttgagcagtctgctggcaggcaaagtccagcctagtgaccaggtcggcaaggtcatttacaagcaatttaaacagatcaggctgacggacacactcggtaggctctcgcatatattggaaatggatcatttcgctctcgttgtgcacgagcagattcaataccacagtactggcaagtcgtctcaacgtcagatggttttcggcgtagtaacagcaattgacctgcttaacttcgtggctgcccaggaacgcgatcaaaagtag

SEQ ID NO: 219673 - DNA, 1656 bp, synthetic construct
  misc_feature 1..1656: note = Description of Artificial Sequence: Synthetic coding sequence
  source 1..1656: mol_type = other DNA
atgcctagtgagactccacaggcagaggtgggaccaacaggttgcccacacaggagtggaccacatagcgccaagggtagcctagagaaagggtctcctgaagataaagaggctaaggagccactgtggattcgccctgacgccccatcacgatgcacttggcagctgggacggccagcatccgagagcccccaccatcacactgcacccgctaaatctccgaaaatcctcccagacatactcaagaaaattggggatacccccatggtccggatcaataaaatcggcaagaaattcggtctgaagtgcgagctactggctaaatgtgagttttttaatgctgggggttctgtcaaggaccggatatctctgcgtatgatcgaggacgccgaacgggacggcaccctgaagcccggagacactattattgagcccacttcaggcaacaccggaataggactggctctcgccgctgccgtgcgtggataccgatgtatcattgtaatgcccgaaaagatgagctcagagaaggtggacgttttgcgggctctgggggctgagattgtccggactcctactaatgctcggttcgattccccagaatcccacgtaggagtggcctggcggttgaagaacgagattccaaatagtcacattctcgatcagtaccggaatgcaagcaaccctctggcacattacgacaccacggctgacgaaatcttgcagcagtgcgacggcaagctggatatgctagtggcaagcgttggaaccggcggtactatcacagggatcgcccgaaaactgaaggagaagtgtcctggctgcaggatcataggagtcgatcctgaagggtccattcttgccgaacccgaggaacttaatcagacagagcaaacgacgtacgaggtagaagggataggttacgattttatcccgactgtgctcgacagaaccgtggtcgataagtggttcaaatctaacgacgaagaggcttttacattcgcacgaatgttaatagctcaggagggactgctctgtgggggtagtgccggaagcaccgtggccgtggcggtgaaggctgcccaggagctgcaggaggggcaacgctgcgtggtgatcctccctgacagcgtgcgcaattatatgactaagttcttgtcggatcgctggatgctacagaaggggttccttaaagaagaagatctcacggagaagaagccatggtggtggcacctacgggtgcaggaactaggtctcagcgccccactgaccgtgctcccgaccatcacttgcggccacaccatcgaaatcttaagagaaaaagggtttgaccaagcaccagtcgtcgacgaggctggagtgatcttgggtatggtcactctgggtaacatgctgtcatccctcctcgcaggaaaagtccagccatccgatcaggtaggtaaggtgatctacaagcagtttaagcaaattcgattgactgataccctgggcagactgtcacacatccttgaaatggaccatttcgcgctggtcgtccatgagcagattcagtaccatagcacgggaaaatctagccagcggcagatggtatttggcgtggttacggctatcgatctgctaaattttgtggcagcccaagagcgcgaccagaaatag

SEQ ID NO: 219674 - DNA, 1656 bp, synthetic construct
  misc_feature 1..1656: note = Description of Artificial Sequence: Synthetic coding sequence
  source 1..1656: mol_type = other DNA
atgccttccgagactccgcaagccgaggttgggcctaccggatgtcctcaccgcagtggtccccattctgcgaaggggtctttagagaaagggtctcccgaagataaggaagcgaaggagcctctctggattagacctgacgcgccatctcggtgcacctggcagctcggtcggcctgcctctgagagcccacaccaccacacagcaccagccaagtctcccaaaattctgccagatatcctcaaaaagatcggcgacactccaatggtgagaatcaacaaaatcgggaagaagttcggattgaagtgcgagttgctggcaaagtgcgagttcttcaacgccggagggtccgtgaaggaccggatttccttgagaatgattgaagatgctgagagggatggcactctgaaaccaggggacacaattatagaaccaactagcggtaataccgggattggcctggctctggccgcagcggtcagagggtatcgctgtattatcgtgatgccagagaaaatgagcagtgagaaggtagacgtcctcagagcacttggcgcagagatcgtcaggacaccaactaatgcacgcttcgactctccagagagccatgtgggggtggcctggagattaaaaaacgagataccaaacagccacattctggaccagtacagaaatgcttctaaccctctggcacactacgatacaacggctgatgaaatcttacagcagtgcgatgggaaacttgacatgctggttgcgtccgtgggcaccgggggtactatcaccgggatcgccaggaagttaaaagagaaatgcccaggatgccgcatcatcggagtcgatccagaggggagtatcttggccgaacccgaagaattaaatcaaactgagcagaccacttatgaggtggaagggatagggtacgattttatccctactgtactcgataggactgtcgttgacaagtggtttaagagtaacgatgaggaggcctttaccttcgccagaatgctgatagcccaggaggggctgctctgtggcggatctgccggatccactgtggctgtagctgtaaaggcagctcaggagctgcaggaaggccagaggtgcgtcgtcattctccctgactcagttaggaattacatgaccaagtttctgagcgacagatggatgctgcaaaaaggattcctcaaagaggaggatctgaccgagaagaagccctggtggtggcacctgcgagttcaagaacttggcctaagtgctcctctcactgtgctacctactattacttgtggccacaccatcgaaatcctccgcgagaagggtttcgaccaggcacccgtggttgacgaggcaggcgttattctcgggatggttacccttggcaacatgctgtctagtctgttagcaggcaaggttcagccttctgaccaggttggtaaggtcatttataagcagttcaagcagataaggctgactgacactctggggcgtctgtcccacatacttgaaatggaccacttcgccctcgttgtacatgagcagatccagtatcactcaaccgggaagagctcccagagacaaatggttttcggcgtagtgaccgcgatcgacctcctgaattttgtagccgctcaggagagagaccagaaatag

SEQ ID NO: 219675 - DNA, 1698 bp, synthetic construct
  misc_feature 1..1698: note = Description of Artificial Sequence: Synthetic coding sequence
  source 1..1698: mol_type = other DNA
atgcccagtgaaaccccgcaggccgaagtagggcctaccgggtgcccgcatcgctctggtccccactctgctaaaggatcgttggaaaagggatcgccagaagataaagaggctaaagagcccctttggatcaggccggatgctccgtctaggtgcacatggcagctcggacggccagccagcgagtccccgcaccaccatacagcaccggcaaagagtccaaagatccttcctgatatcctaaagaagatcggagacaccccgatggtgcgtatcaataaaatcggcaagaagttcggcctcaagtgtgaactgctggcaaagtgtgagtttttcaacgcaggcggatctgtgaaagacaggatttcccttaggatgatcgaagacgccgaacgagacggcactctaaagcccggagacactatcatcgaaccaacatccggcaacacaggaataggcctggctttggctgccgctgtgagggggtatagatgtattattgtgatgcctgaaaaaatgagcagcgaaaaagttgacgtactcagggccttaggtgcagagatcgtgcggacccctacaaacgcccgtttcgatagtcctgagagccacgtaggtgtggcatggagattaaaaaacgaaatccctaactcgcacattctggatcagtatcgcaacgcctcaaaccctcttgcccactacgacactaccgcggacgagatcttgcaacagtgtgacgggaagctcgatatgctggtggcttcagtgggcaccggcggtaccataacaggcatcgcgaggaagcttaaggaaaaatgccctggttgccggatcataggcgtggacccggaaggatcaatacttgctgaacccgaggagctgaaccaaacagagcagaccacctatgaggtcgaaggcatcggctacgacttcatcccaacggtccttgatcgcaccgtagtggacaagtggttcaagagcaacgacgaagaggccttcactttcgcacggatgctgatcgcccaggagggtctcctgtgtggagggagcgcgggatcaacagtagctgtagcagtcaaagccgctcaggaactccaggaaggtcaacgatgtgtcgtaatcctacccgacagtgttaggaactacatgaccaagtttctctctgatcgttggatgctgcagaaagggttcctaaaagaggaggacctgactgaaaagaagccttggtggtggcatctgcgagtgcaggaactaggcctgagcgccccactaaccgtgttgccaaccatcacttgtggccatacgatcgagatacttcgagaaaaaggttttgatcaagcacccgtggtggacgaagcaggcgtcattttgggcatggtgaccctgggcaatatgctcagcagccttctggctgggaaggtacagccctctgaccaggtggggaaagtgatttacaagcagttcaagcagattcgccttaccgatacacttgggagactcagccatatcctcgagatggatcattttgcccttgtggtccatgaacagattcagagccaagatcaagcgtgggccggagtcgtgggtgggccagctgatcactccacaggaaagagttcacagcggcagatggtgttcggcgtcgtaacagcaatcgatttgctgaatttcgttgccgctcaagagcgcgatcagaaatag

SEQ ID NO: 219676 - DNA, 534 bp, synthetic construct
  misc_feature 1..534: note = Description of Artificial Sequence: Synthetic coding sequence
  source 1..534: mol_type = other DNA
atgccaagcgaaactcctcaggccgaggttggaccaacaggctgcccccatcggtctggaccccatagcgccaaaggatcattggagaaggggtctcctgaagacaaagaggccaaagaacctctatggataagaccggatgcccctagtcgctgtacttggcaactcggaagaccggcatccgaatcccctcatcatcataccgcccctgcaaagtcccccaaaattctgcccgacatcttgaagaagataggagatacaccgatggttcgcatcaataaaattgggaagaaattcggcttaaagtgtgagttgctcgctaagtgtgaattttttaacgctggcggttccgtaaaagatcggatttccctcaggatgatcgaagatgccgagcgggacggcaccttgaagcctggtgacacaatcattgagcctaccagtggcaataccgggattggcctggcgctagctgcggctgtgcggggttatcgctgcattattgtaatgcccgaaaagatgtctagtgaaaagtag

SEQ ID NO: 219677 - DNA, 1527 bp, synthetic construct
  misc_feature 1..1527: note = Description of Artificial Sequence: Synthetic coding sequence
  source 1..1527: mol_type = other DNA
atgcctagtgagacgccccaggctgaggtgggtcccacaggctgcccacaccggtccggcccacaccatcataccgcccctgcgaaatctccaaagatcttgccggacatactgaagaagatcggagacactccaatggtccgtataaacaagattggaaaaaagtttggcctcaaatgcgagcttctcgccaaatgtgagttctttaacgccggaggaagcgtcaaggatagaatctctctgcggatgatagaggatgccgagcgcgatggtacgttgaagccaggtgataccatcatcgagccgaccagcgggaacaccggtatcggacttgcgcttgctgctgccgtacgcggatacaggtgcataatcgttatgccggagaagatgagcagcgagaaagtggatgtgttgcgcgctctgggagccgagatagtcaggaccccaacaaacgcgcgattcgattctcccgagagccacgtgggagttgcctggcgtttaaagaacgaaatcccaaactctcacatcctcgaccagtaccgcaatgctagtaatcctcttgctcactacgataccaccgcagatgaaattttacagcagtgcgacgggaagctcgatatgttggtggctagtgtcggaacgggcggtacgattacagggattgctcggaaactgaaggagaaatgtcccggttgtcgaattattggcgtcgatcctgaagggtccatactagctgagcccgaagagctgaaccagacagagcagaccacatacgaagtcgagggaattggctatgattttattccaacggtgctcgacaggaccgtggtggacaaatggtttaaatccaatgatgaagaggcgtttactttcgccagaatgctgattgcccaggaggggttgttgtgcggaggttccgcaggcagcactgttgccgtggcggtgaaggccgcacaagagctgcaggagggacagcgctgtgtggtgatcctgcctgactctgttaggaattacatgaccaagttcctctctgaccgctggatgctgcagaagggcttcctcaaggaggaggacctcaccgagaaaaaaccttggtggtggcatctacgggtgcaggagctcggacttagcgccccactgaccgtgctgcctaccattacgtgcgggcatacaatagagattctcagggagaagggctttgaccaagcccctgttgtggatgaggcaggggtgatccttggcatggtaacactcggtaacatgttgtccagcctactggcaggcaaggtacaacctagcgatcaagttggaaaagtgatctataaacagttcaaacaaatccgcctgactgacaccttgggacggctgtctcacatactcgagatggaccattttgccttagtggtgcacgagcagatccagtaccactcaacaggaaaaagcagtcagcgtcagatggtcttcggcgtggtgaccgctatcgatcttcttaatttcgtagctgcccaggagcgggaccagaagtag

SEQ ID NO: 219678 - DNA, 1392 bp, synthetic construct
  misc_feature 1..1392: note = Description of Artificial Sequence: Synthetic coding sequence
  source 1..1392: mol_type = other DNA
atggtccggataaacaagattggaaagaaattcgggcttaaatgcgagctgcttgcgaagtgcgagttttttaatgctggcggaagcgtgaaggacaggatctccttacggatgattgaagacgccgaaagagacggaaccctaaagcctggggacactataatcgagcctacatccggtaacacaggcataggactcgccctggcagctgccgtgcgtggctacaggtgtattattgtgatgcccgagaaaatgtcttcagagaaggtggatgtcctccgggcactaggagcagaaatagtcaggactcctacaaatgcccgattcgactctccagaatctcacgtcggtgttgcctggagactaaagaacgaaataccaaatagtcatatcctcgatcaataccgaaacgcctctaatcctctggcgcactatgacacaacggctgatgaaattctgcagcagtgcgacgggaaattggacatgctcgtggcatccgtagggactggaggcaccataacgggaatcgcgagaaaattgaaggaaaagtgtccagggtgccgaatcattggggtggaccccgaaggcagcattttagcagagcccgaagaattaaatcagaccgagcagactacttacgaggttgagggaatcggttacgatttcatcccgaccgtgttagatcggacagtggttgataagtggttcaagtctaatgatgaggaagcctttaccttcgccaggatgctgatcgcccaggagggtctgttgtgtggcggtagtgctgggtccacagtcgccgtggctgtgaaggcagcccaggaactccaggagggacagagatgcgtggttatcctcccggattctgtgcgcaattatatgacaaaatttctgtcagaccggtggatgctccaaaaggggttcctcaaggaggaggacctgacggagaaaaagccgtggtggtggcacctgcgggtccaggagcttggcctgagcgcccctcttaccgtgttgcctaccattacatgcgggcacactatcgaaatcctacgcgagaagggctttgaccaggcgccagtggtggatgaagccggtgtaatcctcggaatggtcaccctcggtaatatgctgtctagtctcctggcaggcaaggtgcaacctagcgaccaggttggcaaagttatttacaagcagttcaagcagataagactgacggatacacttggaagactgagccacattctggagatggatcacttcgcgctggttgtgcacgagcagatccaatatcacagcaccgggaagagcagccagcgtcagatggtgtttggcgtagtgacggccattgacctgctaaattttgttgctgcccaggagcgcgaccagaagtag

SEQ ID NO: 219679 - DNA, 312 bp, synthetic construct
  misc_feature 1..312: note = Description of Artificial Sequence: Synthetic coding sequence
  source 1..312: mol_type = other DNA
atgatggcggaaccatggcaagctttgcagctgctccttgccatattgctcactctgatggcccttccataccaggccagaaaaaagacattcctgtccgttcacgaggtgatggcggttgagaactacgccaaggattcgctgcagtggattaccgaccagtataacaaagagtccgatgataagtaccacttcaggatctttcgggtccttaaagttcagagacagcaggtcaactgctttttttcagtgtttgccgttccttggtttgaacagtacaagattctgaataaaagctgctcttcggattag

SEQ ID NO: 219680 - DNA, 417 bp, synthetic construct
  misc_feature 1..417: note = Description of Artificial Sequence: Synthetic coding sequence
  source 1..417: mol_type = other DNA
atgatggctgaaccatggcaggctttgcaactactgttagctatactgctgacattgatggccctgccttatcaagccaggaagaagaccttcttgagtgttcatgaggtcatggccgtggagaattacgcaaaagactctctccagtggataactgatcaatacaataaggagtctgatgataagtatcacttcaggatctttcgtgtcctcaaggtgcagagacaggttactgaccatcttgaataccacctcaacgtggagatgcaatggacaacctgtcagaagcctgagacaacgaactgcgtgcctcaggagcgcgagctccacaagcaagtcaattgtttttttagcgtattcgcggtgccttggttcgaacagtataaaatacttaacaagtcatgctccagtgactag

SEQ ID NO: 219681 - DNA, 297 bp, synthetic construct
  misc_feature 1..297: note = Description of Artificial Sequence: Synthetic coding sequence
  source 1..297: mol_type = other DNA
atgattcctggcggtctcagtgaagctaaacctgcaactccagaaatccaggagatcgtcgacaaggtcaagccacaactggaggaaaagactaacgagacctacggtaaattggaagccgtacagtataagacacaagtggtggcaggtaccaactactacattaaagtgcgcgcaggtgacaataaatacatgcacttgaaggtattcaagagtctccccggtcagaatgaggacctggtgctgacaggttaccaggttgacaagaacaaagatgatgagctgacgggcttctag

SEQ ID NO: 219682 - DNA, 297 bp, synthetic construct
  misc_feature 1..297: note = Description of Artificial Sequence: Synthetic coding sequence
  source 1..297: mol_type = other DNA
atgatgtgcggggcaccatctgcaactcagcccgctacagctgagacgcagcacatcgcagatcaagtgcggagtcagctcgaggaaaaagagaacaaaaagttccccgtatttaaggcggtgagtttcaagagccaagtggtagcgggtactaattattttattaaggtgcacgttggcgacgaggacttcgtgcacctgagagtgtttcagtctctccctcatgagaacaaacccctcaccctgtccaattatcagaccaataaggccaagcacgatgagctcacctacttctag

SEQ ID NO: 219683 - DNA, 441 bp, synthetic construct
  misc_feature 1..441: note = Description of Artificial Sequence: Synthetic coding sequence
  source 1..441: mol_type = other DNA
atggcaggccctttgcgagcgcctcttctgctcctcgcaatcttagccgtagcccttgccgtgtctcctgccgcaggatctagccccggaaaaccaccccgactcgtcggaggccctatggatgcttccgtggaggaggagggtgttaggcgggcactggacttcgccgttggggaatacaataaggcctcgaatgatatgtaccattcacgcgcactccaagttgttcgcgctcggaaacagattgtggccggagttaattattttcttgacgtcgagcttggtcgcactacatgcaccaaaacacaaccaaacctcgataattgcccgttccacgatcagcctcacctgaaacgtaaagccttttgctccttccagatatacgctgtcccttggcagggcacaatgaccctgagcaagtccacttgccaggacgcttag

SEQ ID NO: 219684 - DNA, 441 bp, synthetic construct
  misc_feature 1..441: note = Description of Artificial Sequence: Synthetic coding sequence
  source 1..441: mol_type = other DNA
atggccggtcccctgcgggctcctctgctattgctggccatcctggccgtagcgctcgcagtttccccggctgccggttcctcgcctggcaaacctccccgtctcgtggggggaccgatggacgccagtgttgaggaggagggcgtacgccgagccctcgatttcgccgtcggggaatacaataaagccagtaatgatatgtatcactcaagagccttacaggtggtcagagcacgaaaacagattgtagcgggtgtcaactactttctggatgtggaactcggacggacgacatgcacaaaaacgcagccgaatttagacaactgtccttttcacgaccagccccatctgaagagaaaagccttttgctcgttccagatatatgccgtcccctggcaggggacaatgaccctatctaaaagcacttgccaggacgcatag

SEQ ID NO: 219685 - DNA, 441 bp, synthetic construct
  misc_feature 1..441: note = Description of Artificial Sequence: Synthetic coding sequence
  source 1..441: mol_type = other DNA
atggccggaccgctacgcgcacccctcctcctacttgcgatactagcagtggccctcgccgttagcccagccgcaggctcctcccccggtaaaccaccacggttagtggggggaccgatggacgcaagtgtagaagaggaaggtgtccggcgtgcacttgactttgctgtcggtgagtacaacaaggcttccaacgacatgtatcactctagagcgctgcaggtcgtcagggctagaaaacaaatcgtggccggtgtgaattattttttggacgtcgaactgggacgcaccacatgcacaaaaacccagccgaacctggataactgccccttccatgatcaacctcacttgaagcgcaaagctttctgcagctttcaaatttatgccgtgccgtggcaggggacaatgactctgagcaagagtacatgccaagacgcatag

SEQ ID NO: 219686 - DNA, 429 bp, synthetic construct
  misc_feature 1..429: note = Description of Artificial Sequence: Synthetic coding sequence
  source 1..429: mol_type = other DNA
atgatgtggcccatgcacactccattgttacttctaaccgctctgatggtggcagtggctggctctgcatccgcacagagcaggactctcgccggaggaatacatgcgacagacttaaatgataaaagtgtacaatgtgctctcgatttcgctatcagtgaatacaataaggtgattaataaagacgagtattatagtcggccactccaggtcatggccgcttaccagcagatcgtgggaggggtgaattattattttaacgtaaaattcgggagaacgacctgcaccaaatctcagcctaatttagataattgcccttttaatgaccagccaaaactgaaggaagaggaattctgtagcttccagatcaacgaagtgccttgggaagacaagatcagtattctgaattacaaatgtaggaaggtatag

SEQ ID NO: 219687 - DNA, 1578 bp, synthetic construct
  misc_feature 1..1578: note = Description of Artificial Sequence: Synthetic coding sequence
  source 1..1578: mol_type = other DNA
atggcaacccttctgcgaagcaaactatctaatgttgctaccagtgtttcgaacaaaagccaggcgaaaatgagtggaatgttcgctcgcatgggcttccaggcggctacagatgaagaagctgtggggttcgctcactgtgatgacttggactttgagcatcgccagggcctgcagatggacattctaaaggccgagggggagccatgtggtgatgagggggctgaggctcctgtcgagggggacattcactaccagcgcggatcaggagcgccactgccaccttccgggtcaaaagatcaggttggcggaggaggtgagtttggaggccacgacaagcccaaaattaccgcctgggaggctggctggaatgtcacgaatgcaattcagggcatgtttgtcctgggccttccttatgccatcctgcatggcggatacctcggactgttcctcattattttcgcagctgtagtttgctgctataccggaaagattctgatcgcctgcctttatgaagagaatgaagacggagaggtagtgagagttagggacagctatgtcgcgattgctaatgcttgttgtgcaccccgattccctacgcttggaggtcgggttgtgaacgttgcccaaattattgagctagtgatgacatgcatactctacgtagtggtgagcggtaatctgatgtataacagcttccctggtttgccggtgtcccagaaatcctggagcattatcgcaacagccgtgctgctgccatgcgccttcttgaagaatcttaaagcagtaagcaagtttagtttgctgtgtacgctcgctcatttcgtgatcaacatcctagttatcgcttactgtctgtccagggcaagggactgggcctgggaaaaagtcaaattttacattgatgtcaaaaagttccccatatcgataggaatcatcgtcttctcctatacgagccagatttttttgccttcactagagggcaacatgcaacagccaagcgagtttcactgcatgatgaattggactcatattgctgcatgcgtgcttaaaggcctgtttgcactggtggcgtatctgacttgggcggacgagaccaaagaggtcattaccgacaacctcccaggctctatcagggctgtcgtcaacatatttttggtcgcaaaagcgctgttgtcatatcctctcccttttttcgcagccgttgaggtcctggagaaatctctctttcaagaggggtccagggccttctttcctgcttgctactccggagacggcaggcttaaatcatgggggttgacgctacggtgtgctctcgtggttttcactttgctgatggcaatctacgtcccccatttcgcattgctcatgggactgacaggctctttgacaggcgctgggctgtgcttcctccttccctctttgtttcacctcaggttactgtggagaaagcttctgtggcaccaggtgttctttgatgtggctatattcgtgattggtggcatttgctccgtttctggtttcgtgcattctctcgaaggactgatagaagcgtatcgaaccaatgctgaggattag

SEQ ID NO: 219688 - DNA, 426 bp, synthetic construct
  misc_feature 1..426: note = Description of Artificial Sequence: Synthetic coding sequence
  source 1..426: mol_type = other DNA
atggcgtggccactttgtactctgttgctgcttttagccacccaagccgtagcgctagcttggagcccccaggaggaagatcggattatcgaaggtggtatctacgatgctgacctcaacgatgagagagttcaacgggcacttcacttcgtcatcagcgagtataacaaggccacagaagacgagtattaccggcgtctcctccgcgtgctgagggccagggaacaaattgtcggcggagttaattacttctttgacattgaggtcgggagaactatttgcaccaaatctcaacccaatctggacacctgcgcctttcatgagcagcccgaacttcaaaagaaacaactatgcagctttcagatatacgaagtcccttgggaggatagaatgagcctcgtcaattcaaggtgtcaggaggcttag

SEQ ID NO: 219689 - DNA, 426 bp, synthetic construct
  misc_feature 1..426: note = Description of Artificial Sequence: Synthetic coding sequence
  source 1..426: mol_type = other DNA
atggcccagtacctgagcaccctgcttttactgctggctactctagcagtcgcactggcctggtctcccaaagaggaggaccggatcatccccggtgggatttataacgccgacctaaacgatgagtgggttcagagggcactccactttgccatctccgagtacaataaagccactaaagatgattattaccgtagacccctaagagttttgcgcgcaagacagcaaactgtcggaggcgtcaattatttcttcgacgtcgaggttggacgcacgatttgcaccaagagccagcctaatctggacacctgcgcgttccacgaacagcccgagctacaaaagaaacaactctgtagtttcgagatctatgaggtgccctgggagaaccgacggtctctcgtgaaatctcggtgccaggaatcatag

SEQ ID NO: 219690 - DNA, 426 bp, synthetic construct
  misc_feature 1..426: note = Description of Artificial Sequence: Synthetic coding sequence
  source 1..426: mol_type = other DNA
atggcccagtacctcagtaccttactgctccttctggccacactggcggtagccctcgcctggagcccaaaagaagaagataggattattcccggaggaatctacaacgccgatttgaatgacgaatgggtacagcgcgcactccatttcgcaatttctgagtacaataaagccaccaaagatgactactatagacgacccctgagggtgctaagggctcgtcagcaaaccgtggggggagtgaattatttctttgatgtggaggttgggcgtactatttgtaccaaatcacaacccaacctcgatacctgcgccttccacgagcaaccagagcttcaaaaaaagcaactctgcagcttcgagatatacgaagtaccatgggaaaataggagatcactggttaaaagtaggtgtcaggagtcttag

SEQ ID NO: 219691 - DNA, 582 bp, synthetic construct
  misc_feature 1..582: note = Description of Artificial Sequence: Synthetic coding sequence
  source 1..582: mol_type = other DNA
atgcctaattggggtggcggaaagaagtgcggtgtgtgccagaagaccgtgtatttcgctgaagaagttcagtgtgaagggaattcattccataaatcctgcttcttatgcatggtgtgtaaaaagaaccttgattcgacaacagttgcagttcacggggaggagatttattgcaaaagttgctacggcaaaaaatatggtcctaaaggctatggctacgggcagggggctggaacactgtccaccgacaagggtgaatcattgggaataaagcacgaggaggcacctggccacaggccgactaccaatcccaatgctagcaagtttgcccagaagataggtgggtctgagaggtgccccagatgttcacaggctgtctatgctgcggaaaaggttattggagcaggcaaatcatggcacaaggcgtgcttcaggtgcgcgaaatgcggtaaaggactcgagagcactactttagctgacaaagatggcgagatatattgcaaggggtgttatgccaaaaactttgggcctaaggggtttggttttggccaaggagccggtgcactagtacattccgagtag

SEQ ID NO: 219692 - DNA, 582 bp, synthetic construct
  misc_feature 1..582: note = Description of Artificial Sequence: Synthetic coding sequence
  source 1..582: mol_type = other DNA
atgccgaattggggaggaggaaaaaaatgtggtgtgtgtcagaagaccgtatactttgccgaagaagtccaatgtgagggtaatagcttccataagtcctgctttctatgcatggtgtgcaagaagaatctcgattcgactactgtggctgttcatggagaggaaatctattgcaaaagctgttatggaaaaaaatacgggccaaagggctatggttacgggcagggcgcaggtaccctttccacagataagggcgagtcacttggcataaaacacgaggaagccccaggccataggccaacgaccaaccccaatgcttccaagttcgcacaaaagatagggggttccgagagatgccccaggtgcagtcaagcagtgtacgctgccgaaaaggtaattggtgccggtaagtcctggcacaaggcctgctttagatgcgccaagtgtggcaagggcttggagagtactaccctcgctgataaggacggagaaatctactgcaagggctgctacgcaaaaaatttcgggccaaaaggattcgggttcggccagggggcaggagcactggtgcattctgaatag

SEQ ID NO: 219693 - DNA, 582 bp, synthetic construct
  misc_feature 1..582: note = Description of Artificial Sequence: Synthetic coding sequence
  source 1..582: mol_type = other DNA
atgcctaactgggggggagggaagaaatgcggagtgtgtcaaaagacagtgtattttgcagaagaggtgcagtgtgagggcaactcctttcacaaatcctgctttctctgtatggtttgcaaaaagaatctggattctactaccgtcgcagtgcacggcgaagagatatactgtaagtcatgctatggaaagaaatacggtcctaaaggatatggatacggccagggcgcaggcacactctcaacagataaaggcgaatcccttggcattaagcacgaggaagcaccaggtcataggcctactaccaaccccaacgcttccaaatttgcccagaagattgggggtagcgagagatgcccgaggtgttcgcaggccgtctatgccgcagaaaaagtgattggcgcagggaagtcttggcataaagcttgcttccgctgcgctaaatgcggtaagggattggagagcaccactcttgcagacaaggatggcgaaatttattgcaagggttgttacgccaaaaatttcggcccaaaaggcttcgggtttggccaaggggctggtgctctggtccatagtgagtag

SEQ ID NO: 219694 - DNA, 582 bp, synthetic construct
  misc_feature 1..582: note = Description of Artificial Sequence: Synthetic coding sequence
  source 1..582: mol_type = other DNA
atgcctaactggggcggaggaaagaagtgtggagtgtgtcagaagaccgtttatttcgccgaggaggttcagtgtgagggtaactcattccacaagtcttgctttttgtgcatggtttgcaaaaaaaacctagacagtacgaccgtggcagtgcatggggaagagatctattgcaaaagttgctatggcaaaaagtatgggcctaaaggctacggctacgggcagggtgcaggcacgctctctactgataagggggaaagtttgggcataaaacatgaggaagccccaggccaccgaccgacaactaaccctaacgcatccaaatttgcccagaaaataggcggtagcgaaaggtgtccacgctgctctcaggcggtttatgcagcagagaaggttatcggagctggtaagtcgtggcataaagcctgttttcgttgtgctaagtgtggcaagggacttgagagtaccactttagccgacaaagatggggagatttattgcaagggttgctatgcaaagaattttggtccaaagggatttggctttggtcagggtgccggtgcattggtacacagcgagtag

SEQ ID NO: 219695 - DNA, 513 bp, synthetic construct
  misc_feature 1..513: note = Description of Artificial Sequence: Synthetic coding sequence
  source 1..513: mol_type = other DNA
atgcccaactgggggggaggcaagaagtgtggagtctgtcagaaaacagtttattttgcagaggaagtgcaatgtgagggtaatagtttccataaaagctgttttctgtgcatggtgtgcaagaagaatctggatagcacaacagtggccgtgcacggcgaggaaatctactgcaaaagctgctatggaaaaaagtacggcccaaagggttatggatacggccaaggggctggcacaaaccccaacgcgtctaaattcgctcagaagataggtggttcagagcgatgcccaagatgcagccaggccgtgtatgcagctgaaaaagtaattggtgccggaaaatcatggcataaagcatgctttcggtgcgccaaatgtggcaaaggccttgagtccactacactggcggacaaggatggagagatatactgtaaaggctgctatgccaaaaattttggccctaaggggttcgggttcgggcagggcgcaggagccctcgtgcacagtgagtag

SEQ ID NO: 219696 - DNA, 582 bp, synthetic construct
  misc_feature 1..582: note = Description of Artificial Sequence: Synthetic coding sequence
  source 1..582: mol_type = other DNA
atgcccgtgtgggggggagggaataaatgcggcgcttgcggacgcactgtgtaccacgccgaagaggtgcagtgtgacggtcgaagttttcaccggtgttgctttctgtgtatggtctgcagaaaaaacctcgatagcaccacggtggctatccatgacgaggagatctactgtaagtcatgctacggcaagaagtatgggccaaagggctatggatatggacaaggtgccggtacactgaacatggacaggggggaacggctgggaatcaaacctgagagcgtacagccccaccggcctacgaccaatccaaatacatccaaatttgcccagaagtacggcggagcagaaaagtgtagcagatgtggtgactcagtctacgctgctgagaaaatcatcggagcaggcaaaccatggcacaagaactgttttaggtgcgcgaaatgtggcaagtcacttgagtccactactctgacggaaaaggaaggcgagatctattgtaagggatgctatgccaagaattttggccctaagggctttgggtacggtcagggagcaggcgctctcgtgcatgcccagtag

SEQ ID NO: 219697 - DNA, 582 bp, synthetic construct
  misc_feature 1..582: note = Description of Artificial Sequence: Synthetic coding sequence
  source 1..582: mol_type = other DNA
atgcccgtctggggaggaggcaacaaatgcggggcttgcggaaggacagtgtaccacgctgaagaggtgcagtgcgatggcaggagcttccatagatgctgtttcctgtgcatggtctgccggaaaaatttggattccacgactgtagccatacacgatgaggaaatctactgcaagtcttgttacggtaagaaatacggcccaaagggttacggttacggccagggggcaggaactctcaatatggacaggggtgaaagactcggtatcaaacccgagagtgtccagccccataggcctaccaccaaccctaatacctccaaatttgctcagaaatatggaggcgcagagaaatgcagccgctgtggggacagcgtttatgccgctgagaaaatcataggcgctggtaagccctggcataaaaattgctttaggtgtgctaaatgcggtaaaagcttagagtcaactactctgactgaaaaggagggagaaatatattgcaaagggtgttatgctaaaaacttcggtccaaaggggttcggctatggacagggcgcaggcgcactcgtgcacgcacagtag

SEQ ID NO: 219698 - DNA, 585 bp, synthetic construct
  misc_feature 1..585: note = Description of Artificial Sequence: Synthetic coding sequence
  source 1..585: mol_type = other DNA
atgcccaattggggcggtggagcaaagtgtggagcatgtgagaagactgtttaccatgctgaggagattcagtgcaacgggaggtcttttcacaaaacatgttttcattgtatggcttgtcggaaagccctcgacagcacaactgtggcggcacatgaatctgaaatatattgcaaggtttgttatgggcgtcgatacggcccaaaaggtatcggatacgggcagggggcagggtgtttaagcaccgacacgggggagcacctggggcttcagttccagcagtcccctaagccagccagaagcgtgactacctccaacccttcgaaattcaccgcaaaattcggggagtcggaaaaatgtccacgctgcggcaagtccgtgtatgctgcagagaaagtgatgggcggaggcaaaccttggcataaaacatgttttcggtgtgctatttgcgggaaaagtctggaaagcaccaatgtgactgacaaagacggcgaactatattgcaaggtgtgctacgcaaagaactttggcccaaccgggatcggttttggtggactgacccaacaggtagaaaaaaaggaatag

SEQ ID NO: 219699 - DNA, 585 bp, synthetic construct
  misc_feature 1..585: note = Description of Artificial Sequence: Synthetic coding sequence
  source 1..585: mol_type = other DNA
atgccaaattgggggggaggggcaaaatgtggggcatgtgaaaaaaccgtctatcacgccgaggaaattcagtgtaacggacggagtttccataaaacatgctttcactgcatggcgtgccggaaagccctcgattcgacaaccgtcgctgcacacgagtctgagatttattgcaaggtgtgttatggccgtcgctacggtcctaagggcatcgggtacggtcagggcgctggctgcctgtcaaccgacacaggagaacacttgggcttgcagtttcagcagtctccaaagcctgccagatccgtgactacatctaacccatcaaaatttacagccaagttcggcgagtcagagaagtgtccgcgatgtggtaagtctgtgtatgctgcggagaaagtcatgggtggtgggaagccctggcacaaaacctgcttccgctgtgcgatctgcggcaaatccttagagtccaccaacgtgacagataaggacggcgaactatactgtaaagtctgttacgctaaaaatttcggccctactggaatcggctttggtggtttaactcagcaggtagaaaagaaggagtag

SEQ ID NO: 219700 - DNA, 1365 bp, synthetic construct
  misc_feature 1..1365: note = Description of Artificial Sequence: Synthetic coding sequence
  source 1..1365: mol_type = other DNA
atgtttctagctcagaggagtctgtgctctctaagcgggcgtgccaaattccttaagacaattagctcatccaaaattctaggcttcagcactagcgccaagatgtccctgaagttcacaaacgccaagcgcatcgaaggtctcgattcaaacgtgtggatcgaatttaccaagctggctgcagacccatcagtcgttaacctgggacaaggatttcccgacataagtcctcctacctacgtaaaggaagagctgtcaaagatcgcagcaatcgattcactcaatcagtacacaaggggtttcggccatccttctttggtgaaagctctgtcatatctctatgagaagctctatcagaagcagatcgattcgaacaaggaaatcctggtgacagtgggcgcttacggcagcctcttcaacaccatccaagcactgatagatgagggagacgaagtgatcctcattgttcctttttacgactgttacgagccaatggttcgtatggctggcgcaactccggtttttatacctttaagatccaagccagtgtacgggaaaaggtggtccagcagtgactggacactcgacccacaggaactggagtccaagttcaactcgaaaacaaaggccattattctgaacaccccccataaccccctcggcaaggtctacaacagagaagagctgcaggttatcgccgatctgtgcatcaaatatgacacgctctgcatctccgacgaggtttatgagtggctcgtgtactcaggcaacaagcacctaaaaatagccaccttcccaggtatgtgggagcgcactatcactatcgggtcagctgggaaaacgttttcggtgacagggtggaagctgggctggtctatcggacctaatcatctgatcaaacacttgcaaacggtgcagcaaaacactatctacacatgcgcaacccccctgcaggaagcactggcccaggcattctggatcgacataaagcggatggacgatccagaatgctacttcaattcactccctaaagagctggaagtgaagagggaccgaatggtgcgtttgttggaaagtgtgggtctaaagccaatcgtgcctgatggcggatattttatcatcgccgacgtcagccttctggacccggacctcagtgatatgaaaaacaacgagccctacgactacaaatttgtgaaatggatgacaaagcacaaaaaactgtccgccattcccgtctccgctttttgcaattccgaaacaaagtctcagttcgagaagtttgtccgcttttgcttcattaaaaaagactccactctagatgctgctgaagagattatcaaagcatggagcgtccagaaaagttag

SEQ ID NO: 219701 - DNA, 504 bp, synthetic construct
  misc_feature 1..504: note = Description of Artificial Sequence: Synthetic coding sequence
  source 1..504: mol_type = other DNA
atgtttctggcccagaggtccctctgttccctgtccgggagggcaaagttcctgaagaccatctctagttccaaaatactgggttttagtaccagcgccaaaatgagcctgaaatttacaaatgcaaagcggatcgaggggcttgattctaacgtctggattgaattcaccaagctggccgcagatccgagcgtggtcaacctgggtcagggctttcccgatatcagtccccctacctatgttaaggaagaactgtccaagattgctgctatcgatagtttgaatcagtatacacgtggattcgggcacccctctttagttaaagcactatcttatctctatgaaaagctgtatcaaaagcagatcgacagcaataaggagattctcgtaactgtcggcgcatacggctcactttttaacactattcaggcactgattgatgaaggcgatgaatataatgcctgcacagtgaaattcactaacctgaagtgtactgcgggttag

SEQ ID NO: 219702 - DNA, 789 bp, synthetic construct
  misc_feature 1..789: note = Description of Artificial Sequence: Synthetic coding sequence
  source 1..789: mol_type = other DNA
atgtttttagctcagcgtagcctctgttcattatcagggcgtgcaaaattcctaaagactatctcctcctccaaaatcctcggtttctccacgtcagctaagatgtcccttaagttcacaaacgccaaacggatcgaggggttggatagcaatgtctggattgaatttacgaagctggccgctgacccatccgtggtaaacctaggtcaggggttccccgacattagcccacctacttacgtgaaggaggaactttcaaagatagcggcaattgactctctgaatcagtacaccagaggatttggacacccgtcactggtcaaggcactcagttacctgtacgagaaactctatcagaagcagatcgacagcaataaagagattctggtgacagttggtgcctatgggtccttgttcaacactatacaggctctcattgacgagggcgacgaggtaattctcatagtgccattctatgactgttacgaaccaatggttcggatggccggagctactcccgtgtttattcctctgcggtctaaacctgtctatgggaaaaggtggtcttcatctgactggacactggatccccaggagctcgagtccaagtttaattccaagacaaaagctattattctcaacacaccccacaaccccctgggaaaggtttacaaccgtgaagagctccaagtgatcgctgatctgtgtatcaaatatgatacactgtgtatctcagatgaagtgtacgagtggcttgtctattccggcaataaacatctgaagatctag

SEQ ID NO: 219703 - DNA, 1263 bp, synthetic construct
  misc_feature 1..1263: note = Description of Artificial Sequence: Synthetic coding sequence
  source 1..1263: mol_type = other DNA
atgtcacttaaatttaccaacgccaaacggatcgaggggctcgactccaacgtctggatcgaatttaccaagctagcagccgatcccagtgtcgttaatttgggccaaggattccccgatatctcacccccaacctacgtgaaagaagagctaagcaagattgccgctatagatagtctgaaccaatataccagaggattcgggcatcccagtctcgtgaaggcactgagctatctgtatgagaaactgtaccagaagcaaattgactccaataaggagatcctggttaccgttggcgcatacggcagcctttttaatacaatccaagccctgatcgatgaaggggacgaggtgatcctgatagtgcccttttatgattgctacgagcccatggtacggatggccggagcaactcccgtcttcattcccttgcgctctaaacctgtctacgggaagcggtggtctagttccgattggaccctcgatcctcaggagttggagtccaaattcaattctaaaaccaaggcaatcatcttaaacacaccccacaatcccctgggcaaagtctataatagggaagaactgcaggttatcgccgatctatgcattaagtatgacacactgtgtatctccgacgaagtgtatgaatggctggtctattcgggcaacaagcacctcaagatcgctacctttccaggtatgtgggaacgtacaatcacaatcggctcagcgggaaagaccttttcagttactggttggaaactggggtggagcattggacccaaccatttgataaagcatctacaaacagtccagcagaacactatttatacatgcgccacaccgctccaagaagcactcgcccaggccttctggatagatatcaagcggatggacgaccccgagtgttacttcaactccctgcctaaggagttagaggtgaagcgggaccgtatggttagactcttagaaagcgtgggcctgaaacctatcgtccctgacggaggctattttatcattgctgacgtcagcttattagatcccgatttaagcgacatgaaaaacaatgaaccatacgattataagtttgtaaagtggatgaccaaacacaagaagctgtctgccatccctgttagcgcattctgcaatagcgagaccaagagtcagtttgaaaagttcgttagattctgctttattaagaaggacagcactctggacgccgcagaagaaattattaaggcttggtctgttcagaagtcctag

SEQ ID NO: 219704 - DNA, 1269 bp, synthetic construct
  misc_feature 1..1269: note = Description of Artificial Sequence: Synthetic coding sequence
  source 1..1269: mol_type = other DNA
atggcgaagcaactccaggccagaagactggatggaatagattacaacccttgggtcgagtttgtgaagttagcttctgagcatgacgttgtgaacttgggccagggctttcctgacttccctcctccagactttgccgtggaagccttccagcatgcagtgtccggggacttcatgctgaatcagtatacaaaaacgttcgggtacccaccactgacaaaaattctggcttcttttttcggtgagctcctgggtcaggaaattgacccactaagaaatgtgctcgtaacagtcggagggtacggggcactgttcactgcctttcaagctctagtcgatgagggagatgaggtcatcatcatcgaaccgtttttcgactgttacgagccaatgacaatgatggcaggcggtcgcccagtattcgtgtccttaaagccagggccaatccagaacggggaactggggagctccagcaactggcaactggaccctatggagctcgccggaaaattcacaagccggaccaaagccctggttcttaatacacccaacaacccgctaggaaaggtcttcagccgcgaagaacttgagttggtggcttctctctgtcagcagcatgatgttgtctgcatcaccgacgaggtgtatcagtggatggtgtacgacggccatcagcatattagcatcgccagtctgccaggtatgtgggagcgaaccctgacaattggaagcgccggaaagacatttagtgccaccggctggaaggtaggctgggtgctcggcccagatcacattatgaagcatctacgcacagtgcaccagaattcagtgtttcattgcccaactcagagccaagcagcagttgccgaaagcttcgagcgtgaacagctcctctttagacaaccttcctcctactttgtgcagttcccacaggccatgcagcgctgccgggaccatatgatccgaagcctgcagtctgtcggtttaaagcctatcatcccacaggggtcgtacttcttgatcacggatatatccgactttaaaaggaaaatgcccgacctccctggcgctgtggatgagccttacgacaggaggtttgtgaagtggatgatcaagaataaagggttagtggctataccggtgtccatcttttacagcgtcccccaccagaaacatttcgatcactatatccggttctgttttgtcaaagacgaggctacgctgcaggctatggacgagaagctgaggaagtggaaagtggagctttag

SEQ ID NO: 219705 - DNA, 1119 bp, synthetic construct
  misc_feature 1..1119: note = Description of Artificial Sequence: Synthetic coding sequence
  source 1..1119: mol_type = other DNA
atggctaaacagctgcaagcacggagattggacgggattgattacaatccttgggtggaattcgtcaagctggcaagcgaacatgacgtggtcaatctgggtcagggctttcccgactttccaccccctgatttcgccgttgaagcgttccagcacgctgtcagcggggattttatgcttaaccagtacactaagacgttcgtcatcatcatcgagcctttcttcgattgctacgagcccatgactatgatggccggtggcagaccggttttcgtgtccctgaagcccggtccaatacaaaacggggagcttggcagctcgtctaactggcagcttgacccaatggagctggctggcaaatttacatcaagaacaaaagcactcgttctgaacacccctaataatccacttggcaaagttttctccagggaagagttggagctagttgcatcgctctgccaacagcacgatgtggtgtgtataacagacgaggtataccagtggatggtatatgatggccaccagcacatttcaattgccagcctgcccggaatgtgggaaaggaccctgactataggctcggctggcaagacttttagcgctaccggttggaaagtagggtgggtgttggggccagaccatataatgaaacacctcaggactgtccatcagaatagcgtctttcactgtcccacacagtctcaggctgcggtcgcggagagcttcgagcgggagcagctgctctttagacagccgtcatcctactttgttcagtttcctcaggctatgcagcgatgcagagatcatatgattcggagcctgcagagcgtagggctgaagccgatcattccccaaggctcatattttctgatcacggacatctcagattttaagaggaaaatgccggacctaccaggagcagtggatgagccatatgatcgacgtttcgtgaaatggatgattaagaacaagggcttggtagccatccctgttagcatattttattccgtgccacatcagaagcatttcgaccactatatccgtttttgtttcgtcaaagatgaggcaaccttgcaagctatggacgagaaactgagaaaatggaaggttgaactctag

SEQ ID NO: 219706 - DNA, 480 bp, synthetic construct
  misc_feature 1..480: note = Description of Artificial Sequence: Synthetic coding sequence
  source 1..480: mol_type = other DNA
gcgatggccaaacagctgcaggctcggaggttggacgggatagattataatccctgggttgaatttgttaagctcgcctccgaacatgatgttgttaacctcggacagggtttcccagactttcctccacccgattttgccgtcgaggccttccagcacgcagttagtggtgactttatgctaaatcaatacacaaaaacctttgtgtctttatgctatccaggctggtcagcaatggtgagatcttggtcgactgctgccctgaccctcccagttagctctggaccccctacatccgcgtccggtgtaactgggaccaccggatggtcacaatcttggttagagagttcctttttcgaccccaaaaaaaaaaagatcatctggggatatcccccacttacaaagattctggcctccttctttggagaactgctcggccaggagatcgaccctctgagaaatgtgttagtcacagtctag

SEQ ID NO: 219707 - DNA, 555 bp, synthetic construct
  misc_feature 1..555: note = Description of Artificial Sequence: Synthetic coding sequence
  source 1..555: mol_type = other DNA
atggctaagcaactgcaagctcgaaggctggatggaatcgattacaatccttgggtggaatttgttaaactcgcttctgagcacgacgttgtgaatttgggccaggggtttcctgactttcctcccccagattttgccgttgaggcttttcagcacgctgtgtcaggcgactttatgctgaaccagtacactaagacattcggctaccccccactaaccaagatcctagcatctttctttggggagcttcttgggcaggagatagaccctctacggaacgtgctcgttaccgtggggggttacggcgctctgtttactgcctttcaggctcttgtcgacgaaggggatgaagttattattatcgaacccttctttgattgttacgagcccatgaccatgatggccggaggacgccctgtgttcgtctccctgaaaccaggacccatacagaacggcgaactcggcagttcttcaaactggcagctggatcccatggagctcgccggaaagtttacctcccgcaccaaagctctggtcctgaatactccaaattag

SEQ ID NO: 219708 - DNA, 480 bp, synthetic construct
  misc_feature 1..480: note = Description of Artificial Sequence: Synthetic coding sequence
  source 1..480: mol_type = other DNA
gccatggctaaacagctccaggccagacgcttagatgggatcgactacaatccgtgggtcgagtttgtgaaattagcttccgaacatgatgtggtgaatctgggccaggggttccccgatttccctcctccggattttgcggtagaggcctttcagcatgcagtttctggggatttcatgctgaaccaatatactaaaacctttgtgagcctatgctaccctgggtggtcagcgatggtgaggtcctggtccaccgcagcacttacactgccagtgagtagcggaccgcctacatctgcatcaggagttacaggaaccaccggatggagccagtcctggctagagtccagttttttcgatcctaagaagaaaaaaattatatggggttatcccccactcaccaaaatccttgctagttttttcggtgaactgctggggcaggaaattgatccccttagaaatgtgctggtaacggtttag

SEQ ID NO: 219709 - DNA, 1551 bp, synthetic construct
  misc_feature 1..1551: note = Description of Artificial Sequence: Synthetic coding sequence
  source 1..1551: mol_type = other DNA
atgtttcgtactgccgcagctattagtgttcacctggtggggcctctgcaaggcagaaaggcaggcgcaccgctgacgtggttcctgcaccagacacaagtggcggaaaagaatgtcggatctcccgctccgagacccacgagtcatttagggctggccaatcctcaggaaaggaaagtaccacagggaccccaatccccctgcgaggttccggcagctgagggcatactgcgcacagggggagcaaaattgccgatacagggccaccccgctaaacttgccatggctaagcagctccaggcaagacggcttgatggaatagattataatccatgggtggaattcgtgaaactggctagcgaacacgacgtggtcaatcttggccaaggattccccgacttcccccctccagacttcgccgtggaggcattccagcacgcagtaagtggtgactttatgcttaaccagtatactaagacgttcggctacccgccactcactaagattctcgcctcgttttttggcgagttgctcggtcaggagattgatcccttgagaaatgtgttggtgactgtgggcggatatggcgctctctttacagcttttcaggcactcgtcgacgaaggagacgaagtgatcataattgagccctttttcgattgctacgagcccatgacgatgatggcagggggaagaccagtgtttgtgagtttaaaacctgggccaattcagaatggagagcttggctcttcctccaattggcagttagaccctatggagctggccggaaagtttacctctcggactaaggcactcgttctaaacactccgaacaatccgctggggaaggtgttcagcagggaagaactggagctcgtggcttccctgtgccagcagcacgatgtggtttgcattactgacgaggtgtatcagtggatggtatacgatggccatcagcacataagcatcgcctccctgcctggaatgtgggagcgcaccctaaccatcggcagcgccggaaagacattctctgcaaccggctggaaggtggggtgggtcttagggcctgaccacatcatgaagcacttacgtaccgtgcatcagaacagcgtgttccactgccctacccagagtcaggccgcagtggcagaaagctttgagcgcgagcaactgctgtttaggcaacccagctcatacttcgtccagttcccacaagcgatgcagcgatgcagggatcacatgattaggagcctgcaaagcgtggggcttaagcctatcattccccaaggtagctactttcttatcacagacatcagtgacttcaaacggaagatgccagaccttccgggagcggtcgatgaaccctatgatcggaggttcgtaaaatggatgatcaagaataagggcctggtagccatacccgtgagcatcttctacagtgtaccccatcagaagcactttgatcattacattagattctgttttgtcaaggatgaagccaccctgcaggctatggacgaaaagttgagaaaatggaaagtggagctctag

SEQ ID NO: 219710 - DNA, 756 bp, synthetic construct
  misc_feature 1..756: note = Description of Artificial Sequence: Synthetic coding sequence
  source 1..756: mol_type = other DNA
atggcgaagcagcttcaagctcgtagactcgatggaatagattacaatccgtgggttgagttcgttaaattagcatctgagcacgacgtggttaatctgggccagggcttccccgacttcccaccccctgattttgccgtggaggcttttcagcatgccgtgtcaggtgattttatgctcaaccagtatacgaaaactttcggctaccctcctttgaccaagattctagctagtttttttggcgaattgctcgggcaggaaatcgaccccctccggaatgtgctggtgacagtgggaggatatggcgctctgtttaccgcctttcaagcactagtagacgaaggggacgaggtgataataatcgaaccttttttcgactgctacgaaccaatgaccatgatggcgggagggaggccagtgttcgtatccctgaagcccggtcccatacagaacggcgagttgggttcatcctccaactggcagctggaccccatggagctggcagggaagtttacatcacgaacaaaggctctcgttttaaacaccccaaataaccctttgggtaaggtcttctccagagaggagcttgagttagtggccagcttatgtcagcagcatgacgtggtctgtatcaccgatgaggtctatcagtggatggtttacgatggacaccagcacatctccattgccagcttacctgggatgtgggagcgaaccctgacaataggatccgctgggaagacattttcagcttag

SEQ ID NO: 219711 - DNA, 603 bp, synthetic construct
  misc_feature 1..603: note = Description of Artificial Sequence: Synthetic coding sequence
  source 1..603: mol_type = other DNA
atggagcagactgaggtgctcaagcctcgcacgctggccgatctcataaggatcctccaccaactgtttgccggagatgaagtcaacgttgaggaggtacaggcgatcatggaggcctacgagtcggatcctaccgagtgggccatgtatgccaaatttgatcaatatagatacacacggaacctagtggatcaggggaatggaaagttcaaccttatgatcctctgctggggcgaaggacacggcagttccattcatgaccataccaactctcactgttttctgaagatgctgcagggtaatctgaaggagactttattcgcatggccagacaaaaagtcaaacgagatggtgaaaaagtccgaaagggtgctgagggagaatcagtgtgcctatatcaacgactcgatagggctccaccgtgtggagaatatcagtcacacagaacccgcagtgtccttgcatctgtatagtcctccatttgatacatgccatgcgttcgaccagaggactggccataagaacaaggtgactatgacgttccactcaaagtttgggatacgtactccaaatgctactagtgggtctctcgagaacaactag

SEQ ID NO: 219712 - DNA, 3111 bp, synthetic construct
  misc_feature 1..3111: note = Description of Artificial Sequence: Synthetic coding sequence
  source 1..3111: mol_type = other DNA
atgtatcttgtcgctggcgaccgcggactagctgggtgtgggcaccttctggtatcactgctgggcctgctcctcctcctggccagatctggaacacgagccttagtgtgtctgccatgcgacgagtccaagtgcgaggagccccgaaactgcccaggctccattgtccagggagtttgtggttgctgctatacctgcgcttcacagcgtaatgaaagttgtggcggtaccttcggcatttacggcacatgtgaccgaggactccgttgtgtcatccgcccacccttaaatggggatagtctgaccgagtatgaggccggagtgtgtgaagatgagaattggactgatgaccaactgctgggatttaagccttgtaacgagaacctcatagcagggtgtaatattataaacgggaagtgcgagtgtaatacaatacggacatgctcaaatccctttgaatttcccagtcaggatatgtgtctgagtgccctcaagaggatcgaagaagagaaaccagactgcagtaaggccagatgcgaggtccagttttccccaagatgccctgaggattcagttttaatagaaggttatgctcctcccggagaatgttgcccgttgccaagtagatgtgtttgtaatcccgctggctgcctgagaaaagtatgccaacccggaaatctgaatattctggtgtctaaggcatccgggaaacctggtgagtgctgcgatctttatgagtgcaagccagtattcggagtagattgtcgcacagtggagtgcccccctgtgcaacaaacggcttgtccaccagactcttacgagacacaggtacggcttacggcggacggatgctgcaccctgccaactcgatgcgagtgcctttccggcttatgcgggtttccagtgtgtgaggtgggatctacaccacggatcgtgagtcggggagatgggactcccggaaagtgctgcgacgtgttcgagtgcgtcaacgacaccaagccagcttgtgtttttaataacgtggagtactacgatggtgacatgttccgaatggataactgccgtttctgtagatgtcaaggtggagtagccatctgcttcaccgcccagtgtggagagataaactgcgaaaggtattacgtgccggagggcgagtgttgccctgtttgcgaagatccagtgtaccctttcaataacccggcaggatgctacgcaaatggcctaatcctggcccatggcgaccgctggagggaggatgattgtacattttgccagtgcgttaatggtgagagacactgcgtcgctacggtgtgtggtcagacttgcaccaaccccgtgaaagtgcccggagagtgttgccccgtctgtgaagagccaactatcatcactgtggacccacccgcatgtggggagctgtcgaactgcaccctgacaggcaaggattgcatcaacgggtttaagagagatcataatggctgcagaacatgccagtgtataaatactgaggaactgtgcagtgagagaaagcagggatgcaccctaaattgtccctttggcttcttgaccgacgctcagaactgcgaaatttgcgagtgtcggcctcggcctaagaagtgccggcctatcatttgtgataagtattgcccgctggggctcctgaaaaataagcacggatgcgatatttgtagatgcaagaaatgtcccgaactctcatgttctaaaatctgccccctgggatttcagcaggacagtcacggctgccttatttgcaagtgccgagaggcgtccgcatctgctggaccaccgatcctcagtggcacatgcctcactgtggacgggcaccaccataagaacgaggagtcatggcatgacggctgccgcgaatgctattgcctaaatgggcgagagatgtgtgcccttattacttgccctgtcccagcctgcggaaaccccactattcatcctgggcagtgctgtccaagctgtgctgatgactttgtggtccaaaagccagagctatctaccccttcaatttgtcacgcccctggcggagagtattttgtggagggcgagacctggaacatagacagttgtacgcagtgcacctgccactccggcagagtattatgcgaaaccgaagtgtgtcccccattgttgtgccagaatccaagtagaacacaggatagttgctgcccccagtgtaccgatcagcccttcagaccgtcactgtctaggaacaacagcgtcccaaactactgcaagaatgatgagggagacatcttcctggccgcagagtcctggaagcctgacgtgtgtacttcctgtatttgcatagacagtgtgatctcatgctttagcgaaagctgcccctcagttagctgtgaacgaccagtcttgagaaagggacagtgttgcccatattgcatcgaggacacaattcctaagaaggtagtatgccacttttcaggcaaagcgtacgccgacgaagagaggtgggatttagattcctgcactcactgttattgcctgcaaggccagaccttatgctccacagtcagttgtccaccgctcccctgtgtcgagccgataaatgtggagggaagctgctgtcccatgtgccccgagatgtatgtgccagagcctactaacattccgatcgagaaaacaaatcacagaggagaagtcgatctggaagtgcctctgtggccgacccctagcgaaaatgatatcgtgcatttgcctagggatatgggccacctgcaggtggattatcgggataaccgccttcacccctccgaagattcttcactggattctattgcaagcgtggtagtccctattatcatttgcttatccatcatcattgcctttctgttcattaatcaaaagaagcagtggattcctctgctgtgctggtatcgtacacccaccaagcccagcagtcttaataaccagctcgtctctgtggattgtaagaagggcactagggttcaggtggactcgtcacagcgaatgctgcgcattgccgagcccgatgccaggttcagcggtttctatagtatgcagaaacagaaccacctgcaagctgataacttctaccagacagtgtag

SEQ ID NO: 219713 - DNA, 498 bp, synthetic construct
  misc_feature 1..498: note = Description of Artificial Sequence: Synthetic coding sequence
  source 1..498: mol_type = other DNA
atggctgattttgatgaaatatacgaggaagaggaagacgaagaacgggctctcgaggagcagctactgaaatattcaccagatcctgtggttgtgagaggttcaggccacgtgaccgtttttggtctgagcaacaaattcgaatccgagttccctagttctttgacagggaaggtggctcccgaggaatttaaagcttccattaaccgagttaattcctgcctaaagaagaatctgcccgtaaacgtgagatggctgctgtgcggctgcctctgctgctgctgcacactcggatgttccatgtggcccgtaatttgcctgtcgaaacgcacccggaggtctatcgaaaaactcttggaatgggaaaataataggctctatcacaagttgtgtcttcactggcgcctgagtaaaagaaagtgtgagacgaacaatatgatggaatacgtcatcctcatcgaattcctcccaaagactcctatttttaggcctgattag

SEQ ID NO: 219714 - DNA, 234 bp, synthetic construct
  misc_feature 1..234: note = Description of Artificial Sequence: Synthetic coding sequence
  source 1..234: mol_type = other DNA
atgcccaaatgtccaaagtgtaataaggaggtatactttgccgaaagggtaactagcttaggcaaggactggcacaggccctgcttgaaatgcgagaagtgcgggaagacactcacgagcggaggccatgctgagcacgagggtaaaccatattgcaaccacccttgttacgccgctatgttcgggccaaaaggattcgggagaggaggagctgaaagccacacgttcaagtag

SEQ ID NO: 219715 - DNA, 234 bp, synthetic construct
  misc_feature 1..234: note = Description of Artificial Sequence: Synthetic coding sequence
  source 1..234: mol_type = other DNA
atgcccaagtgcccaaaatgcaacaaagaagtgtactttgcggagcgcgtcaccagcctgggaaaagattggcacagaccatgcctcaagtgtgagaaatgcggcaagacactcactagtgggggacatgctgagcatgagggaaaaccttattgcaaccacccttgttacgcggctatgttcgggccaaaaggatttgggagaggaggcgcagaaagccataccttcaagtag

SEQ ID NO: 219716 - DNA, 234 bp, synthetic construct
  misc_feature 1..234: note = Description of Artificial Sequence: Synthetic coding sequence
  source 1..234: mol_type = other DNA
atgccaaagtgccccaaatgtaacaaggaggtgtacttcgccgaacgtgtcacaagtctagggaaagactggcataggccttgtctgaagtgcgagaagtgcggaaagacacttacttcaggcggacatgccgaacatgagggtaaaccatattgtaatcacccatgctatgctgcgatgttcggccctaaggggttcgggagggggggtgctgaatcacacacattcaagtag

SEQ ID NO: 219717 - DNA, 627 bp, synthetic construct
  misc_feature 1..627: note = Description of Artificial Sequence: Synthetic coding sequence
  source 1..627: mol_type = other DNA
atggcttcaaaatgccccaagtgcgataagacggtgtattttgccgagaaagtttcctctttaggcaaggactggcacaagttctgtctgaagtgcgagcgttgttcaaaaaccctgacgcctggaggccacgctgagcacgatggaaaaccattttgtcataaaccttgctacgccactttgtttggccctaagggggtgaatattggcggagccggtagctacatttatgagaagccactggcagaaggaccccaagtgactggcccaatagaggtcccggctgcgagagcagaagagcgaaaagcatctggccctcccaagggtccaagcagggcatccagcgtgactacatttaccggcgaacccaacacctgcccccgatgttctaaaaaagtttacttcgcagaaaaggtgaccagcctggggaaggactggcacaggccctgtctgaggtgtgagaggtgcggcaaaaccctgacgccaggcggacatgccgagcatgacggccaaccctactgccacaagccttgctacgggatacttttcggcccaaaaggcgtgaataccggcgctgtgggttcatatatttacgacagagaccctgaaggaaaggtccaaccgtag

SEQ ID NO: 219718 - DNA, 849 bp, synthetic construct
  misc_feature 1..849: note = Description of Artificial Sequence: Synthetic coding sequence
  source 1..849: mol_type = other DNA
atgccaccgcaccatttgctgccctggctcgcccaggtgccaagcgccgaaggcgagttagtgagactggtgtcgcgcgcagggggtcgtggagcctgcttttggcctgcggtgactatggaaatggccgttgccgcaggatgcgtctgtaaaggaggcggatgttgccatcgcgaacccagccaggatcatcacgagagtcaagagcaccgcggtcccctggtgggtagtcaaacgtgtctggttcaccaggccgaaggaaccgcggagaaggtgagctcccttggcaaggactggcacaagttttgtctgaaatgcgaaagatgctcaaaaacattaacacctggcggtcatgccgagcacgacggtaagcctttctgccacaaaccttgttacgccaccctcttcggacctaaaggtgtgaatattgggggagcaggcagttatatctacgaaaaacccctggccgaaggaccgcaggtcactgggccaattgaggtgcctgccgctagagctgaagaacgcaaggctagcggtcccccaaagggaccctctcgagccagcagcgttacaacgtttacaggggaacccaacacttgtccccgttgcagtaaaaaggtgtattttgcagagaaagtcacctctctgggcaaagattggcatcggccatgtctgaggtgtgaacgctgcgggaaaaccttgactcctggaggtcatgcggaacacgatgggcagccctattgccacaagccttgctatgggatattgtttgggccaaagggcgtaaacaccggcgctgtcggcagttacatctacgacagggatcccgaagggaaggtgcaaccatag

SEQ ID NO: 219719 - DNA, 315 bp, synthetic construct
  misc_feature 1..315: note = Description of Artificial Sequence: Synthetic coding sequence
  source 1..315: mol_type = other DNA
taaccgggaggggagcgagccgaaggcgctgggaggcctggcgcaccaacgatggcgagcaaatgccctaagtgcgataagacagtttacttcgccgaaaaggttacttcgctcggcaaggattggcatcgaccatgtttgcggtgcgagaggtgtgggaaaacactgacacccggtggccatgcagagcacgacggtcagccctactgccacaaaccatgttatggcatcctctttggacctaaaggcgtcaatacgggagcagttggaagctacatttatgatagagatcccgagggcaaggtacaaccctag

SEQ ID NO: 219720 - DNA, 537 bp, synthetic construct
  misc_feature 1..537: note = Description of Artificial Sequence: Synthetic coding sequence
  source 1..537: mol_type = other DNA
atggaaataaaacatcttctctttctggtggccgcagcgtgtctcctgccgatgctcagcatgaaaaagaaatccgctcgcgaccagtttaataagctggtcacagatctgcccaacgtgcaggaagaaatcgtcaacatccataacgctcttcgcaggcgcgtagtgccgcctgcctccaacatgctgaagatgagttggtccgaagaggccgctcagaacgccaggattttctccaagtattgcgatatgacagaaagcaatcccttggagcgcagactccccaatacattctgcggtgaaaatatgcacatgacaagctaccccgtttcctggtcatctgtcatcggagtgtggtactccgaaagtacctcttttaagcatggagagtggacaactaccgatgacgacattaccacagatcactacacacaaatagtctgggcaacatcataccttattggttgtgctatcgcatcctgtcgtcagcaagggtcccctaggtacctgtacgtctgccactactgccatgactag

SEQ ID NO: 219721 - DNA, 750 bp, synthetic construct
  misc_feature 1..750: note = Description of Artificial Sequence: Synthetic coding sequence
  source 1..750: mol_type = other DNA
atggagatcaaacatcttttattcctcgttgcagcagcctgcctattgcctatgctctccatgaagaagaaatccgcccgagatcagttcaataagctggttaccgacctgcccaacgtgcaggaggaaattgtcaacattcataacgctctgcgaagacgcgtggtgcctccggcatcaaacatgctgaagatgagttggagtgaagaagccgctcagaacgctagaatattttctaagtattgtgatatgacagagagtaaccctctggagcggagattacccaatacattttgcggtgagaacatgcacatgacatcctatccggtgtcttggtcaagtgttataggggtttggtatagcgaatctacttcctttaagcatggcgaatggaccacaaccgacgacgacattaccaccgaccactacacgcagattgtgtgggctacatcttatctcatcggctgtgccatcgcgtcttgcagacaacagggctctcctaggtacttatacgtgtgccattactgccacgagggaaatgacccagaaaccaaaaatgaaccgtataagactggtgtgccctgtgaagcctgtccctctaactgcgaagataagctgtgtacaaacccatgtatttactatgacgagtattttgactgtgatatccaggttcactatctcggatgtaatcattccaccactatcttattctgcaaggctacatgtctgtgtgatacagagattaagtag

SEQ ID NO: 219722 - DNA, 750 bp, synthetic construct
  misc_feature 1..750: note = Description of Artificial Sequence: Synthetic coding sequence
  source 1..750: mol_type = other DNA
atggaaattaagcatctcctgtttctcgtggccgcagcctgcctgttgcctatgctcagtatgaagaagaaaagcgccagagatcagtttaacaagctggtcaccgatctgccgaacgtgcaagaggagatcgtgaatatccataacgcactgcgtcgcagggttgttcctcccgcaagcaacatgctgaaaatgtcctggtccgaggaggcagcacagaatgccaggatttttagtaagtattgtgacatgaccgagtcaaaccctttagagcgccgactgcccaacactttctgcggcgagaatatgcatatgacctcctaccccgtgagctggtcttccgtaatcggagtttggtatagcgagagtacatcgttcaaacacggcgagtggaccactactgatgatgatattacgaccgaccattacacacaaattgtgtgggctacatcatatctgatcggatgtgctatagcttcctgtcggcagcagggctctccacgctacctgtatgtgtgtcattattgccacgagggcaatgatcccgagaccaaaaatgagccctacaagacaggagtgccttgtgaggcatgcccctccaactgtgaagataagctctgtaccaatccatgcatttactacgatgaatatttcgattgtgacatccaagtccactacctgggttgtaatcatagcacgacaatcctgttctgtaaagctacatgcctctgcgacaccgagatcaagtag

SEQ ID NO: 219723 - DNA, 750 bp, synthetic construct
  misc_feature 1..750: note = Description of Artificial Sequence: Synthetic coding sequence
  source 1..750: mol_type = other DNA
atggagatcaaacaccttctgttcttagtggcagccgcatgtctgctgccgatgctatccatgaaaaaaaagagcgcgcgagaccagttcaacaagctggtgacagatctgccgaacgtgcaggaggaaatagtcaatatacataacgctttacggcgtagagtcgtgccacccgcttccaacatgttaaagatgagttggtctgaagaagctgcccagaacgcgagaatattcagcaaatactgcgatatgaccgagtccaacccactcgaaaggcgtctgcccaataccttttgcggcgaaaatatgcatatgaccagctaccctgtctcatggagttctgtgatcggggtgtggtacagcgagtctacctctttcaagcatggagagtggaccaccaccgacgatgacattactactgatcattacacacagattgtttgggctacttcctatttgattggatgtgccattgccagttgcaggcagcaagggagccccagatatctgtacgtgtgccattactgccacgagggaaacgacccagagactaaaaacgagccttacaaaactggcgttccctgtgaagcctgccctagcaactgcgaagacaaattatgtaccaacccctgcatatactatgacgagtatttcgattgtgacattcaggtgcattatctggggtgcaatcacagcactactattctattctgtaaagcaacatgtctgtgcgacactgaaataaagtag

SEQ ID NO: 219724 - DNA, 537 bp, synthetic construct
  misc_feature 1..537: note = Description of Artificial Sequence: Synthetic coding sequence
  source 1..537: mol_type = other DNA
atggaaatcaaacacctgctgtttctagtggccgcagcctgtctgctcccaatgctgtcaatgaaaaaaaagagcgcaagagatcaattcaataaacttgtgactgacctgccaaatgttcaggaggaaattgtgaacatacacaatgccctccgacgcagggtggtgcctccagcctctaacatgctgaaaatgtcctggagcgaagaggccgcacagaacgctcgcatattttccaaatactgcgacatgacggaatcaaaccctcttgagcggaggctgcccaataccttttgcggtgagaacatgcacatgacaagctaccccgtaagctggagctcagtgattggcgtctggtatagcgagtctacctcattcaagcatggagagtggacaaccacagacgacgacattactactgatcactacacacagatcgtgtgggcaacgagttatttaatcggctgcgccattgctagctgcaggcaacagggttctcctcgatacctgtacgtatgtcattactgtcacgattag

SEQ ID NO: 219725 - DNA, 537 bp, synthetic construct
  misc_feature 1..537: note = Description of Artificial Sequence: Synthetic coding sequence
  source 1..537: mol_type = other DNA
atggaaatcaaacacctacttttcctggtggccgcagcgtgcttgctccccatgctgtcaatgaagaaaaaaagtgcaagagaccagtttaacaagttagtgacagaccttccaaacgttcaagaggagattgtgaatatccacaatgcactgagaaggcgtgtggtgccgcctgcttctaacatgctgaaaatgtcctggtcagaggaggcagcccagaacgcaagaattttctctaagtattgcgatatgacagagtctaatccactggagaggaggttgccaaataccttttgtggagaaaacatgcacatgacatcttatccagtaagttggtcttccgtcataggggtctggtactctgaatccacttcctttaaacatggcgagtggaccactaccgatgacgatataaccacggatcactacacccagatcgtgtgggcaactagttatttaatcggatgtgctattgcatcctgcagacaacagggtagtccacgctatctctacgtatgccattattgtcatgattag

SEQ ID NO: 219726 - DNA, 669 bp, synthetic construct
  misc_feature 1..669: note = Description of Artificial Sequence: Synthetic coding sequence
  source 1..669: mol_type = other DNA
atggctgggaaaccaaagctacattacttcaacggacgcggtaggatggagccaattaggtggctgctggccgcagccggagtcgagtttgaggagaagtttattgggagtgctgaggacctggggaaactgcggaatgatggatcacttatgttccagcaggtgccaatggtcgagatcgatggcatgaagttggtccagacgagggccattctcaactatatagcttcaaaatacaacctgtacgggaaggacataaaggagagagcgctgattgatatgtatacagagggtatggctgatctcaacgagatgatcctgcttctgccgctttgccggcctgaggaaaaagatgcaaagatagccctcataaaagagaagaccaagtcaagatatttcccagcattcgaaaaggtacttcagagtcacggacaagactatctcgttggtaacaaactaagtagggccgacatcagcctcgtcgaactgctttactacgtagaagaactggacagctcattaatctccaattttccgctgctgaaagccctgaagacccgcatatcaaatctgcccactgttaagaaatttttacaacccggttcaccacggaaaccacccgctgatgcaaaggcactggaggaggcacgcaaaatcttccggttttag

SEQ ID NO: 219727 - DNA, 732 bp, synthetic construct
  misc_feature 1..732: note = Description of Artificial Sequence: Synthetic coding sequence
  source 1..732: mol_type = other DNA
atggctttactgcccgtgcttttcctcgtcacagttcttcttcccagccttcctgcagaggggaaagaccccgcattcaccgccttacttaccactcagttgcaagtccaaagagaaattgtgaacaaacacaacgaacttcggaaagcagtctcgccgcctgcttccaatatgcttaagatggagtggagtcgcgaagttaccactaacgcccagcgttgggccaataagtgtacacttcaacactcagacccggaggaccgtaagaccagtacaaggtgcggagaaaacctctatatgtcttccgatccaaccagttggagcagcgcaatccagtcttggtatgatgagatactggattttgtctacggggtgggcccaaaatctcccaatgccgttgttggccactatacccaactcgtctggtattcaacataccaggttgggtgcggtattgcgtattgccctaaccaggactccctgaaatactactacgtgtgccaatactgtcctgccggtaacaacatgaataggaagaacaccccataccagcagggaacgccatgtgcaggctgccccgacgattgcgataagggcctgtgtactaactcttgccagtatcaggacctgctctccaattgcgatagtctgaaaaatacagcgggatgcgaacatgaactcctgaaagagaagtgtaaagctacatgtttgtgcgagaacaaaatctactag

SEQ ID NO: 219728 - DNA, 1494 bp, synthetic construct
  misc_feature 1..1494: note = Description of Artificial Sequence: Synthetic coding sequence
  source 1..1494: mol_type = other DNA
atgtcctgtgttttaggaggggtcatcccactggggctgcttttcttggtatgcggaagtcaggggtatttgcttccgaacgtgactctgctcgaggaattactcagtaaataccagcacaatgaaagtcattcaagggtccgacgcgctattccacgggaagacaaagaggagattttaatgctgcataacaagctgagaggtcaagttcagcctcaggcttctaacatggagtacatgacctgggacgatgagctggaaaagtccgccgcagcatgggcatcccagtgcatttgggagcacgggccaacaagcctgctagtgagcataggccagaatctcggcgcacactgggggagatatcggtctcccggattccacgtgcaaagttggtacgatgaggttaaggattatacttacccctacccttcagagtgcaatccttggtgcccagaacgatgctcggggccaatgtgcacccactatacgcaaatagtatgggccactaccaataaaataggatgcgctgtgaacacttgcaggaaaatgactgtgtggggagaagtctgggaaaacgctgtctacttcgtgtgcaactattcacccaagggaaactggattggcgaagctccctacaaaaacgggaggccttgttcggagtgccctccctcctacgggggttcttgccgtaacaacctgtgctatagggaagagacatacacacccaagcccgagaccgacgagatgaacgaagtggagaccgcgcctatccccgaagagaatcacgtctggctgcagcccagagtgatgcgccctactaagccgaaaaagaccagcgccgtgaactacatgacgcaggtggtaagatgtgacaccaagatgaaggaccgatgtaaggggagtacttgcaaccgctatcagtgccctgcgggatgtctgaatcataaggccaaaatctttggaaccctcttttacgagtctagttcaagcatttgtcgggcagcgattcactacgggattctggacgataagggtgggctggtggacatcacaaggaatgggaaagtgccattctttgtcaaaagcgagagacacggcgtccagtctttgtctaagtataaacctagttctagctttatggtcagcaaagtgaaagtccaggacctcgattgttataccaccgtggcccagctctgcccttttgagaagccggctactcactgtccgcgtattcactgtccggctcattgtaaggacgaaccctcatattgggccccagtatttggaaccaacatctacgccgacacaagcagtatttgtaaaactgctgtccacgccggtgtaatctcgaacgaatccggtggagacgtggacgttatgcccgttgataagaagaagacatacgtggggagcctcaggaatggagtccagtccgaatctctgggcactccacgggatggcaaagctttccggatcttcgccgtgaggcagtag

SEQ ID NO: 219729 - DNA, 1269 bp, synthetic construct
  misc_feature 1..1269: note = Description of Artificial Sequence: Synthetic coding sequence
  source 1..1269: mol_type = other DNA
atggctccctggcctccaaagggtcttgtgccggcaatgttgtggggcctcagtctgttcttgaaccttcccggtccgatctggctgcagccttcacctcctccccagtcctctccaccaccccagccacatccgtgccatacctgcaggggtctcgtggactcatttaacaaaggcctagaaagaaccattagagacaacttcggtggcggtaatacagcctgggaggaggaaaatctgagcaagtataaggacagcgagaccagactggtcgaggtcctcgaaggtgtgtgttcaaagagcgactttgagtgccacaggctcctagaactctccgaggagcttgtcgaaagctggtggttccacaagcagcaagaagctccagatctctttcaatggctttgctcagatagtctgaaactttgctgtcccgcagggaccttcggtccctcttgtcttccctgtcccggagggactgagagaccctgtggtgggtacggtcaatgtgaaggggaggggactaggggtggtagcggccactgcgactgtcaagccggttacgggggtgaagcctgtggtcagtgtgggctcgggtattttgaggccgagcgaaatgcctctcatctggtgtgcagcgcgtgctttggcccatgtgctcggtgctcaggcccagaggagagcaattgcctgcagtgcaagaagggatgggccctgcatcatctcaagtgtgtagatattgatgagtgcgggaccgagggcgctaactgcggagccgatcagttttgtgtgaacactgagggtagctatgaatgcagggattgcgctaaggcctgtctagggtgcatgggggcaggaccaggccgatgtaagaagtgttccccagggtatcagcaggttggctccaaatgcctggacgttgatgagtgtgagaccgaggtgtgtccaggtgagaacaagcagtgcgaaaatacagaagggggttatagatgtatatgtgcggagggatataagcagatggaggggatatgcgtgaaagagcagatcccaggcgcattcccaattttgaccgacctgactcctgaaaccaccagacgatggaaactgggctctcaccctcactccacctacgtgaaaatgaaaatgcagagagacgaggcaacttttcccggattatacggaaagcaggtggcgaaactaggcagccagtctaggcagagcgacagaggaactcgtctcattcactctcagcaagcctcatcgcagcggtag

SEQ ID NO: 219730 - DNA, 1263 bp, synthetic construct
  misc_feature 1..1263: note = Description of Artificial Sequence: Synthetic coding sequence
  source 1..1263: mol_type = other DNA
atggcgccttggcctccaaaagggctggtgcccgcaatgttgtggggtttgtctctgtttctcaacttacctggcccaatttggctgcaaccaagcccacctccacaaagtagcccaccaccacagccccacccttgtcacacctgccgcggactcgttgattcatttaataaaggcctggagcggacaattcgtgacaatttcggtggaggaaacacagcctgggaggaggaaaacctctcaaagtacaaggactcagagactcggctggtggaggtgttagagggagtttgctcaaagagcgacttcgaatgtcaccgcctgttagaattgtcagaggagctggtcgaaagctggtggttccacaagcagcaggaggccccagatctcttccagtggctgtgtagtgacagcctgaagctctgttgccccgctggaaccttcggccctagttgccttccctgcccaggaggcacagaaaggccatgcggtgggtacggacagtgtgagggcgagggaacccggggaggatcaggacactgtgactgtcaggccggttacggtggagaagcctgtggacagtgtgggctgggctactttgaggcagagcgcaatgcgtcacatctggtctgttccgcttgctttggcccttgcgctaggtgtagtggacccgaggaatccaattgtctccagtgtaaaaaaggctgggcactgcatcatttaaagtgcgtcgatattgacgagtgcggcacagagggggcaaactgtggtgcggatcagttctgtgttaacaccgagggatcctacgagtgtagggactgtgctaaggcttgtctaggttgtatgggagccggacctggccgatgtaagaagtgttctcctggctatcagcaggtcgggtcaaaatgtctcgacgtagacgaatgcgagaccgaagtctgtcctggcgagaataagcagtgcgagaatactgaggggggataccgctgcatctgcgccgaaggttacaagcagatggagggcatttgcgtgaaagaacaaatccccgaaagcgctggattcttttccgagatgaccgaggacgagctggtggtcctccagcagatgttcttcggaattattatctgtgcactcgctaccttggcggcaaagggcgatttggtgtttacagctatatttatcggggctgtcgccgctatgactggctactggctttctgagagatccgacagagtcctggaaggcttcataaaaggtcggtag

SEQ ID NO: 219731 - DNA, 1263 bp, synthetic construct
  misc_feature 1..1263: note = Description of Artificial Sequence: Synthetic coding sequence
  source 1..1263: mol_type = other DNA
atggccccttggcctcctaaagggttggtgcccgctatgctgtggggattgtctctgtttctaaatcttccaggccctatctggcttcagcccagcccccctcctcagagctcaccaccaccgcaaccccacccatgccatacctgccgcggactggtagatagcttcaataaggggttggaacgcacaatacgcgacaactttggcggaggcaatacagcttgggaggaggaaaacctatccaagtacaaggactccgagacacgcctggttgaggtgctcgaaggcgtttgttcaaagagcgactttgagtgtcataggctgttagagctgtctgaagagctggttgagagctggtggtttcataagcagcaggaggcacccgacctctttcagtggctgtgtagcgatagcctgaaactctgttgtcctgccggtacattcggcccttcctgcctcccttgtcccggtggtaccgaaagaccctgcgggggatatggacaatgcgaaggagaaggtacacgaggcggttccggccactgtgattgccaagcaggttatggcggagaggcttgcggacagtgtgggctcggctatttcgaggctgagcgcaacgcatcccatttggtgtgcagcgcttgctttgggccttgtgcgcgttgttctggtccagaggagtctaactgcctgcagtgcaagaagggttgggccttacatcacctcaagtgtgtcgatattgatgagtgtggcaccgagggcgcaaattgtggtgccgatcagttctgcgttaatacagaagggtcctatgagtgcagagactgtgccaaggcatgcctgggatgcatgggggcagggccaggtcgatgcaagaaatgttcccctggatatcaacaagtgggcagcaaatgcctggacgtggacgagtgcgaaacagaggtttgccccggagagaacaaacaatgcgagaacacagaagggggttaccgctgtatctgcgcagaaggttataagcagatggaagggatttgtgtaaaagagcagattccagaaagcgcgggtttcttttcagagatgaccgaagacgaacttgttgtgctccagcagatgttctttggcatcattatctgtgccctcgccacgttggctgctaaaggcgacttagtgtttacagcaatcttcataggcgcagtggcggcaatgaccggttactggctcagtgaaagaagcgaccgcgtgctggaaggcttcataaagggacgctag

SEQ ID NO: 219732 - DNA, 1263 bp, synthetic construct
  misc_feature 1..1263: note = Description of Artificial Sequence: Synthetic coding sequence
  source 1..1263: mol_type = other DNA
atggcaccatggccgcctaagggactagttcccgctatgctctggggcttgagcctgtttttaaatctcccagggcctatttggctgcagccatctccaccgcctcagtctagccctccaccacagccccatccctgtcacacgtgtcgcggactggtggattctttcaacaagggccttgagcgtacgatccgagacaacttcggcggaggaaacacggcctgggaggaagagaatttatccaagtataaagacagcgaaactcggctggtggaagtgctggagggcgtttgcagtaaatccgacttcgagtgtcatagactacttgaactgtctgaagagttggtcgagagctggtggttccacaaacagcaggaggcgcctgacctgttccagtggctctgttctgactcactgaagctctgttgtcctgctggaacctttggcccaagctgtttaccctgtccaggcggaaccgaacggccttgtggcggatacgggcagtgtgagggcgaggggactcgcggtggatccggccactgtgactgtcaggctggatatgggggtgaagcatgcggtcaatgtggcctaggctactttgaggctgagagaaacgcttctcacctagtgtgttccgcgtgtttcggcccttgcgctaggtgtagcggccctgaggaatcaaattgcctccagtgcaagaaggggtgggctcttcatcacttgaaatgcgtcgatatagacgaatgtgggaccgagggtgccaattgtggcgcagatcaattttgcgtgaacaccgagggcagctatgaatgtagagactgcgctaaggcctgcctgggatgtatgggtgccggacctgggaggtgtaagaagtgttcccccggttaccaacaggtggggtcaaaatgcctagacgttgacgaatgtgaaacagaggtgtgccccggagaaaataaacagtgtgagaataccgaagggggatataggtgcatctgtgccgaggggtacaaacagatggaggggatctgtgttaaggagcaaatacccgaatctgcaggatttttttcagaaatgactgaagatgagttggtcgtgctgcagcagatgttctttggcatcatcatttgcgccctggctacactagctgccaagggcgacctggtgttcaccgctatctttatcggcgcagttgccgctatgacaggatattggctttcagaaagatccgaccgagttctggaaggattcatcaagggtcgttag

SEQ ID NO: 219733 - DNA, 1140 bp, synthetic construct
  misc_feature 1..1140: note = Description of Artificial Sequence: Synthetic coding sequence
  source 1..1140: mol_type = other DNA
atgtcctctagaattgctagggccttggctctggttgtaacactgctgcacttaacgcgtctggcactttcaacctgcccggctgcctgccactgcccacttgaagcgccaaagtgcgccccaggagtgggtctggtgcgggatggctgcggatgctgtaaggtatgcgcgaaacagcttaacgaagattgttcgaagacacagccatgcgatcacaccaagggcctggaatgcaactttggtgcgagttccacagctcttaagggcatctgccgcgcacaatcagagggccgaccgtgtgaatacaactcccgaatctaccagaatggcgaatcttttcaacccaattgcaaacatcaatgcacgtgcatcgacggagcggtcggatgtattcctctgtgcccccaggagctgtctctgcctaatctgggctgccctaatccacgcctggtaaaagtgaccggccaatgctgcgaagagtgggtatgtgacgaagacagcatcaaagaccccatggaggatcaggatggcctgctggggaaagagctcgggtttgatgcaagcgaggtcgagctaacacgtaataatgagctcatcgctgtgggaaaaggatccagcctcaagcggctgccagtattcggcatggagcctcgcattctgtataaccctctgcaaggccagaagtgcatcgtgcaaaccacgtcttggagccaatgttctaaaacttgtggaacaggtatttcaactcgtgtcaccaatgacaatccagagtgtagactggtgaaagagacgcgcatttgtgaggtgcggccttgcggacagcctgtgtactcttcattaaaaaagggaaagaaatgctcaaaaaccaagaagagccctgaacccgttcggtttacatatgctggctgcttatctgtcaaaaagtatagacccaagtactgtggtagctgcgtggatggaagatgctgcacaccacagctgacgaggtgcgaagacgctgtgcccctcagacgctggggggacattttccaggagaggcatgacgacccagtcaagtgtaattacaattgtccacatgctaacgaggctgcctttcccttttatcggctgtttaatgatatccacaagttccgggactag

SEQ ID NO: 219734 - DNA, 1146 bp, synthetic construct
  misc_feature 1..1146: note = Description of Artificial Sequence: Synthetic coding sequence
  source 1..1146: mol_type = other DNA
atgtcttctcgtatcgccagggcattggctcttgtggtgacactactccacctgactaggctggcattgtccacctgcccagctgcctgccactgtcccctagaagcccctaaatgcgcacccggtgtgggtttagtcagggacgggtgcggatgctgtaaagtgtgcgctaaacaacttaacgaggactgtagcaaaacacagccgtgtgaccataccaaaggccttgagtgcaatttcggggctagtagtaccgctctgaaagggatttgtagggcgcagagcgaaggcagaccatgcgagtacaacagccggatttatcagaatggggagtcttttcagcctaactgcaaacatcagtgcacttgtatagatggcgctgtaggctgcattccactgtgtccccaggagctgtccctgccaaatctaggctgccctaatcccaggttagtcaaggttaccggacagtgctgcgaggagtgggtgtgcgatgaagacagcatcaaagaccctatggaggaccaggacggcctgctggggaaagagctcggttttgacgcttccgaggtcgagctcacaagaaataatgagctcattgccgtcgggaaagggtcctccctcaagagactccccgtttttggcatggaacccaggatactgtacaacccccttcagggccagaaatgtatcgtgcagactactagttggagccaatgtagcaaaacatgtgggactgggatctctacgagggttacaaatgacaatcccgagtgtcgtctcgtgaaggagactaggatatgcgaggtgagaccctgtgggcagccggtctactcatctcttaagaaaggaaagaaatgctctaagactaaaaagagcccggaacctgtcagattcacatacgccggatgtctctcagtgaagaagtatcggcctaagtactgcgggagctgcgtagacgggagatgctgtactcctcagctcacacgcacagttaagatgcgcttccgctgtgaagacggagagaccttttcgaagaacgtaatgatgatacaaagctgtaaatgcaattataattgtccccacgcgaacgaggccgcttttccattctaccgactgtttaacgacatccacaagtttcgtgactag

SEQ ID NO: 219735 - DNA, 1074 bp, synthetic construct
  misc_feature 1..1074: note = Description of Artificial Sequence: Synthetic coding sequence
  source 1..1074: mol_type = other DNA
atgtcttccagaatcgctagggccctcgccttagtggtgaccctgctacacttgactaggctcgccttgtcaacatgcggctgctgcaaggtatgcgccaagcagttgaacgaggattgttccaaaactcagccctgtgaccacactaagggactcgaatgtaactttggcgcaagcagtactgccttgaagggcatttgccgtgcacagagcgaaggccgaccatgtgagtacaattcacgcatctatcaaaacggcgaatcttttcaacccaactgtaagcatcagtgcacctgcatcgacggagcagtggggtgtataccactatgtccccaagagcttagcctgcctaacctgggatgtcctaatccaaggctcgtcaaggtgaccgggcagtgctgcgaagaatgggtctgtgacgaggatagcattaaagaccctatggaagatcaagacgggctgctcggaaaagaactgggatttgacgcctctgaagttgagctaacacggaataatgaactgatagccgtcggtaagggaagctctctcaagagactgcctgttttcggaatggagccgagaatcctgtacaaccccctgcaaggacagaagtgtatcgtacaaacaacgtcctggagccagtgctctaagacgtgcggcactggcattagtaccagagtcacaaatgacaatcctgagtgccgcttagtcaaagagaccagaatctgtgaggtgcgcccatgcgggcagcccgtttattccagcctcaagaaagggaagaaatgttcaaaaactaaaaagtcccccgagccggtacgctttacgtacgcgggttgtctgtcagtgaaaaaataccggccaaaatactgtgggagttgcgtcgatggtcgttgctgtacacctcagttgactagaaccgtgaagatgcgtttcaggtgtgaggacggtgagacattcagtaaaaacgttatgatgatccaaagttgcaagtgcaactataactgtccccacgctaacgaggctgcatttcctttttatcgtctgttcaatgatatccataagtttcgcgactag

SEQ ID NO: 219736 - DNA, 1014 bp, synthetic construct
  misc_feature 1..1014: note = Description of Artificial Sequence: Synthetic coding sequence
  source 1..1014: mol_type = other DNA
atggatgagactgggaatctaaccgtgtcaagcgctacctgtcacgatactatcgatgactttcggaaccaagtgtactccaccctctactctatgatctccgttgttggtttctttggaaatggctttgtcctttacgtactcattaagacataccacaaaaaaagcgcattccaagtgtacatgatcaacctagccgtagccgatttgctgtgcgtgtgcacccttcccctccgagttgtctactacgtgcataaagggatttggctttttggagattttttgtgtcgtctctccacctacgccctgtatgtgaatctgtactgcagcattttcttcatgacggccatgtcattttttcgttgtatcgccatcgtgtttcctgtgcagaacattaatctagtgactcagaagaaggcgaggtttgtgtgcgtcggaatctggatcttcgtgattttaacaagctcaccttttctgatggcaaaacctcaaaaggatgagaaaaacaacactaaatgttttgaaccacctcaagacaatcagactaagaaccatgttctcgtgctgcattacgtgtcactgtttgtgggtttcattatccccttcgtcataatcatagtgtgttatactatgattatcctcacgcttcttaaaaaaagcatgaaaaagaacctgtcttctcataaaaaggcgatcggcatgattatggtggtgaccgcagcatttctcgtcagcttcatgccatatcatatacagcgaaccatccatctgcacttcctgcacaatgaaaccaagccctgcgactccgttctgaggatgcagaagtcagttgtgatcaccttgtcgctggctgcttccaactgttgttttgaccctttgctgtactttttcagcggaggcaactttcgcaaaagactgagcacttttagaaaacactccctctcgtccgttacctatgtcccacggaagaaggcctccctgcccgaaaaaggagaagaaatttgcaaagtgtag

SEQ ID NO: 219737 - DNA, 1041 bp, synthetic construct
  misc_feature 1..1041: note = Description of Artificial Sequence: Synthetic coding sequence
  source 1..1041: mol_type = other DNA
atggaaagaaagtttatgagtttgcaacccagcatctccgtgtcagagatggagccaaacggcacctttagcaataataatagccgcaactgcacaatagagaattttaaaagggaatttttccctatagtgtatcttatcatctttttctggggcgtgttggggaatggactgtcaatatatgtcttcctccagccttacaagaagagtacgtcagtaaatgtgtttatgttgaatctcgccatcagtgatctgctcttcatatccaccttgccgtttcgtgctgattattacctgagaggctctaactggatcttcggagacttagcgtgcagaatcatgtcctattccctctacgtgaacatgtactcttccatctatttcctgacagtcttgtctgtagtgcggtttcttgccatggtgcacccttttcgtttgctgcacgtcacaagtatccgttccgcttggatcttatgtgggattatatggatcctcatcatggcctcttcgatcatgttactcgactctggatccgagcaaaatggcagcgtgaccagctgtctggagctaaatctttataaaattgccaagcttcagacgatgaactatattgccttggtcgtgggctgcctgctgcctttcttcacactctccatctgctatctgttgatcatacgtgtcttactcaaagtggaagttccagaatccggcctcagggtgagtcatcgtaaggccctgacaactatcatcatcacactaataattttttttctctgtttccttccttatcacacgctgcgtacagtgcacctgacaacctggaaggttggcctttgcaaagaccgcctgcacaaagccctggttattacactcgcactcgccgcagccaacgcctgtttcaatccgctgctctattacttcgccggagagaattttaaggaccggctgaaaagtgccctcagaaagggtcacccccaaaaagcgaagacaaagtgcgttttcccggttagcgtctggctgcgaaaagagacgcgcgtttag

SEQ ID NO: 219738 - DNA, 2181 bp, synthetic construct
  misc_feature 1..2181: note = Description of Artificial Sequence: Synthetic coding sequence
  source 1..2181: mol_type = other DNA
atggcggactcctccggacaacaaggaaaaggcagaagggttcagccgcagtggtcacctccagctgggacccagccttgtcgtctacacttgtataattcgctgactagaaataaggaggtcttcattccacaagacggcaagaaggtcacatggtattgctgcggccctacagtgtacgatgctagccatatggggcacgcgagaagttatatttcttttgacatactccgacgagtgcttaaagactatttcaaatttgatgtcttctactgcatgaacataacggacattgacgacaaaattatcaaaagagcgaggcagaaccatctatttgagcagtatagagagaagcgaccagaggcggcacagctattagaggacgtgcaggcagctctcaagccttttagcgtcaaactgaacgaaaccaccgaccctgataaaaaacagatgctggaaaggattcagcacgccgtccaactagccaccgaaccgctcgagaaagctgttcaaagcaggcttacgggcgaagaagtaaattcatgtgtagaggtgttacttgaagaggccaaggacttattgagcgattggctggactctaccttgggatgcgatgtcacagacaactcaatcttttccaaactgccgaaattctgggaaggcgactttcatagggatatggaggcgctgaacgtcctccctcctgacgtccttacacgggtctcagaatatgttcccgaaattgtgaacttcgtgcagaagattgtcgacaacggatatggctatgtctcaaatggtagcgtctatttcgacacggcgaaatttgcttcgagcgaaaagcattcatacggcaaactcgtgcccgaggcagtgggtgaccagaaagccctgcaggagggtgagggcgatctgtccatctctgccgaccggctgtcggagaagcgcagccccaatgattttgcattgtggaaagcaagcaagccaggcgaaccttcttggccatgtccctggggcaagggcaggccaggatggcatatcgaatgcagcgccatggccggaacgctgctcggggcatccatggacattcacgggggtggcttcgatcttcgcttcccacaccatgacaatgagctggcccagtcggaggcctattttgagaacgattgctgggttagatattttctgcacaccgggcatctcaccatagctggatgcaaaatgagtaagtctttaaagaattttatcaccattaaggacgcccttaaaaagcattccgccagacaactgagactggcttttttgatgcatagctggaaggatacccttgattattcatcaaatacgatggagtcggcactgcagtacgaaaaatttctgaacgaattttttttgaacgtgaaagatatcctgcgggcaccagtggacatcactggccagtttgaaaagtggggtgaggaggaggcagaactcaacaaaaatttctatgataagaaaacagccatccacaaggcactctgcgacaatgtagacacccggaccgtaatggaagagatgagggcccttgtttcccagtgcaatctgtacatggcggcacgaaaagcagtgcgaaaaaggcctaatcaggctctgctggaaaatatcgccctttatctgacgcacatgctgaagatttttggcgctgttgaggaggactcatctctcgggttcccagtaggagggccaggcacctcccttagtcttgaggcgacggtgatgccttacctccaagtcctctccgaatttagagagggagtgcgcaagatagccagagaacaaaaggttcccgagatcttgcaactctcagacgctctgcgcgataatatcctcccagagctgggagtgcggtttgaagaccacgagggcctgcccaccgtagtcaagttagtggacaggaatactctgcttaaggagagggaggagaaaaggagagtagaggaggaaaagcgcaagaaaaaagaagaagccgcaaggcgaaagcaagagcaagaggccgctaaacttgcgaagatgaaaattccaccctccgagatgttcctatcagagacagataagtactccaagtttgacgaaaacgtgagcatggtatgccctcatatgacttggagagcaaaatcatccgccaaaggcaaaccacgctcgtag

SEQ ID NO: 219739 - DNA, 2496 bp, synthetic construct
  misc_feature 1..2496: note = Description of Artificial Sequence: Synthetic coding sequence
  source 1..2496: mol_type = other DNA
atggcagattcttccggccagcaagcaccagactataggtctatcctttctatttctgacgaagccgcaagagcgcaagcgttgaatgagcacttgagcacccggtcctatgtccagggctactctctgtcacaggccgatgtggacgcgtttaggcaattgtcagcgcctcctgccgatccgcaactattccatgtagcgcgatggttccgacatatcgaggctctcctgggatccccctgcggaaagggtcagccctgccggctccaagcctcaaagggcaggagggtgcagccccagtggtctccaccagccggtacgcaaccatgtcggctccacctgtacaacagtctcacccgtaacaaagaagtgtttattccgcaggacggaaaaaaggttacctggtattgttgcgggcctaccgtttatgatgcctcacatatgggccacgctcggagttacatctctttcgacatcctgagaagagttctaaaagactacttcaagttcgacgtgttctactgtatgaacatcacagacatcgacgataagatcatcaaacgggctagacagaatcatctattcgaacagtatcgtgagaagcgccctgaggcagcacaactgttggaagacgtgcaagctgctcttaagccgttcagcgtgaagcttaatgagacaactgacccggataagaaacagatgctggagcgcattcagcatgctgttcagctggccacggaaccgctggagaaggcagtccagtcacggctgacaggcgaggaggtaaacagctgtgttgaagtgcttctggaggaagcaaaggacctgctcagcgattggctcgactctacattggggtgtgatgtcacagataatagcatattttctaaacttcccaagttctgggaaggagactttcatagggatatggaggccttgaacgtcttgcccccagacgtcttgactagagtgagcgaatacgtcccagagatcgtgaatttcgtgcagaagatcgtcgataacggatacggctacgtgtcaaatgggagtgtatattttgacacagccaagttcgcttcctccgaaaaacacagctatggaaagctggtccccgaggctgtaggcgaccagaaggcgctccaggagggcgagggggacctaagtatctctgccgatcggcttagtgagaaaagatccccgaatgatttcgctctctggaaggcaagcaagcccggagaaccttcctggccctgcccttggggaaaggggcgaccaggctggcatattgaatgtagcgcgatggcgggaacccttttaggggcttctatggatattcatgggggagggttcgacctcagattccctcaccacgataacgagttggcccagagcgaggcatacttcgagaacgattgctgggtgaggtattttctgcacacaggccacttaactattgcaggttgcaagatgagcaagagcctgaagaatttcataaccatcaaggacgctctgaaaaagcattccgcgaggcagctccggctggccttcctgatgcacagttggaaagatactctcgactactccagtaataccatggaaagcgctctccagtatgaaaaattcctaaacgagttctttctcaacgtgaaagacatactgcgggctccagtggacatcacgggccagtttgagaagtggggagaagaggaggccgagctgaacaaaaacttttacgacaagaaaactgccattcataaggccctgtgtgacaatgtagacacgagaacagttatggaggagatgcgcgcactggtctcacagtgcaacttatacatggccgctcgaaaagccgtacggaagaggcccaatcaagcccttctggagaacatcgccctgtacctcactcacatgctcaaaattttcggagcggtggaagaggacagttccctgggtttccccgtgggcggacccggtacgagcctcagtctcgaagcaaccgtcatgccatacttgcaggtgttaagcgagttccgcgagggcgtcagaaaaatcgccagagaacagaaagtacccgagattctccagctgagtgacgcccttagggacaacattctgcctgaactgggcgttcgattcgaagatcacgagggactgcctactgtggtgaaattggtggacagaaatacattgctaaaggagagagaagagaagcgccgtgtggaagaggagaagcggaaaaaaaaggaggaggctgcgagaaggaaacaggagcaagaagcagctaaattagctaagatgaagatccctccctcagagatgtttctctccgagacagacaagtattccaagtttgatgaaaatgggctccctacccacgacatggagggaaaggagctgtccaaaggacaggctaagaaactcaagaagctttttgaggcacaggaaaaactctacaaggagtaccttcaaatggctcagaacgggagttttcaatag

SEQ ID NO: 219740 - DNA, 2247 bp, synthetic construct
  misc_feature 1..2247: note = Description of Artificial Sequence: Synthetic coding sequence
  source 1..2247: mol_type = other DNA
atggccgactcctcagggcagcaggggaaaggtcgaagagtccagccccagtggtctcctcccgctgggacacagccctgtcgcctccacctctacaacagcctgacacgcaacaaagaagtgtttatccctcaggatggcaagaaggtgacgtggtattgctgtggcccaacagtctacgacgcctcccacatgggacacgcgaggagttacatctccttcgatattcttcggagagtgctgaaagattactttaagtttgatgtattctactgtatgaatattacagatatcgatgataaaatcattaagcgggctagacagaatcatttatttgaacaatacagggagaagcggcctgaagccgcacagctgctggaggacgttcaggccgctctcaaaccattctcggtcaagcttaacgagaccacagaccctgataagaaacaaatgctcgagagaatacaacatgccgtgcagctggctactgagcccctcgagaaggcagtccagagccgcctcacaggcgaggaagtgaattcgtgtgttgaggttcttttggaagaagctaaagacctcctctccgattggcttgactccacactaggctgtgatgtcactgataattctattttctccaaactgccgaagttttgggaaggagacttccatagagacatggaagcgttgaacgtgctgccaccagacgtccttactagggtgtctgaatacgtgccggaaattgttaattttgttcagaaaatcgtggacaatggctacggctacgtgagcaacggctccgtctatttcgatactgcaaagttcgcaagctccgaaaaacattcttacggtaagttggttccggaagccgtcggagatcaaaaagctctgcaggaaggcgaaggtgacttatcaatctcagcagaccgattgtccgagaagcgttcccccaacgacttcgccctctggaaggcatccaaacccggagagccctcatggccttgcccatggggaaagggtcggcctgggtggcacatcgagtgctcagctatggctgggacacttctcggtgcctctatggacatccatggagggggattcgacttaaggttcccacaccacgacaatgaactggcccagtcggaagcttatttcgagaatgactgttgggttcggtattttttgcatacaggacacttaactatcgccggatgcaagatgagtaagtccttgaaaaattttatcactattaaggacgccttgaagaagcactcagccagacagctgagactggctttcctcatgcattcgtggaaagacacactcgactactcaagcaacacaatggaaagcgcgctgcagtatgagaagtttctgaacgagtttttcttgaatgtgaaagatatccttcgcgcaccagtggacataacgggccaattcgagaagtggggagaggaagaggctgaactaaacaagaacttctacgataaaaagacagctattcataaagccctgtgcgacaacgtcgacactcggaccgtcatggaggaaatgcgtgccctagtatcacaatgcaatttatacatggccgcaagaaaggccgtgcgcaaacgccctaaccaggccttgttggagaacatcgccctttacctgacgcatatgcttaagatctttggggctgtggaagaggactcgtccctcgggtttccagtggggggaccaggaaccagtctgtctctcgaggccaccgtgatgccatacttgcaggtgctctccgaattccgggagggtgtcagaaaaattgcgagggaacaaaaggtgcccgagatcctccaacttagtgacgccctgcgggataacattctcccagagctcggagtgcgcttcgaagaccacgagggactgcccaccgtcgtcaagcttgttgatcgaaacaccttgttgaaagaacgggaagaaaaaaggagagtcgaggaagagaagcggaaaaagaaggaggaggcagctcgtcgcaagcaagaacaggaggctgccaagttggctaagatgaagatcccaccttcagagatgtttctgagcgagacagataagtacagtaaattcgatgaaaatggtctgcccacccacgacatggaaggaaaggagctctccaagggccaggctaaaaaactcaagaaactgtttgaggcacaggagaagctgtacaaagagtatctacaaatggcccagaacggctcctttcagtag

SEQ ID NO: 219741 - DNA, 2217 bp, synthetic construct
  misc_feature 1..2217: note = Description of Artificial Sequence: Synthetic coding sequence
  source 1..2217: mol_type = other DNA
atgcaaacgccgcctctgcagcaaccacaccaggagcaggtgttcctggcgtttttggttatcgtcattccgtctttcctgactaaagaagttttcataccccaggatggtaagaaagtgacatggtactgttgcggccctaccgtgtacgatgcgagccacatgggccacgctcgatcctatatatcttttgacatcctgagacgtgtgttgaaagactatttcaaatttgacgtgttttattgtatgaatattacggacattgacgataagataatcaaacgcgctcgacagaatcacctgttcgaacagtacagagagaaaaggcccgaagctgcccagctactggaggatgtccaggccgcactgaagcctttcagcgtgaagctcaacgagacgacggaccctgacaaaaaacagatgctggaacgcatccagcatgctgtgcagcttgctacagaacccctagagaaagccgtccagagtcgtctgacgggggaggaggtgaactcttgcgtggaagttttgctggaggaggccaaggacttgttgagcgattggctcgacagcacacttggctgtgacgttaccgataattctatatttagcaagctgccaaagttctgggagggtgactttcatcgagacatggaggccctgaacgtgttgcctccagatgtgctgacacgagtgtccgaatatgtgccggagattgttaactttgtccaaaaaatcgtggataacgggtatggatacgtgagcaacggatccgtgtacttcgacaccgctaagtttgcttcctcagagaagcacagctacggtaagttggtccccgaagcagtcggcgaccagaaagcattgcaagaaggggaaggcgatctgagcataagcgctgacaggctgtcagaaaagcgctcacctaatgacttcgctttgtggaaggcttccaagcctggtgagccgagctggccttgcccctggggcaaaggtcgcccaggatggcatatcgagtgcagcgccatggcaggcacccttctgggagcctctatggatattcacggaggagggtttgatctgcgttttccacaccatgataatgagcttgcccagtcagaagcttatttcgaaaatgattgttgggttagatatttcctgcatacaggccacctgacaatcgctggatgcaagatgtccaagtccctgaaaaactttataaccatcaaggacgctttgaaaaaacacagcgctagacagttgaggttggccttcctcatgcactcttggaaggacacactggattactcttctaatacaatggaaagcgctctgcaatatgaaaaatttctgaacgaattctttctcaatgtaaaggacatcctgcgggctccagtcgacattactggacaattcgagaaatggggagaggaagaggcagagctcaacaaaaacttttacgataagaaaacagccatccacaaagccttgtgcgataacgttgacactagaacagtcatggaggagatgcgcgctctggtgtctcagtgcaacttgtacatggcagcccgtaaggccgtgaggaagagacccaatcaggctcttctagagaatatcgccctatacctgactcatatgctgaagatctttggcgctgtcgaggaggattcatccctgggctttccagtgggtggcccagggacatccctcagtctggaagctacagtcatgccatatttgcaggtcctgtccgagttcagagagggagtgagaaaaatcgcacgtgagcagaaagttcctgagatcctccagctgagtgacgccctccgagataacattctcccggagttgggcgtgcggtttgaagaccatgaagggttgcccaccgtggttaagctggtggacagaaacactctcctaaaggaaagagaggaaaagcgcagggttgaggaggaaaaaaggaaaaagaaagaagaggcggcacgcagaaagcaggaacaggaggccgctaagctagccaagatgaagattcccccttctgaaatgtttttgagcgaaacggataagtattctaagtttgacgagaacggactccccacccacgatatggaaggtaaggagctgagcaaggggcaggctaagaagctgaagaaactcttcgaggcacaggagaaactctataaggagtacctccagatggcccagaatggatctttccagtag

SEQ ID NO: 219742 - DNA, 2220 bp, synthetic construct
  misc_feature 1..2220: note = Description of Artificial Sequence: Synthetic coding sequence
  source 1..2220: mol_type = other DNA
atggaaccgacctcaggcccttttcgtaccgatctcggataccatttggtgggatgcagtagtggaaaagggcgaagggtccagccacaatggtccccaccagctggaacacagccttgcaggctgcacctgtataactcgctcactcgaaacaaggaagtatttattccacaggacgggaaaaaggtgacatggtactgctgtgggccaactgtgtacgacgctagtcatatgggtcatgcaagaagctatatttccttcgacatactgagacgcgttctgaaggactacttcaagttcgatgtgttctactgtatgaacataacagatatcgacgataagatcattaagcgtgcacgacagaatcacctgttcgagcagtaccgagagaagcggcctgaagccgctcagcttctagaagacgttcaggctgccctgaaaccattctccgtaaaactgaatgagactacagaccctgacaagaagcagatgctagaaagaatacagcacgcagtccagctcgccacggaacctctggaaaaagccgtgcaatcgcgcctgacaggagaggaggttaacagctgcgtggaggtattgctcgaagaagccaaggacctgctgtctgattggctcgacagcacactcggatgcgatgtaactgacaattccatcttttcaaaactgcccaaattctgggaaggcgactttcacagagacatggaagccctcaacgtgctgcctcccgatgtcctgaccagagtgtcagagtatgtgcccgagatagtcaacttcgtgcagaaaatcgtagataatgggtacggctacgtttccaacgggtcagtttacttcgacacagccaaattcgccagcagcgaaaagcactcctacggtaagttagtccctgaagctgtgggcgatcagaaggccttgcaggaaggcgaaggcgatcttagtatcagcgctgatcgattaagcgagaagcggtcacctaatgatttcgcactgtggaaggcgtcaaagcctggcgagccgtcctggccctgcccttggggcaagggaaggccgggatggcatattgagtgcagcgctatggcaggcactctgctaggcgcaagtatggatatccacggagggggattcgacctgcgattccctcaccacgataacgagctggcacagtccgaagcctactttgaaaatgactgttgggtgcgctacttcctccataccggccacttaaccatcgcaggttgcaagatgtctaagtccttaaagaactttattaccatcaaggatgctctgaaaaaacactcagctcgccagctaaggctagcatttctcatgcacagttggaaggacaccctcgactattcctccaacacaatggaatctgccctgcagtatgagaagtttctgaatgagttcttcctaaacgtcaaagacatcttgagggcccctgtggatataactggtcagttcgagaagtggggagaagaagaggctgagctgaacaagaacttttatgataaaaagaccgccatacacaaagcactgtgtgacaacgtggataccaggaccgtgatggaagagatgcgcgcattggtgtcgcaatgtaacctatatatggccgcacgcaaggccgttcgcaagagacctaaccaggcgctgctagaaaacattgcactttacctgacacacatgctgaaaattttcggtgcggtcgaggaggattcctctctcgggtttccagtgggcggtcctgggacttcactgtctcttgaagccaccgtgatgccatacttgcaagtgttgagtgagttccgtgagggggtgcggaaaattgctagggagcagaaggtccctgagattctgcagctgagcgacgctctgcgagacaacatcctgcccgagctgggcgtgcggtttgaggaccatgagggcttaccaaccgtagtgaagcttgtggaccgcaacacgcttctgaaggagagagaggagaagcggagagttgaggaagagaagcggaagaagaaggaagaagctgcccgaagaaaacaggagcaggaggctgccaagctggctaaaatgaagatccccccatcggagatgtttctatccgaaacagataaatactctaagttcgacgaaaacgtgagcatggtgtgccctcacatgacctggcgggctaaatcctccgcgaagggcaagcctcggtcctag

SEQ ID NO: 219743 - DNA, 1695 bp, synthetic construct
  misc_feature 1..1695: note = Description of Artificial Sequence: Synthetic coding sequence
  source 1..1695: mol_type = other DNA
atgctacgaaccacccggggacctggcctaggcccacccctgttgcaggccgctctgggtttgggaagggcaggatggcactggccagcagggagggctgcatcaggcggtagaggacgcgcttggctgcagcctacaggcagagagacaggcgtccaggtgtacaactccctgaccggccgaaaagagcccctgattgttgcccacgcagaggctgccagctggtacagctgtggaccaactgtatacgaccacgcacatctagggcacgcttgctcatacgtcagattcgatattattcgcaggattctgaccaaggtttttggctgcagtatagtgatggtaatgggcataacggatgtggacgataaaattattaagagagccaacgaaatgaatatcagcccggcatcccttgccagcctctatgaggaggatttcaagcaggatatggccgctcttaaggtcctaccgccaacagtctacctcagagtgactgaaaacatcccgcagataattagtttcattgagggtatcattgccagggggaacgcgtattccaccgcaaagggcaacgtctacttcgacctcaagagccgcggtgacaagtatggaaagctggttggcgtcgtacccggacctgtcggggagccagcagattcagataaaagacacgcctccgacttcgctctgtggaaggctgcaaaacctcaggaggtgttttgggcaagtccctggggcccaggtcggccaggttggcacatcgagtgctccgcaatcgcctccatggtatttggcagccagctggatatccattctgggggtattgacctagcgttcccacatcatgagaacgaaatcgcccagtgcgaggtcttccaccagtgtgaacagtgggggaactattttctacactcagggcaccttcacgccaagggtaaggaggagaagatgtccaagtccctgaagaactatatcacaattaaggattttctcaaaacttttagcccagacgtgtttagattcttctgcctgcgcagttcctaccgaagtgcgatcgactattcagacagtgctatgctccaggctcagcagctgctactgggcttaggctctttccttgaggacgcccgagcttacatgaagggccagctggcctgtggctccgtgagggaggctatgctctgggaaagattatccagcaccaagagggcagtcaaagctgccctggcagatgatttcgacaccccgagggtggttgacgctatacttggtcttgcccaccacgggaacggacagttaagagcgtctttaaaggagcccgagggccctcggagccccgcagtgttcggggctattatcagctactttgagcagttttttgaaactgtaggaatatccctcgccaatcagcagtacgtctccggcgatggctctgaggcaactctgcatggtgtcgttgatgaacttgtccggttccggcagaaagtgcggcagttcgctctcgctatgccagaagccactggagatgctcgaaggcaacaacttctggagagacagcctcttttagaggcctgcgacactctacgccgtgggctgactgcccatggcatcaatattaaagaccgaagcagcactacgagcacttgggagcttttggatcaaaggacaaaggatcaaaaaagcgctggttag

SEQ ID NO: 219744 - DNA, 549 bp, synthetic construct
  misc_feature 1..549: note = Description of Artificial Sequence: Synthetic coding sequence
  source 1..549: mol_type = other DNA
atggtgttcgggagccagcttgatatccactcaggcggaatcgacctcgcattcccccatcatgaaaacgagatcgcccagtgcgaggtcttccaccagtgtgagcagtggggtaactatttccttcacagcgggcacctccatgcaaagggaaaggaggaaaagatgtcgaagtctttaaagaactatattactattaaggatttcttgaagacttttagtcctgatgtttttagatttttttgtctgcgaagcagctacaggtcagcgattgattacagtgactcagctatgctgcaagcccagcagttactgctgggtctcggaagctttctcgaggatgcccgagcttatatgaagggtcaactggcttgcggttctgtccgggaagctatgctatgggagcggctgtccagcactaagagggcagtgaaggcagcacttgctgatgatttcgacacgcccagagttgtcgatgccatcttgggcctggctcaccacgggaacggacagctccgcgcatccctaaagaagcctgggagcgcctag

SEQ ID NO: 219745 - DNA, 441 bp, synthetic construct
  misc_feature 1..441: note = Description of Artificial Sequence: Synthetic coding sequence
  source 1..441: mol_type = other DNA
atggcccaaaaacgacccgcttgcacactgaagcccgagtgtgtgcagcagctgcttgtttgcagccaagaggctaaaaagtcagcctactgtccatactctcattttcctgtcggggctgctctgcttacacaggaaggcagaatctttaaagggtgtaacattgagaacgcatgctatcctcttgggatttgtgcagaacggaccgcgatccaaaaggctgttagcgagggttacaaagactttagggccattgctatcgcctccgacatgcaggacgacttcatatccccctgcggcgcttgcaggcaggtgatgagggaatttggaaccaactggcctgtgtacatgaccaagcctgatggtacctatatcgtgatgacagttcaagaactgctcccaagctcgttcgggccagaggacctgcaaaaaacacaatag

SEQ ID NO: 219746 - DNA, 687 bp, synthetic construct
  misc_feature 1..687: note = Description of Artificial Sequence: Synthetic coding sequence
  source 1..687: mol_type = other DNA
atgctgagcagatgtagaagcggactactacacgtcctggggctgtcattcttactccagaccagacggcctattcttctgtgttccccgcgattgatgaagcccttggttgtattcgtgttaggaggcccaggcgctggtaagggaacccaatgtgctaggatcgtggagaagtacgggtacacccatttatctgctggagagttgctacgtgatgagcgaaaaaaccctgactctcagtacggagagttgatcgagaaatatatcaaggaaggcaagattgtgccagtggagatcaccatctcactgctcaagagggaaatggatcagaccatggctgcaaatgcccagaagaataagtttctgatcgacggttttcccagaaaccaggataacctacagggttggaacaaaacaatggatggcaaagcagacgtgagtttcgtgttatttttcgattgcaacaacgaaatctgtatcgaacggtgtctggagcggggaaagagttccgggcgatccgacgataacagggagtccctggaaaaaagaatccagacatacctgcaaagcactaagcccattattgacctttacgaggagatgggcaaagtcaagaagatcgacgcctcaaagagcgtggacgaggtgttcgacgaggttgtccagattttcgacaaagagggctag

SEQ ID NO: 219747 - DNA, 540 bp, synthetic construct
  misc_feature 1..540: note = Description of Artificial Sequence: Synthetic coding sequence
  source 1..540: mol_type = other DNA
atgctgagtcggtgtcgatccggtctcctccatgtattgggcctgtccttcttgctgcaaacccgccgtccaattttactgtgtagtccgaggctgatgaagcctctcgtagtgtttgtactgggcggtcccggtgccggaaaaggtacccagtgcgccagaatcgtggaagagatggaccaaaccatggcagccaacgctcagaaaaataaattcctgatcgacggattccctcggaatcaggataacttgcagggctggaataagaccatggatggtaaggccgatgtgagctttgtgctctttttcgactgtaacaacgaaatctgcatagaacgatgtctggaaaggggcaaaagtagtggtaggagtgatgataatcgcgagagtctcgaaaaacggatacagacctatctgcaaagcactaagcccataatcgatctgtacgaggagatggggaaagttaagaaaattgacgcctctaagtcggtggacgaggtgtttgacgaagtggttcagatcttcgataaggagggatag

SEQ ID NO: 219748 - DNA, 1230 bp, synthetic construct
  misc_feature 1..1230: note = Description of Artificial Sequence: Synthetic coding sequence
  source 1..1230: mol_type = other DNA
atggctttcgcccgtcgcctgctgagggggccactgtctggcccacttctggggagacggggtgtttgtgccggagctatggcacctcccaggcgtttcgtcctggaacttccggactgcaccctcgctcacttcgccctgggagcagatgcacccggagatgccgatgccccagatccccgactcgccgctctgctgggaccccctgagcgctcatacagcctctgcgtgcctgtgacccctgacgctgggtgcggggctagagtccgcgcagcacgacttcaccagcgactgcttcaccaactacgaagaggtccattccagagatgtcagttgctgaggctgttgtgctactgccctgggggtcaggcgggaggtgctcagcaggggtttctattgagggatcccctggacgatcccgacacacgccaagctctgctcgagctgctgggtgcttgccaagaggcacctagacctcatttgggggaatttgaagcagacccacggggacagttgtggcagaggctgtgggaggtgcaagacgggagacgcttgcaggtcggttgcgcacaggttgtgcccgtgcccgaaccaccgttgcatccagtcgtgcctgacttgccaagctctgtcgtgttccctgacagagaagctgccagggccgtactggaggagtgtaccagttttatccccgaagccagggccgtcctggacttagtggaccagtgtccaaagcagatccagaagggtaagtttcaagttgtggccatcgagggactggacgctacgggcaagactacagtgacacagagcgtggccgatagcttaaaggcagtcctcctcaaaagtcccccttcctgtattgggcagtggcgtaagattttcgacgatgagcccaccattattcgtagagccttttactcgctcggcaactacatagtagcaagcgagattgctaaagagtccgccaagagccctgtgattgtggatagatattggcatagtacagccacatacgccattgccaccgaggtgtccggagggctccagcacctgccccctgcccaccatcccgtgtatcagtggccagaagatctccttaaacccgatctaatcttattgctgacggtgtctcccgaggagcggctgcagcggttgcagggcagaggcatggaaaaaacaagagaagaggccgaattagaagccaattccgtgtttcgccaaaagtag

SEQ ID NO: 219749 - DNA, 1350 bp, synthetic construct
  misc_feature 1..1350: note = Description of Artificial Sequence: Synthetic coding sequence
  source 1..1350: mol_type = other DNA
atggcctttgctcgaaggctgctgcgaggccctctgagtgggcctctgctgggtcggaggggcgtctgtgccggagccatggccccacccagacgctttgtcttggagttaccagactgtacgctggctcatttcgccctgggtgccgacgcacccggtgatgcagacgctcccgaccctcggctagccgctttgctaggaccgcctgagcggtcgtactccctgtgtgtgccggtcacacccgacgccggatgcggcgctagagtgcgagcagcacgcctgcatcagcggctcctgcatcagcttcggaggggccctttccagagatgccagttactgaggctgttgtgttattgtcctggcggacaggccggtggagctcagcaaggcttcctcctgagagacccactggacgatcccgacactcgacaagcccttcttgagcttctgggtgcttgtcaggaagcgcctaggcctcacttgggcgagttcgaagccgatcctcgcggtcagctctggcagcgtctctgggaagtgcaggacggccgaagattacaggtcgggtgcgcccaggtggtgcctgtgcccgagcctcccctccaccccgtggtccccgacttgccgtcctctgttgtgtttcccgatcgagaggccgctagggcagtcctcgaggaatgcacaagcttcatccctgaggccagagccgttctcgatcttgtggatcagtgcccaaaacaaattcagaaggggaaatttcaggtagtggccattgaaggcttagacgccacaggcaagacaacggtgacccagagtgtagcggattccttgaaagccgttcttttaaagagcccccctagttgtatcggccagtggaggaaaatttttgacgacgagcccactatcatcaggagagctttttactcactgggcaattatattgttgccagcgaaatagcaaaggagtctgcaaagtctccagtgattgttgacaggtactggcacagtacagcaacatatgcgatcgcaaccgaggtctccggaggattacagcacttgcccccagctcaccacccggtgtatcaatggcctgaggatctgctgaagcccgacctgattctgttactgaccgtaagtcctgaggagcgcctgcagaggctgcagggtcgcggtatggaaaagacaagggaggaggctgaactggaggccaactcagtatttcggcaaaaggtcgagatgtcctatcagcgaatggagaatcctggctgccacgttgtggacgcttcgccatccagagaaaaggttttgcagaccgtcctgagtctgatccagaactctttctctgagccctag

SEQ ID NO: 219750 - DNA, 1101 bp, synthetic construct
  misc_feature 1..1101: note = Description of Artificial Sequence: Synthetic coding sequence
  source 1..1101: mol_type = other DNA
atggccttcgctcgccgactgctgcgcggacctctttccgggccattgctgggcaggaggggagtgtgcgccggtgccatggcaccgccaagacggttcgtgctcgaactgcccgactgcacactggcccactttgccctgggcgcagacgcaccaggcgacgcagacgcccctgatccccgtcttgcagctctgttggggccacctgagcgtagctactcactgtgtgtgccagtaacaccagacgccggatgcggagcacgtgttagagcagcccgactgcatcagaggcttctgcaccagctgcggcgaggaccatttcagcgatgccagctgctacgtctcctttgttactgtccagggggtcaagcaggcggagcgcagcaggggtttttattacgggatccacttgatgatcccgacacaaggcaggcgttgctcgagctgttgggcgcatgtcaggaggcaccccgacctcacctgggggaatttgaagcagatcccagaggacagttgtggcagagattatgggaagtgcaagatgggcgtcgattacaagtcggatgtgctcaggtggttcctgtgccagagcctccactgcacccggtggtcccagatttgcctagttccgtcgtgtttccagatagagaggccgctcgtgcagtgctcgaggaatgcaccagctttatcccagaagcaagagctgtgctggacttggttgaccagtgcccaaaacagattcagaagggtaagtttcaggtcgtggcaattgagggcctggacgccaccggaaagacgacagtgacacaaagtgtggcagattctctgaaggccgtgctcctaaagtctcctccgagctgtattggtcagtggaggaagatttttgatgacgagcccacaatcatccggagagccttctacagcctgggtaactatatcgtggccagcgagattgccaaggagtcggcaaagagccccgttattgtggaccgaagtcagttgggaggtacactgtaccacccgagtttacacctacttggctctgaagtgtgtggcacaggaatactcgattcgagccattcctctcaggggctggaatag

SEQ ID NO: 219751 - DNA, 813 bp, synthetic construct
  misc_feature 1..813: note = Description of Artificial Sequence: Synthetic coding sequence
  source 1..813: mol_type = other DNA
atggggaatacctctagtgagagggctgcattggaaaggcacggcggtcataaaacacctagaagagactcatctggcggaaccaaagacggggatagacctaagatcttaatggattcccctgaggacgctgacctcttccatagcgaagagattaaggcacctgagaaagaggaatttctcgcctggcagcatgacctcgaagtgaacgataaggcccctgcccaggctcgccctacagtctttcgctggacagggggtggcaaagaggtctacctctcgggttcattcaataattggagtaagctgcctcttacccgctcacacaataattttgttgcgatcctagatctgcctgaaggcgaacaccagtacaaatttttcgtggacggacagtggacgcatgatccaagtgagccaatcgtgacatcacagctcgggacagtgaacaacatcatccaggtcaagaagaccgattttgaggtgtttgacgcgttgatggttgactctcagaagtgcagcgacgtgtctgagttatcatcaagccctcccggaccttaccaccaggaaccatacgtgtgtaaacccgaagaacgatttcgggcaccaccaatcctaccaccacacctgctccaggtcatcctgaataaagacacaggaattagctgcgaccccgctcttctccctgagcctaaccacgtgatgctcaatcacctctacgctctctccatcaaggacggggtgatggttcttagcgccacacaccgctataagaagaagtatgttaccacactactgtacaaaccaatctag

SEQ ID NO: 219752 - DNA, 588 bp, synthetic construct
  misc_feature 1..588: note = Description of Artificial Sequence: Synthetic coding sequence
  source 1..588: mol_type = other DNA
atgggccagattgaatgggctatgtgggcaaacgaacaagccctggcatccgggctcatcctgattaccgggggaattgtggctactgcaggtaggttcacccagtggtatttcggggcttactcaattgtcgcaggcgtgtttgtctgcttactggagtacccacgcggtaagcggaagaagggatccaccatggaaagatggggccagaagtacatgacagccgttgtcaaactgtttgggccttttacaaggaactattatgtgcgagctgtactccacctcttacttagtgtgccggcaggattcctcctggcaaccatcctagggaccgcctgcctagctatagcctcaggaatttatctgctcgcagcagtccgtggcgaacagtggacaccaattgaacccaaacctagagagcggcctcagatcggtggaaccatcaaacagcccccatccaatccccctcccaggccaccagccgaagcacggaagaagccgagtgaagaggaggccgcagtggccgcaggtggaccccctggaggaccccaagttaaccccatccctgtgaccgatgaggtggtgtag

SEQ ID NO: 219753 - DNA, 1713 bp, synthetic construct
  misc_feature 1..1713: note = Description of Artificial Sequence: Synthetic coding sequence
  source 1..1713: mol_type = other DNA
atgggcaactgggctgttaacgaggggctctccatattcgtgattttggtgtggcttggacttaacgtgttcctgttcgtatggtactaccgagtatatgacattcccccaaagttcttttacactaggaaactcctgggaagcgctttggcgttggccagagcccctgccgcttgcctgaacttcaactgtatgctcatactgctcccggtctgccggaacctactctcctttctacggggaagcagcgcctgctgctccacgcgggtgcgcaggcagctggatcggaatctgacattccacaaaatggtcgcctggatgattgcactgcattctgctatccacaccatcgcgcacctctttaacgtcgagtggtgtgtaaacgcaagagtgaataatagtgacccctattcagtagcgctcagcgagttaggtgatcggcaaaacgagtcttaccttaattttgctaggaagcgaatcaagaaccctgaaggtggcctgtatcttgcagttacgttgctggccggtattacaggagtggtaattactttatgcctgattttgattattacgagcagcactaagacgattagacgttcttactttgaagtgttctggtacacgcaccacctgttcgttattttttttatcggtctggctatccatggcgctgagcgcatcgtgaggggacagaccgccgagtccctggcagttcacaatatcacagtgtgtgaacagaagatctccgagtgggggaagataaaggagtgccccattccccaatttgcaggcaatcctccaatgacgtggaagtggattgtaggacctatgttcctgtacctctgtgagagattagtgaggttttggagatcccagcaaaaagtggtgattacaaaagttgtaacgcatccatttaagactatcgaactccagatgaaaaagaaggggtttaagatggaggtggggcagtatatttttgtcaaatgcccaaaggtgtctaagctggagtggcacccctttacgcttaccagtgcacccgaggaagatttttttagtatccatattagaatcgtgggggattggaccgaaggccttttcaacgcatgcggctgtgacaagcaagagttccaggatgcatggaagcttcccaagatcgcggtggacgggcctttcggtacggccagcgaagatgtgttcagctacgaagtggtcatgcttgtaggcgctggtatcggagtgacaccctttgccagcatactgaagagcgtatggtataaatactgcaacaacgccaccaacctgaaactgaagaaaatctatttttactggctgtgtagggatacccatgcgttcgaatggtttgccgatctgctgcagctccttgaatctcagatgcaagaacgcaacaacgccggttttctttcgtacaatatctatcttaccggctgggatgaaagccaggctaatcacttcgcagtgcatcacgatgaagagaaagacgtgatcacgggtctgaagcagaagactctatatgggaggcccaactgggacaacgagttcaagacgattgcctctcaacaccctaatacccgaatcggcgtctttctctgtggtccagaagcgctggccgaaaccctgtccaaacagtctatctccaacagtgaatcaggaccgcgtggcgtacacttcatctttaacaaggaaaacttctag

SEQ ID NO: 219754 - DNA, 912 bp, synthetic construct
  misc_feature 1..912: note = Description of Artificial Sequence: Synthetic coding sequence
  source 1..912: mol_type = other DNA
atgacttggaagtggattgtgggccctatgtttctgtatctttgcgaacgcctagtgagattctggagatcccagcagaaggtggtgatcaccaaggtggtgacacaccccttcaagacaattgaacttcagatgaagaagaaggggtttaagatggaggtcgggcagtacatttttgtgaagtgccctaaggtgtctaaactggaatggcatccatttacactcaccagcgcacctgaagaagattttttctctatccacatccgtattgtcggcgactggacagaaggcctgttcaatgcctgtggatgcgacaagcaggagtttcaagatgcgtggaaactgcccaaaatcgcggtggatggaccttttgggacagcttcagaggacgtgttctcctacgaggtggtaatgctcgtgggagccggaataggcgtgaccccctttgccagcatccttaagagcgtatggtataagtattgcaataatgcaactaaccttaaactcaagaagatctacttctattggctgtgccgcgatactcacgcattcgagtggttcgccgatctgctccaactgctggagtcacagatgcaggagagaaataatgccggttttttatcatataacatatacctgacgggctgggatgagagccaggctaatcactttgctgttcatcacgatgaagaaaaagatgtcattaccggcctgaaacagaagacattgtatggacggcctaactgggacaacgaatttaagacaatcgccagccagcaccccaacacaaggatcggagtgttcctttgcggtccggaagcactggcagaaactttaagcaaacaaagcatcagtaactcagagtcaggaccacgcggtgttcacttcatcttcaataaagagaacttttag

SEQ ID NO: 219755 - DNA, 1617 bp, synthetic construct
  misc_feature 1..1617: note = Description of Artificial Sequence: Synthetic coding sequence
  source 1..1617: mol_type = other DNA
atgggtaactgggctgtgaacgagggactgagcatcttcgttataagcgctttggcgctggccagggctcccgcagcctgtttgaatttcaattgtatgttgattctcttacctgtctgccggaacctcctcagcttcctgcgtggtagctctgcttgctgcagcactcgggtcaggagacaactggatcgaaatctcaccttccataaaatggtggcttggatgattgccttgcactccgctatacacaccattgcgcaccttttcaatgtggaatggtgcgtgaacgcgcgtgttaacaacagtgacccctattccgttgccctgtcagaactcggtgatcggcagaatgaaagttatctgaactttgccaggaagcgcataaaaaaccctgagggcggactataccttgccgtgaccctgttagccggaatcacaggggttgtcataactctctgcctgatcctcattattacctcttctacaaagactatcagacgaagttactttgaggtcttttggtatacgcaccacctgtttgtaattttctttataggcctcgcaatccatggggcagaacggatcgtccgaggccagacggccgagtccctcgccgtgcataatataactgtctgtgagcagaaaatctctgaatggggcaaaattaaagagtgcccaataccccagtttgcgggtaaccctccgatgacctggaagtggatagtgggacccatgttcttgtacttgtgtgagcggctggtccggttttggaggagccagcagaaagtggtaattacaaaggtagtcacacacccattcaagacaattgagctccagatgaaaaagaaagggttcaagatggaagtgggtcagtatattttcgtcaagtgccctaaagtgtcaaagcttgagtggcacccctttacactaacctctgcacctgaagaggacttcttttcgattcacatccgcatcgtgggcgattggacagagggcctcttcaacgcctgtggctgtgataaacaagaattccaggacgcctggaagctgcccaagatcgccgttgacggcccattcggcactgcgtccgaggacgttttctcttatgaagttgtgatgttggtaggtgccggaatcggtgtgacgccctttgcgagcatcttgaagtccgtttggtataagtactgtaacaacgcgactaaccttaaactgaagaagatatacttctactggctctgcagagacacacatgcgtttgagtggttcgccgatcttctccagctcctcgaatcacagatgcaggaacgcaataatgccggtttcctttcatataacatctacctcactggatgggatgaaagccaggccaaccactttgcagtgcaccacgatgaagagaaagatgtcatcacaggattgaaacagaaaacactgtatggaagacccaactgggataatgaattcaaaaccattgccagccagcatccgaacacccggatcggagtgttcctatgtggacctgaagccctcgctgaaaccctcagcaaacaatcaatctcaaactccgagtctggccctaggggggtccatttcatctttaataaagagaatttctag

SEQ ID NO: 219756 - DNA, 714 bp, synthetic construct
  misc_feature 1..714: note = Description of Artificial Sequence: Synthetic coding sequence
  source 1..714: mol_type = other DNA
atgaattccaggcgccgagagcccatcaccttgcaagatcccgaggccaaatatccgcttccgctcattgaaaaggaaaaaatcagtcacaacacccgaagatttaggtttggactaccctccccagatcatgtactgggtctacccgttggaaactatgtgcaactgctggcaaagatagataacgaactggtggtcagggcatacacacctgtgtcatccgatgatgatcgagggttcgtcgatctaataatcaagatctactttaaaaatgtgcatccgcagtatccagaaggaggaaaaatgacccagtacctcgagaatatgaagataggagaaactatcttctttaggggaccccgtggcaggctgttctatcacgggccaggcaatctgggaatcagacccgatcagactagcgagccaaagaagaccctcgccgaccacctggggatgatcgcagggggtaccgggattacgcctatgctccagttgatccggcatatcacaaaagacccgtctgataggacacgcatgagcttaatctttgctaaccaaaccgaagaagacatccttgtaagaaaagagctagaggagatcgcgcgtacccacccagatcagttcaacctgtggtacacactagatcgacctcccattggaccctggagtgccgagggcgctaccctgctgtctaactccgcacagttccactag

SEQ ID NO: 219757 - DNA, 831 bp, synthetic construct
  misc_feature 1..831: note = Description of Artificial Sequence: Synthetic coding sequence
  source 1..831: mol_type = other DNA
atgaactcgcggagacgggagcctattactctgcaagaccccgaagccaaatacccgctgccgctaattgagaaagaaaaaatctcccacaacacccgcagatttcgatttggcttgccttctcccgatcatgtccttggtctaccagtcggcaactatgtgcagctgcttgcgaagatagataatgagctggtggtgcgcgcttacacgcccgtgtccagcgacgatgatcgtggcttcgtggacctcatcataaagatatactttaagaatgtccatcctcagtatccagaagggggtaagatgactcagtacctggagaacatgaaaatcggtgaaaccatcttcttccgcggtcctcggggaaggttgttctatcatgggcctggcaaccttggaatccgcccagatcagacatccgagcctaaaaagaccctagctgaccacctcgggatgatagcaggtggcaccggcattactccgatgctacagcttatcaggcatatcacgaaagatccttcagaccgaaccaggatgagccttatcttcgctaaccagaccgaggaggacatcctggtgcgcaaagagttagaagaaatcgctcggacccacccagatcagttcaatctctggtacactctcgatcgtccacccattggttggaaatactccagcggctttgtcaccgctgatatgattaaagagcacttgcctcctcctgccaagtcgacactgatactggtgtgcggaccaccaccacttatacagaccgccgcacaccctaacttggaaaaacttggatatacacaggacatgattttcacgtattag

SEQ ID NO: 219758 - DNA, 351 bp, synthetic construct
  misc_feature 1..351: note = Description of Artificial Sequence: Synthetic coding sequence
  source 1..351: mol_type = other DNA
atgaattctcgcaggagagagcctataaccctgcaggatcctgaggccaaatatcccctgccactcattgagaaggagaaaatatcacataacactcgcaggttccgttttggactgccctcacctgaccatgtcctcgggctacctgtaggcaattacgtccagctcttagccaagatagacaacgagctggtggtgcgtgcatatacgccggtctcaagtgacgatgaccgcggatttgttgacctgatcattaagatatacttcaagaacgtacacccccagtatcccgagggaggtaaaatgacacagtatctagagaatatgaaaattggtgagacaatcttttag

SEQ ID NO: 219759 - DNA, 714 bp, synthetic construct
  misc_feature 1..714: note = Description of Artificial Sequence: Synthetic coding sequence
  source 1..714: mol_type = other DNA
atgaatagcaggaggagggaacctatcaccttacaggatcccgaggctaagtatcccctgccactcatagagaaggaaaagatatcccataatactcgacgcttcaggtttggtctcccttctccggaccatgtgctcggcctgcccgtaggaaattatgtacaacttctcgccaaaattgataacgaattggtggtaagagcctatactcccgtttctagcgatgacgacagaggattcgtggacttgatcatcaagatctattttaagaatgttcacccccagtatcccgagggaggcaagatgacccagtacctggaaaacatgaagatcggagaaacaatattctttcgcggtccccgtggtcgcctattttaccacggtcctggcaatctcggaattaggcccgatcagacctcggaacccaaaaaaaccctcgccgatcatctcggaatgatcgccggtggaacaggcatcactccaatgctgcagctgattaggcatattacaaaagatcctagtgatcggacgcggatgtcactcatctttgcgaaccagaccgaggaagacatcctggtccgcaaagaattggaagaaattgctcggacacatcccgatcagtttaacctgtggtacacactagaccgacctcctatcggaccatggtccgccgagggagccacccttctcagcaactctgcacagttccattag

SEQ ID NO: 219760 - DNA, 441 bp, synthetic construct
  misc_feature 1..441: note = Description of Artificial Sequence: Synthetic coding sequence
  source 1..441: mol_type = other DNA
atgaatagcagacgtcgggaacccattacactgcaggaccctgaggcaaagtacccgctgcccttaatcgaaaaggaaaaaattagccataacacccgccgtttccggttcgggctgccctctcccgatcatgtcctgggactccctgtcggaaactacgtgcagctacttgcaaagatcgacaatgagctggtcgtcagggcgtacacacccgtgagctctgacgatgatagaggctttgttgacttgattatcaaaatatacttcaagaacgtacaccctcaatatccagaaggtgggaagatgacccagtatctggagaacatgaaaattggtgaaacaatcttcttccggggtccccgaggcaggctcttctatcacggacctggcaatcttggaattcgccctgaccagactagtgagccaaagaaaacattatag

SEQ ID NO: 219761 - DNA, 516 bp, synthetic construct
  misc_feature 1..516: note = Description of Artificial Sequence: Synthetic coding sequence
  source 1..516: mol_type = other DNA
atgaattctcgcaggagagagccaataactctgcaggacccggaggccaagtatcccctgccactcatagaaaaggaaaaaatatctcataacacaagaaggttccggtttggcctgccttctccagatcatgtgttaggattgcccgtcggaaactatgtgcagctgctcgctaagatagacaatgagctggtagtgcgcgcatacacccccgttagctccgatgacgaccgtggcttcgttgacttgatcatcaaaatttatttcaaaaatgttcatccacaataccctgagggcggaaagatgacccaataccttgagaacatgaagatcggagaaactatctttttcagaggccctagaggtaggttattttatcatgggccagggaatctcggcattagacctgatcagacgtccgaaccaaagaaaacccttgccgatcaccttgggatgattgccggtgggacaggcatcacacccatgttgcagctcatccgacatataactaaatag

SEQ ID NO: 219762 - DNA, 831 bp, synthetic construct
  misc_feature 1..831: note = Description of Artificial Sequence: Synthetic coding sequence
  source 1..831: mol_type = other DNA
atgaactcgcgtcgacgcgagcctatcaccctgcaagacccagaagccaaataccccttaccgctgatcgaaaaggaaaaaataagtcataacactagacggttcagattcggactgccaagtcctgatcacgtacttggcctgcccgtcgggaattacgtgcagttactagccaagatcgataacgagctggtcgtgcgggcatatactcctgtcagcagtgacgatgacaggggcttcgtggatctgattatcaagatctatttcaagaatgtccaccctcaatatcccgaagggggaaaaatgactcaatacttagaaaatatgaagattggggagacgatatttttcagaggtccccgtgggagactgttctatcacgggcctggtaaccttggtattcggccagaccagacttcagaacccaagaaaaccctagctgaccatctggggatgattgcaggcggaaccggaatcacaccaatgctgcagttaatccgacacatcactaaggatccctcagacaggacaaggatgtcccttattttcgctaaccagacagaggaggatatcctggtcagaaaggaactggaagaaattgcacgtacccatccggatcagttcaacttatggtacactctcgacagacccccaattggttggaagtattctagcgggtttgtgactgccgacatgatcaaagagcaccttcccccacctgccaagtcaaccctgatcctggtatgcggcccaccccctcttatacagacagccgctcatcctaatcttgagaaactggggtacacccaggatatgatctttacctattag

SEQ ID NO: 219763 - DNA, 906 bp, synthetic construct
  misc_feature 1..906: note = Description of Artificial Sequence: Synthetic coding sequence
  source 1..906: mol_type = other DNA
atgggcgcacagctgtcaaccctgggccacatggtcctcttccccgtctggttcctctattctcttctcatgaagctctttcagcggagcacccccgcaatcacactggaatcccctgacatcaaataccctctgaggctgattgaccgagagataatcagccatgacaccaggagattccggtttgccctaccgagcccccagcatatcctgggactgccagtgggacagcacatctatctgagcgccaggattgatgggaatctcgtcgtgaggccttatactcccataagttccgatgatgacaaagggtttgtggacctggtgattaaggtatacttcaaggacacacaccccaaattccccgctgggggaaaaatgtctcagtaccttgagagtatgcagattggcgacacaatagagttcaggggaccaagcggattgctcgtgtaccagggaaagggaaagtttgcgataagacctgacaaaaagagcaatcccatcattaggaccgtgaaatccgtaggaatgatcgccggtgggacaggcataacgcctatgctacaggtcatcagagctataatgaaagatcccgatgatcacactgtgtgtcacttgctgtttgcgaatcaaacggagaaggatattctcttacgccctgagctggaggagttgagaaacaagcatagtgcccgatttaagctgtggtacacactggatagagcaccagaggcctgggattatgggcagggatttgtaaacgaggaaatgatcagggatcacctgccaccccctgaggaggagccactcgtgctgatgtgcgggccacccccaatgattcagtacgcctgcctgcccaacctcgatcacgttggccacccaactgaacgatgcttcgttttctag

SEQ ID NO: 219764 - DNA, 1005 bp, synthetic construct
  misc_feature 1..1005: note = Description of Artificial Sequence: Synthetic coding sequence
  source 1..1005: mol_type = other DNA
atgaacagaagtttgctggtgggatgcatgcagtcaaaagatatctgggggcgtgaagagtccatttgcgagcggttgaagcaagacggcctggatgtggagagggccgaatcctgggagctgggccacatggttctgtttccagtctggttcctgtactcactcctcatgaaactgttccagcggagcacacctgctattacgctcgagagtcccgacattaagtatccattgcggttaatagatagggagataatctctcacgacacaagaagatttcgattcgcattgccgtcaccccaacacattctgggccttccagtggggcaacacatctacctcagcgccaggatcgatgggaatttagtggtaagaccatataccccaatctcatccgacgatgacaaaggcttcgtcgatctggtaattaaagtgtactttaaggatacacacccaaaatttcctgccggaggaaaaatgagtcaatatttagaaagtatgcagataggcgacaccattgagtttaggggaccaagcggcctcctcgtgtatcagggtaagggcaagtttgccatccggccagacaaaaagagcaatccaattatccggaccgttaaatctgtgggcatgattgccggtggcacaggcatcaccccgatgctgcaggtgattagagcaatcatgaaggatccagacgaccacacagtgtgtcatctgcttttcgccaaccagactgaaaaagatatcctcctcagaccagagctggaggagctcagaaacaagcatagcgcccgtttcaagctgtggtacacacttgatcgggcaccggaagcctgggactatggccaaggttttgtgaatgaggagatgataagggaccatctcccccctcctgaggaggaacccctcgtattgatgtgcggcccaccaccaatgatacagtacgcctgcctacctaaccttgaccatgttggccaccctactgaaagatgttttgtgttttag

SEQ ID NO: 219765 - DNA, 837 bp, synthetic construct
  misc_feature 1..837: note = Description of Artificial Sequence: Synthetic coding sequence
  source 1..837: mol_type = other DNA
atgaagctttttcaacgctccacccctgcgattacgctggaatctcccgacattaagtacccattacgcctgattgacagggagatcatttcgcacgataccaggcggttcagattcgcgctccccagtccccagcatattttgggccttccagttggtcagcacatctatctgtcggctaggattgatggtaacctggtagtgcgtccctacacaccgatcagcagcgatgatgataaaggtttcgtggacttggtcatcaaagtgtactttaaagatacccaccctaagtttcctgccggtggaaaaatgagccagtatctggaaagcatgcagataggggataccattgagttcagaggcccatctgggcttctagtgtatcagggcaagggaaagttcgccattaggccagataaaaagagcaatcccataatccggactgtgaagagcgtaggcatgattgccggaggcacggggattacccctatgctgcaagtgattagagcaattatgaaagaccctgacgatcacacagtgtgtcatctgctttttgctaatcaaaccgagaaggacattcttctcaggccagaactggaggagctaaggaataagcacagcgctcgcttcaaattgtggtacactctggacagagcccctgaagcctgggattatgggcaaggatttgtcaacgaagagatgattcgcgaccaccttcccccacccgaagaggagcccttagtcctaatgtgcggcccaccacccatgattcagtatgcctgcctgcctaacctcgatcatgtgggccatcccaccgagcggtgctttgtgttctag

SEQ ID NO: 219766 - DNA, 837 bp, synthetic construct
  misc_feature 1..837: note = Description of Artificial Sequence: Synthetic coding sequence
  source 1..837: mol_type = other DNA
atgaagttgttccagcggtctactcctgccatcaccttggagtcacctgacattaaatatccacttcggcttattgatcgtgaaattattagccacgatactagaagatttcgatttgctctgccctcacctcagcacatccttggcctgcctgttggccagcatatctatctcagtgcaagaatcgacggaaatctagtggtcagaccctacacacccattagttctgatgatgacaaaggtttcgtggacttagtaatcaaggtgtatttcaaagacacacatccgaaatttcccgctgggggaaaaatgtcacagtatcttgagtctatgcaaattggcgacacaattgagttccgtggcccttctggcctcctggtgtatcagggcaagggaaagttcgcgatcagacccgataaaaaaagtaaccccatcattaggacagtgaagagtgtcggcatgatcgcaggaggcacaggaatcacgcctatgctccaggttatcagggcaatcatgaaggaccccgatgatcatacagtttgccacctgctgtttgctaaccagacggaaaaggatatcctgctgcgccctgagctagaagaactgcggaataagcattccgccagatttaaactgtggtatactcttgatagagcgccagaagcctgggattatggtcaaggatttgtgaatgaagagatgatcagggatcaccttcctcccccagaagaggagccacttgtgctaatgtgtggccctcctcccatgatacaatacgcttgtctgcctaatctggatcacgttggccaccccaccgagaggtgcttcgtattctag

SEQ ID NO: 219767 - DNA, 837 bp, synthetic construct
  misc_feature 1..837: note = Description of Artificial Sequence: Synthetic coding sequence
  source 1..837: mol_type = other DNA
atgaaactgttccagcggtccacccctgctattactcttgagagcccagatatcaaataccccctcaggctgatagatcgcgagatcatatcccatgacactcggagattcagatttgcactccctagtccacagcacatcctagggcttccagtaggccagcatatctatctttcagctagaattgatggcaatctggtggtgcgaccatacaccccaatttcctctgatgacgataaagggttcgtggacttagttataaaagtctactttaaggacactcatccgaagttccccgcagggggaaaaatgtctcaatatctcgagtcaatgcagattggggatacgatcgaattccggggaccgagtgggttactggtatatcaggggaaggggaaatttgctatccggccagacaagaagtctaacccaattattcgaaccgtgaagagcgtgggaatgatcgctggtgggacgggaattacccccatgctacaggtgatcagggccattatgaaagatcccgacgatcatacggtttgtcacctgctgttcgcaaatcaaaccgagaaagacatcctgctacgacccgagctggaagagctccgcaacaagcactccgcgcgtttcaaattgtggtacacacttgacagagccccagaggcttgggactatggccaagggttcgtgaacgaggaaatgatccgagaccacttacctcccccagaggaggaaccgctcgtgctgatgtgcggcccaccaccaatgattcagtacgcctgtctgccaaatctcgatcacgtgggacacccaaccgagaggtgtttcgtattctag

SEQ ID NO: 219768 - DNA, 837 bp, synthetic construct
  misc_feature 1..837: note = Description of Artificial Sequence: Synthetic coding sequence
  source 1..837: mol_type = other DNA
atgaagctgttccaacgctctaccccggctataacgctcgaatcaccggatattaagtaccctctgcgtctgatcgaccgcgagatcatatcacacgacacaaggcggtttcgattcgccctgccttccccccagcacatcttgggtctgccagtggggcagcacatctacctgtccgccagaatcgatggaaatctggttgttagaccgtatacgcctatcagttccgacgacgacaaagggttcgtcgatctggtgatcaaggtgtatttcaaagacactcaccccaagtttccagctgggggaaagatgtctcaatatcttgagtccatgcagattggcgataccattgagttcaggggcccaagcgggctcctcgtgtaccaaggcaaaggaaagttcgccatacggcctgacaagaagtccaatccaatcatcaggacagttaaatccgtgggcatgattgctggcggaaccgggatcacaccaatgctgcaggtaattcgggctatcatgaaagatcccgacgaccatactgtgtgtcacttgctgtttgcaaaccaaactgagaaggatatcttgctgcgaccagagctggaggaactcagaaataagcattcagcccgtttcaagctgtggtatacccttgaccgagctcctgaagcatgggattacggccagggttttgtgaatgaagaaatgattagagatcatctgccgcctcctgaagaagaacctctggtgttaatgtgcggtccccctccaatgatccagtatgcctgcttaccgaatctggatcatgtgggacaccccactgagaggtgctttgtgttttag

SEQ ID NO: 219769 - DNA, 444 bp, synthetic construct
  misc_feature 1..444: note = Description of Artificial Sequence: Synthetic coding sequence
  source 1..444: mol_type = other DNA
atgaaattgtttcaacggagtacccccgctatcacgctggagtcacctgacattaagtacccactgagactcatcgaccgggaaatcatcagccacgacacccggaggttcaggtttgccctgccttcacctcagcatattctcggacttccggtcgggcagcacatatatttaagcgccagaatcgacggaaatctggtcgtgagaccttatacccccattagcagtgacgatgacaaaggctttgttgacctggtgataaaggtgtatttcaaggatactcatccaaagtttcctgctggaggcaaaatgtctcagtacttagaaagcatgcagatcggggacaccatcgaatttagagggcctagtgggctcttggtgtatcaggggaagggtaaattcgcaatacgtcccgataaaaaaagcaatccaattattcggtag

SEQ ID NO: 219770 - DNA, 330 bp, synthetic construct
  misc_feature 1..330: note = Description of Artificial Sequence: Synthetic coding sequence
  source 1..330: mol_type = other DNA
atggactggatccggttaaccaagagcgggaaggacctcaccgggctgaagggcagacttattgaggtcacagaagaggaactaaagaagcataacaaaaaggacgactgctggatctgtatccggggatttgtgtataacgtgagcccatatatggagtatcaccctgggggagaggacgaactgatgagggcagccggaagcgacggcaccgagttgttcgaccaggtacacaggtgggtcaattacgagtccatgctgaaagagtgtctggttggtcgtatggccatcaagcctgcagtgcttaagggaaaactctggcacctgtag

SEQ ID NO: 219771 - DNA, 1566 bp, synthetic construct
  misc_feature 1..1566: note = Description of Artificial Sequence: Synthetic coding sequence
  source 1..1566: mol_type = other DNA
atgctgaatgtcccctcgcagtcctttcctgcaccaagatcacagcagagggtggccagtggtggcagaagcaaagtaccactaaagcagggccgtagtctcatggattggataagactgaccaaaagtggaaaggatttgaccgggctgaaaggtaggctgatcgaagtgaccgaagaagaattgaagaaacataataagaaagacgactgctggatttgtatccggggttttgtctacaacgtgagcccctacatggaatatcatccaggtggcgaggacgaactgatgagggcagccggatcagacggaaccgagctgtttgaccaggtccacagatgggtgaattacgaatctatgctcaaggagtgtctggttggccgtatggcaatcaagccagctgtgcttaaggactatcgggaggaggagaagaaggttctgaatgggatgctgccaaagtctcaggtgactgatacactggctaaagaggggccttcttatcccagctatgattggttccagactgacagcttggtaaccatagcgatctacactaaacagaaagacatcaatttggacagcattatagtagatcatcaaaacgattcgttccgcgctgagactatcattaaagactgcctatacctgatccacatagggctgtcacatgaagtgcaggaggatttctctgttcgagttgtagaaagcgtaggcaagatcgaaattgttctccagaagaaggagaatacaagttgggatttcttgggccatccattaaagaaccataactccttaattcctcgtaaggacaccggcctgtactaccgaaaatgccagctgattagcaaagaagatgtgacacatgacacaagattgttctgcctcatgctcccaccctcaacccacttgcaggttcccattgggcaacacgtctaccttaaacttccaattacgggaaccgaaatagtgaagccctatactccagtcagcggctcactgctgtccgaatttaaggagccagtcctgcctaataataagtatatatacttcctcataaagatttatcctacaggtctgttcacccctgaactggaccggctgcaaattggcgactttgtgtcagtaagttccccagagggcaactttaagatctccaaattccaggaactagaagacttatttctcctcgctgctggcactggattcacccccatggtgaaaatcttgaattatgctctgactgacatcccatctctcaggaaggttaagctgatgttctttaataaaacagaggacgatattatctggcggtcccagctagagaaactggctttcaaagacaaacgcctggatgtcgagtttgtgttgagtgctcctataagtgaatggaacgggaagcagggacacatttcccccgctctgctctctgaatttctgaagaggaacctggacaagtccaaggtcctggtttgcatttgcggaccagttccatttacagagcagggtgtccggctactgcatgacttaaacttctccaagaacgagatacacagtttcaccgcttag

SEQ ID NO: 219772 - DNA, 297 bp, synthetic construct
  misc_feature 1..297: note = Description of Artificial Sequence: Synthetic coding sequence
  source 1..297: mol_type = other DNA
atggctgagcagtcggacgaggctgtgaagtattacacactagaggagatccagaaacacaatcacagcaagtcaacatggctcatcctccatcataaagtctacgacctgactaaatttctggaggagcatcccggaggcgaagaggtactcagagaacaggcgggaggcgacgcaactgagaattttgaggatgtggggcatagcactgatgcccgtgaaatgtcaaagaccttcatcattggagagctgcatcccgacgaccgcccaaagctgaataaacctccaaagccctag

SEQ ID NO: 219773 - DNA, 405 bp, synthetic construct
  misc_feature 1..405: note = Description of Artificial Sequence: Synthetic coding sequence
  source 1..405: mol_type = other DNA
atggcggaacagtccgatgaagccgtgaaatattacacattggaggaaatacagaagcacaatcactccaaaagtacctggcttattctgcaccacaaggtctacgatctgactaagttcctcgaggaacacccaggcggagaggaggtgttgcgcgaacaagccggaggggatgccactgagaacttcgaggacgtgggtcatagtacagatgcaagggaaatgtctaagacctttattatcggtgagttgcaccctgatgatcggccaaagctgaataagccacccgagacgctgatcacaaccatcgactcatcctcatcctggtggacaaattgggtgatacccgcaatcagtgcagttgcagtggccctgatgtaccggctatacatggccgaggactag

SEQ ID NO: 219774 - DNA, 375 bp, synthetic construct
  misc_feature 1..375: note = Description of Artificial Sequence: Synthetic coding sequence
  source 1..375: mol_type = other DNA
atggcagaacagtccgatgaagctgtgaaatattatacccttgaagagatacagaaacacaatcatagtaaaagcacatggctcattctccaccataaagtgtacgacctgaccaagtttttagaagaacaccctggtggcgaagaagttctgcgggagcaagcaggcggtgatgcgactgaaaactttgaagatgttgggcatagcaccgacgcacgagagatgagcaaaacatttatcattggagagctgcaccccgaaaccctgatcactactatcgactcaagctcctcttggtggacaaactgggtgatcccagccattagtgccgtagccgtcgcactgatgtatcggctgtacatggccgaggattag

SEQ ID NO: 219775 - DNA, 297 bp, synthetic construct
  misc_feature 1..297: note = Description of Artificial Sequence: Synthetic coding sequence
  source 1..297: mol_type = other DNA
atggctgaacaaagtgatgaagccgttaagtattatactcttgaggaaatccagaagcacaatcatagcaagtctacctggcttatcctgcatcacaaggtctatgatctgacaaagtttctggaagaacaccccggaggggaggaggtccttagggagcaagcgggaggcgatgcaacagagaacttcgaggacgtgggacactccaccgatgcccgtgaaatgtctaaaaccttcattatcggagaattacaccccgacgaccgcccaaagctgaataagcccccagagccatag

SEQ ID NO: 219776 - DNA, 453 bp, synthetic construct
  misc_feature 1..453: note = Description of Artificial Sequence: Synthetic coding sequence
  source 1..453: mol_type = other DNA
atgtctggctccatggccaccgcagaggctagtggctccgatggaaagggacaggaagtggagacatctgtgacatattaccgactcgaggaggttgcaaagcggaatagccttaaagaactctggctggtaattcacggccgtgtctacgacgtgacacgctttcttaatgaacaccccggaggggaagaagtgcttctggagcaggccggtgtcgacgcttccgagagtttcgaagatgtggggcactcatctgacgcaagagagatgctcaagcaatactacatcggggacattcatcctagtgatttaaagccggagtccggcagtaaagatccttcaaaaaatgatacctgtaaatcttgctgggcttactggatactgccaatcattggggcagtcctccttggctttctctatagatattatacatcagagagcaaatcttcctag

SEQ ID NO: 219777 - DNA, 441 bp, synthetic construct
  misc_feature 1..441: note = Description of Artificial Sequence: Synthetic coding sequence
  source 1..441: mol_type = other DNA
atggctaccgctgaggcctcaggcagcgacgggaagggacaggaagtcgaaacttcagtgacctattatcgtctggaggaagtcgccaagcgaaactcgctcaaggagctgtggctggtaatacatggtcgagtttatgatgtgacacgattcttgaatgaacaccctgggggagaggaggtcttactcgaacaagctggcgtcgatgcctctgaaagcttcgaggacgtgggtcactctagtgatgcccgagagatgctcaaacagtattatattggcgacatccacccaagtgatctgaaaccagagtccggcagcaaggacccatcaaaaaatgacacttgcaagagttgctgggcgtattggatcctgccgatcattggcgcagtgcttctcggattcctctacagatattatacttcagagagcaaatcttcctag

SEQ ID NO: 219778 - DNA, 756 bp, synthetic construct
  misc_feature 1..756: note = Description of Artificial Sequence: Synthetic coding sequence
  source 1..756: mol_type = other DNA
atggagggcggagctgcagcagccacccctaccgctttgccttattatgtcgctttttcacaactgctgggccttacacttgtagcaatgacaggtgcctggttaggactctatagaggaggaatcgcatgggaaagcgacctgcaatttaatgcgcacccactctgcatggtgatcggtctgattttccttcaagggaacgccctgctggtttatagagtctttagaaatgaagccaagagaaccaccaaggtcctgcacgggttactgcacatcttcgcgttggtcatagcactggtgggactggttgctgtctttgattaccaccgcaagaaaggttatgcggatctgtatagcttgcactcttggtgcggcatcctggtgttcgttttgtattttgttcagtggctggtgggatttagcttttttcttttccccggagcctcattctccctgagatcacgctatcgccctcaacatatcttcttcggagccacaatattccttctctctgttggtaccgcactgctgggtctgaaagaggctctcctttttaaccttgggggaaaatactctgcctttgagccagagggtgtactcgccaacgtgctgggcctgctcctggcgtgtttcgggggtgccgtgttatacattttgaccagggcagattggaagcggccttcacaggctgaggaacaggcactcagcatggactttaagaccctcactgagggggattcccctggtagccagtag

SEQ ID NO: 219779 - DNA, 756 bp, synthetic construct
  misc_feature 1..756: note = Description of Artificial Sequence: Synthetic coding sequence
  source 1..756: mol_type = other DNA
atggaaggcggagcggcagctgccacgccaacagcattgccatactatgtcgccttcagtcagctcttagggctcactctagtcgctatgaccggcgcatggctcggcctatataggggtggcattgcatgggaatcagatctgcaattcaacgctcacccgctatgtatggtcatcgggttgatatttctgcagggcaacgctctgttagtgtatcgtgtgtttagaaacgaagctaagagaactacaaaggtactgcatggcctgttgcacatcttcgcgttggtcatcgccctggtcggactagttgccgtttttgattatcacaggaaaaagggctacgccgatctttacagcctgcactcttggtgcggcattctcgtgtttgtcctctattttgtgcaatggctcgtgggtttcagtttttttctatttccaggagcatctttcagtcttagatctcgttaccgccctcagcacattttttttggcgctaccatatttctgctgtctgtcggcacagcactgctggggctgaaggaggcactgctgtttaacctgggcggaaagtacagtgcttttgagccagagggagtgcttgcaaacgtcttgggactactattagcctgttttggtggggctgtgttgtacatactgaccagagctgactggaaaagacccagccaggcagaggagcaggccttgtcaatggactttaaaaccttgaccgagggagattctccaggatctcagtag

SEQ ID NO: 219780 - DNA, 756 bp, synthetic construct
  misc_feature 1..756: note = Description of Artificial Sequence: Synthetic coding sequence
  source 1..756: mol_type = other DNA
atggaaggcggagctgcggcagcaactcctacagctttaccttactatgtggccttttctcagttactggggctcacactggtggctatgaccggtgcctggttgggcttgtatcgcggtggcattgcttgggaatcagatttgcagttcaatgcccatcctctctgcatggttatcggccttatctttcttcagggcaacgcacttcttgtgtaccgcgtgtttagaaacgaggccaagcgcacaacaaaggtgctgcacggcctacttcatatattcgctttggttattgctttagtgggcctggtcgccgtgttcgactaccaccgcaagaaaggatacgctgacctatattctctgcactcgtggtgtggcattctggtcttcgtgttgtactttgtccagtggctcgtcggcttttcctttttcctcttccctggagcatctttctctttgcggagccgttaccgaccgcagcatattttctttggagcaacaatattcctcctgtctgtggggaccgctttgctaggcttaaaagaggcacttctattcaatctaggcggtaagtactcagcattcgagcccgagggcgttctggccaacgtgctcggattgctgttggcatgtttcgggggtgcagtactctatattctgacccgggctgattggaagaggccctcccaggctgaggagcaggccttatcaatggatttcaagacattaactgaaggagattctccagggtcccaatag

SEQ ID NO: 219781 - DNA, 417 bp, synthetic construct
  misc_feature 1..417: note = Description of Artificial Sequence: Synthetic coding sequence
  source 1..417: mol_type = other DNA
atggaggggggtgcggctgctgcaacccctacagctttaccttactacgtggccttcagccagctcctgggactaacactagtggctatgactggcgcttggttgggtctgtatcgcggaggtatagcttgggaatccgatctccagttcaatgcccacccactgtgtatggtcattggccttatttttcttcagggaaatgcattgctggtctatagagtcttccgaaacgaagcgaagaggactactaaggtattgcacggtctgcttcatatttttgctcttgtaatagccctggtgggccttgtagcagttttcgattaccaccgtaaaaagggatacgctgatctgtactcgctgcacagctggtgcggcattcttgtttttgttctgtatttcgtgcaagggcaggtctag

SEQ ID NO: 219782 - DNA, 957 bp, synthetic construct
  misc_feature 1..957: note = Description of Artificial Sequence: Synthetic coding sequence
  source 1..957: mol_type = other DNA
atgaagcaaaagaccaagccgggaaccggacctctgtcatccctcgaattcggcgttagtttcttagcaccgtcccctcacatggagcttttggcatcttgtcctcgcagtcggttgtctccttggggtggatgggcacctccaccctcacatagtcgcgacttgcgcccacttcctcaggatgatggggtctgcctgtcaatggagggaggcgctgcagcagcgacgcccacggccctgccttattatgtggctttctctcagcttttaggcctgacgttagtggctatgacaggagcatggctagggctatacaggggaggcatcgcatgggaatcggatctgcagttcaatgcacatcctttgtgcatggtgatcggcctgattttccttcaaggcaatgcactcctagtctacagagtatttcgcaatgaggctaagcggaccactaaagtacttcatgggcttttgcatattttcgccttggtgattgccctcgtgggcctagtggcagtgtttgactaccaccgcaaaaaaggctacgcagacctgtacagcctgcactcatggtgcgggattctggtgtttgtgttatattttgtacagtggctcgtaggttttagcttctttctcttccccggagcaagttttagccttcgctcccgctacagaccacagcacatttttttcggtgccactattttcttgttgagtgtcggcactgctctgcttggactgaaggaggctcttctgtttaacctcggcggaaagtatagtgcctttgaacctgagggggttctggctaacgttctaggtcttcttcttgcctgcttcggaggtgcagtgctctacattttgacccgggcagattggaagagaccaagccaggctgaggaacaagccctttccatggacttcaaaactttaaccgagggagattctcccggttcacagtag

SEQ ID NO: 219783 - DNA, 1143 bp, synthetic construct
  misc_feature 1..1143: note = Description of Artificial Sequence: Synthetic coding sequence
  source 1..1143: mol_type = other DNA
atgggttccggctgccggatcgaatgcatttttttctcagaattccatccgacactgggccctaagatcacttaccaagtgccagaggacttcatctcccgagagctgtttgacactgtgcaggtgtatattatcacgaagcccgaactccaaaacaagcttataaccgttaccgctatggagaaaaaactcattggttgtccagtatgtatcgagcataagaagtacagtagaaatgctctccttttcaatttgggattcgtatgtgacgcccaggcaaaaacttgtgccttagaacccatcgtcaagaagctcgctggctaccttactacactagagctggaatcctcgtttgtgtcaatggaggagtccaagcagaagctggtgccaataatgaccattctgttagaggaattgaacgcgtccgggagatgcaccctccctatcgacgagtccaacacaattcatctcaaagtcatcgaacaaagaccagaccctcccgtcgcgcaggagtacgatgtgcccgtgtttaccaaagacaaggaggactttttcaattctcaatgggacctgacgacacaacaaatcttaccatatattgacggctttagacatatccagaagatttccgcagaggccgacgtggaacttaatttggtacgtattgcgattcagaatctgctttattatggggtcgttactctcgtgagcatactacagtacagtaatgtgtattgccccaccccaaaggtccaggatttggttgatgataagtctttgcaggaagcctgcctgtcttatgtgacgaaacaggggcataaacgtgccagccttagggacgttttccagctttactgcagtttgtctcccggaacgactgttagagacctgattggtcgccatccccagcagttgcagcacgtggatgagcggaagctgatacagtttggcctgatgaagaacctcatcagaagacttcagaaataccctgtaagggtgactagagaggagcaaagccatccagcgaggctttacactggctgtcattcatatgacgaaatttgctgcaagactggtatgagctatcatgagctcgatgagcggctagagaacgaccctaacataataatctgctggaagtag

SEQ ID NO: 219784 - DNA, 669 bp, synthetic construct
  misc_feature 1..669: note = Description of Artificial Sequence: Synthetic coding sequence
  source 1..669: mol_type = other DNA
atggccctttcagccgagaccgagagccacatttaccgagctctgcggaccgctagcggggcagctgcacaccttgtcgctctggggttcactattttcgtagccgtgctggcccgaccagggagtagcctgttctcgtggcatccggtcctgatgtctctggcattcagcttcctcatgaccgaggccttgcttgtttttagtcccgaaagctcactcctgcactccctatctcgaaagggccgtgccagatgtcactgggtcctacaattgttggccctcctgtgcgccctcctcggtctcggactagttatcctgcacaaggaacagctgggtaaggctcatttggttacaagacatggccaggctgggctgctggctgtactgtgggcaggtctgcaatgcagcgggggagtcgggctcctctacccaaaattactgccgaggtggcctttggctaaactgaaattgtatcacgccacatcaggactggtcggctacttgctgggctccgcaagtctgctccttggaatgtgctccctctggtttactgcgtccgtgactggtgccgcttggtatcttgcggtgctgtgtccggtgttaactagtctggtgattatgaatcaagtcagtaatgcctatttgtacaggaagcggattcagccatag

SEQ ID NO: 219785 - DNA, 669 bp, synthetic construct
  misc_feature 1..669: note = Description of Artificial Sequence: Synthetic coding sequence
  source 1..669: mol_type = other DNA
atggctcttagtgccgaaacagagtcccacatctaccgcgctttaaggacggcctccggagccgctgctcacctggtggctcttggattcaccatttttgtggccgtacttgcacgtcccggttcttctctgttttcctggcatccagtgctaatgtccctggccttttctttcctcatgactgaggctctgctggtgttttcgccggagtcttcgctcttacactcattgtcgcgcaagggccgtgctcggtgtcattgggtcctccagcttctggctctactgtgcgcactgcttggccttgggctcgtaatcctgcataaagagcagctcggcaaagcgcaccttgtaacacgccatgggcaagccggtttgctggcggtgctatgggcgggtctgcaatgttctggtggcgtgggattactgtacccaaagctcttgccacggtggcccctggccaaactgaagctttaccacgctaccagcgggctggtaggatacctgctggggtctgccagcctgctgctcggcatgtgtagcctgtggtttaccgcttcagttaccggtgctgcctggtatttggcagtcttgtgtccagtgctgaccagcctggtcataatgaaccaggtgtcaaatgcttatctgtaccggaagcgcattcaaccatag

SEQ ID NO: 219786 - DNA, 669 bp, synthetic construct
  misc_feature 1..669: note = Description of Artificial Sequence: Synthetic coding sequence
  source 1..669: mol_type = other DNA
atggcgctaagcgccgaaaccgagtcacatatctaccgggctctgcgcactgctagcggcgctgcagcccacctggttgctctcggcttcacaatcttcgttgccgttctcgccagacctggctctagcttattctcatggcacccggtgctgatgagcctcgcgttttcgttcctgatgaccgaagctctcctggttttctcaccagaatcaagcctgctccacagcttatcacgcaaagggcgagcaaggtgtcactgggtactacagctgctggctttgctgtgcgcacttctgggcctgggtctagtgatcttgcacaaagaacagctcggaaaagcccacttggtgactcgccatgggcaagctgggctcttggccgtcctatgggctggtctgcaatgttctggcggagtcggcttactttatccaaagcttcttccacgttggcccctcgctaaactgaagctctaccacgcaacgtctggcctcgttggctatctgttggggagtgcttccctgctgcttggaatgtgcagtctatggtttaccgccagcgtaacgggagctgcgtggtatttggccgtcctctgccctgtcctgacatctctggtcatcatgaaccaggttagtaatgcttatctgtaccgcaagcgaatccagccatag

SEQ ID NO: 219787 - DNA, 696 bp, synthetic construct
  misc_feature 1..696: note = Description of Artificial Sequence: Synthetic coding sequence
  source 1..696: mol_type = other DNA
atgggcggactgtggagaccagggtggcggtgtgtgcctttctgtggatggagatggatccacccagggagccctacgcgcgcagccgagagggtggagcctttcctaaggcccgagtggtccggaactgggggtgccgagcgcggactacgttggcttggaacctggaaacgttgttccttgcgtgctagacatcctgccctgcagccccctcgccgacctaagtcctcaaacccctttactcgggcacaggaggaggagcgcagacgacaaaacaaaactaccctgacatacgtggccgcagttgctgtggggatgctgggcgcttcgtatgccgctgttcccttatacaggttgtactgccagacaacagggctggggggaagtgcggtggcagggcacgccagtgacaaaattgagaacatggtaccagtgaaagacagaatcatcaaaatcagcttcaacgctgacgtccacgcaagcctccaatggaatttccgaccccagcagaccgagatctacgttgtcccaggagagactgcccttgcattttaccgggcaaaaaacccaaccgataagcccgtcatcgggatatccacctacaatatcgtcccattcgaggcaggtcaatattttaacaagattcaggcctcaaagctgcaccgcgtgtacgttctggaatcatggcacctttag

SEQ ID NO: 219788 - DNA, 510 bp, synthetic construct
  misc_feature 1..510: note = Description of Artificial Sequence: Synthetic coding sequence
  source 1..510: mol_type = other DNA
atgctggctactagggtgttctctctggtgggaaagcgcgctattagcacttcagtttgtgtccgggcacatgagagcgttgtaaaaagcgaggacttttcacttccagcttatatggacaggagagaccaccccctgcctgaagtcgcccatgtcaaacacctgagcgcctctcagaaggccttgaaggaaaaagaaaaggccagttggtcgtccctaagcatggacgagaaggtagagttataccgcattaagtttaaggagagctttgcagagatgaataggggctccaatgagtggaagactgtggtcggcggagccatgttcttcattggctttactgcgcttgtgataatgtggcagaaacactacgtctacggcccacttccgcaaagtttcgacaaggagtgggtggccaagcagacaaaacgcatgctggacatgaaggttaaccccatccagggactcgctagcaaatgggactacgagaagaacgagtggaaaaaatag

SEQ ID NO: 219789 - DNA, 516 bp, synthetic construct
  misc_feature 1..516: note = Description of Artificial Sequence: Synthetic coding sequence
  source 1..516: mol_type = other DNA
atgctacccagagcggcttggtcccttgtgctgcgcaagggaggagggggtaggcggggaatgcactcatccgagggaacaacacgaggcggaggaaagatgtccccctacactaattgttatgcccagaggtattatcccatgcctgaggagcccttttgcacagaactgaatgctgaggaacaggccctaaaggagaaggagaagggcagctggacccagctaacccatgccgaaaaggttgccctgtaccgcttacagtttaacgagacgtttgccgaaatgaaccgccgatccaacgaatggaagaccgttatgggttgcgtgtttttctttatcggctttgcggcactcgtgatctggtggcaacgagtctacgtgtttccaccgaagccaattacccttaccgacgaaagaaaagcccagcaattgcagaggatgctggacatgaaggttaaccccgtccaagggctcgcctcccgctgggattatgaaaaaaagcagtggaaaaagtag

SEQ ID NO: 219790 - DNA, 390 bp, synthetic construct
  misc_feature 1..390: note = Description of Artificial Sequence: Synthetic coding sequence
  source 1..390: mol_type = other DNA
atggcgtcccgtctgctgaggggcgctggtacactggctgctcaggctcttagagcaagaggtccttcaggagccgcagcgatgcgctctatggcgtctggcggtggggttcctactgatgaggaacaggccactggcctggagcgggagattatgctagccgcaaagaaagggttggatccttataatgttcttgcgcctaagggcgcttccggcacaagagaagatccaaaccttgtcccctccatttccaacaaaaggatcgtcgggtgcatttgtgaagaggataataccagcgtggtctggttttggttgcataagggcgaggcccaacgttgcccaaggtgcggggcacactataaactagttccccagcagctagcccactag

SEQ ID NO: 219791 - DNA, 606 bp, synthetic construct
  misc_feature 1..606: note = Description of Artificial Sequence: Synthetic coding sequence
  source 1..606: mol_type = other DNA
atggcccgagattacgatcacctgttcaagttactcatcatcggggatagtggagtggggaagagtagtctgttactcaggtttgctgataacacatttagcggcagttatataaccactatcggggtggatttcaaaatccgcacagtggagatcaatggggagaaggttaaacttcaaatctgggataccgctggacaggagcggtttcgaaccataactagtacatactatcgcggtacacacggcgtcatcgtcgtctatgacgtcaccagtgctgaatcgttcgtgaatgtaaagagatggttgcacgaaatcaaccaaaattgtgacgatgtgtgtcggatcctggttggcaataagaatgacgacccggagcggaaagtggttgagacagaggacgcctataaatttgctgggcagatgggaatccagctgttcgaaacctccgctaaggaaaatgtgaacgtggaagagatgtttaattgtataaccgaactggtgctgagggccaagaaggacaatctagccaaacagcagcaacagcagcagaacgacgttgttaaacttacgaagaattcgaagagaaaaaagcgctgttgctag

SEQ ID NO: 219792 - DNA, 261 bp, synthetic construct
  misc_feature 1..261: note = Description of Artificial Sequence: Synthetic coding sequence
  source 1..261: mol_type = other DNA
atggctgaggacatggagacaaaaatcaagaactataagacagcaccttttgacagtcggttcccgaaccaaaaccagactcgtaattgctggcaaaactacctggattttcataggtgtcagaaagccatgactgcgaaaggtggagatatctcagtgtgcgagtggtatcagagagtgtaccaatcgctgtgtcccacttcatgggttacagactgggacgagcagagggcagaaggaactttcccaggaaagatctag

SEQ ID NO: 219793 - DNA, 312 bp, synthetic construct
  misc_feature 1..312: note = Description of Artificial Sequence: Synthetic coding sequence
  source 1..312: mol_type = other DNA
atgcatcctcatcctcaaatccccggtcgagacttagcaggctttagcactatggccgaagatatggaaaccaaaatcaagaactataaaaccgccccattcgacagcaggtttcccaaccagaaccagaccagaaactgctggcaaaactacctggacttccaccgatgccaaaaggccatgaccgctaagggtggagacatcagcgtttgcgaatggtatcagcgggtttatcagagcctgtgtcctacatcttgggttactgactgggatgagcaaagggctgaaggcactttccccggtaaaatctag

SEQ ID NO: 219794 - DNA, 228 bp, synthetic construct
  misc_feature 1..228: note = Description of Artificial Sequence: Synthetic coding sequence
  source 1..228: mol_type = other DNA
atggcgccagaagttctccccaagcccagaatgcggggtctgctcgcccgaaggcttcggaatcatatggccgtcgcatttgttttgtccttaggagtcgccgcattatataaatttcgggtagccgaccagcgaaaaaaggcgtatgcggatttttacaggaactacgatgtgatgaaagacttcgaagagatgcgaaaagcgggtatcttccagtctgttaaatag

SEQ ID NO: 219795 - DNA, 228 bp, synthetic construct
  misc_feature 1..228: note = Description of Artificial Sequence: Synthetic coding sequence
  source 1..228: mol_type = other DNA
atggcgcctgaagtcctgcccaagccacgcatgcgcggtttactcgccagaaggctacggaatcacatggcagtagcgtttgtgttgtcactaggagtggcagcattgtacaagtttcgtgttgcagaccagcggaaaaaagcttacgctgacttctaccgcaactatgacgttatgaaggatttcgaggagatgcgtaaagccggaattttccaatccgtcaagtag

SEQ ID NO: 219796 - DNA, 228 bp, synthetic construct
  misc_feature 1..228: note = Description of Artificial Sequence: Synthetic coding sequence
  source 1..228: mol_type = other DNA
atggccccagaagtactgccgaaacctcggatgcgaggactccttgctcggcgactgagaaatcatatggctgtcgccttcgtgctctcgcttggcgtggcggcattgtacaagtttcgcgtcgccgatcagagaaaaaaggcctatgccgatttttatcgtaattacgacgttatgaaagattttgaagagatgcggaaagccggaatatttcagagtgtcaagtag

SEQ ID NO: 219797 - DNA, 228 bp, synthetic construct
  misc_feature 1..228: note = Description of Artificial Sequence: Synthetic coding sequence
  source 1..228: mol_type = other DNA
atggctccagaagtgctacccaagcctcgcatgcggggactcctggccaggaggttgcgaaatcatatggcagtcgcttttgtgctttcattgggggtagccgctctatacaaattccgggttgccgaccagaggaagaaggcctacgccgacttctaccgcaattacgatgtgatgaaggacttcgaagaaatgagaaaagcaggaatcttccagagtgtaaagtag

SEQ ID NO: 219798 - DNA, 228 bp, synthetic construct
  misc_feature 1..228: note = Description of Artificial Sequence: Synthetic coding sequence
  source 1..228: mol_type = other DNA
atggccccagaggttcttccgaaacctaggatgagaggcttgctggctcggagattacggaaccatatggctgtcgcattcgtccttagccttggtgtggcggctctgtacaagtttcgcgtggcagaccaacggaagaaagcttatgccgacttctaccgcaactacgatgtaatgaaagattttgaagagatgcgtaaagctggaattttccaaagcgtcaaatag

SEQ ID NO: 219799 - DNA, 228 bp, synthetic construct
  misc_feature 1..228: note = Description of Artificial Sequence: Synthetic coding sequence
  source 1..228: mol_type = other DNA
atggctccagaggtgctcccaaaaccgcgtatgaggggtctcctggccagacgactccgtaaccatatggctgtagcattcgtcctgtccttgggagtcgccgctctgtacaagttccgggtggccgaccaacggaagaaggcttacgcagatttctataggaactatgatgtcatgaaggatttcgaagagatgcgcaaagccggaatatttcagagtgtgaaatag

SEQ ID NO: 219800 - DNA, 228 bp, synthetic construct
  misc_feature 1..228: note = Description of Artificial Sequence: Synthetic coding sequence
  source 1..228: mol_type = other DNA
atggccccagaggtcctccctaaaccaagaatgcgcggactgctggccagacggttgagaaaccatatggcagtggcctttgtgcttagtctcggcgtagctgccctgtataaatttagggtggctgatcagaggaagaaggcatacgccgatttctatcggaactacgacgtgatgaaagacttcgaggagatgagaaaggccggtatcttccagtctgtgaaatag

SEQ ID NO: 219801 - DNA, 228 bp, synthetic construct
  misc_feature 1..228: note = Description of Artificial Sequence: Synthetic coding sequence
  source 1..228: mol_type = other DNA
atggcaccagaagtgctcccaaagcctcggatgcgcggattgctcgccagacggcttagaaaccacatggccgtggccttcgtgctgtctctcggcgtggccgctctgtataaatttcgggtggcagatcagcggaaaaaagcctacgccgacttctacaggaactacgacgttatgaaggactttgaggagatgcggaaagccggaattttccaatctgttaaatag

SEQ ID NO: 219802 - DNA, 228 bp, synthetic construct
  misc_feature 1..228: note = Description of Artificial Sequence: Synthetic coding sequence
  source 1..228: mol_type = other DNA
atggcccctgaggtgctacctaagcccaggatgagaggtctgctcgctcggagactaagaaatcatatggcagttgcctttgtcctgtcgttgggcgtggccgcactttacaaattccgcgtagccgaccagcgcaaaaaagcctatgcggacttctatcgcaactacgacgtcatgaaggacttcgaggaaatgcgcaaagctggaatcttccagtccgtgaaatag

SEQ ID NO: 219803 - DNA, 228 bp, synthetic construct
  misc_feature 1..228: note = Description of Artificial Sequence: Synthetic coding sequence
  source 1..228: mol_type = other DNA
atggcccctgaggtgttgcccaaacccaggatgcgcggactactggcacggagacttcggaatcacatggctgtggcatttgtgcttagtctaggagtagccgctttatacaaatttcgtgtggcagatcagcggaagaaagcatacgctgatttctataggaactacgatgtcatgaaggatttcgaggagatgcggaaagctggtatcttccagagcgttaagtag

SEQ ID NO: 219804 - DNA, 240 bp, synthetic construct
  misc_feature 1..240: note = Description of Artificial Sequence: Synthetic coding sequence
  source 1..240: mol_type = other DNA
atgcaagcgctgagggtgtcgcaggccctaatccggagtttctcgtccaccgcgcgaaaccgatttcagaatcgagtccgagaaaagcagaagctctttcaggaggataacgatatcccattgtacttgaaaggcggaatagttgataatattctgtacagagtgactatgacactctgcctgggtggaactgtctactccctgtacagtttagggtgggcttccttccccaggaattag

SEQ ID NO: 219805 - DNA, 330 bp, synthetic construct
  misc_feature 1..330: note = Description of Artificial Sequence: Synthetic coding sequence
  source 1..330: mol_type = other DNA
tgatccttttgggttctgtctttgcccggtccaagcagacagcctggccacccgcaggcaaggttacagggcgagtcaccgcctaacccagcgggaagctcccgcgtgtcgcaggctctaatcaggtctttcagctcaacggccaggaatagattccagaatagggtgagagagaaacaaaagctcttccaggaagacaacgacatccctctttacctcaaaggtgggatagtggacaatattctgtaccgagtaaccatgacactgtgtttaggcggaactgtgtactcactctactccctcggctgggcttcttttcctcggaactag

SEQ ID NO: 219806 - DNA, 2775 bp, synthetic construct
  misc_feature 1..2775: note = Description of Artificial Sequence: Synthetic coding sequence
  source 1..2775: mol_type = other DNA
atgagtcgctctaggcaacctcccctcgtgactggaatcagcccgaacgagggcattccttggactaaggttacaattagaggcgagaacctgggcaccggtcctactgatctgattggcctgacgatttgcgggcacaattgcttgcttacagcagagtggatgagcgctagcaaaatagtttgtcgcgtaggccaggctaagaatgataaaggagacatcattgttactaccaagagcggagggagggggacaagcacggtgagcttcaagctgctgaaacctgagaaaatcggaatcctcgatcagagcgcagtttgggtggatgagatgaattactacgatatgaggacagaccggaacaaaggtattccaccactgtcgctgaggcccgctaatcctttaggtatcgagatcgagaaatccaagttttcccagaaggatctcgagatgttgtttcacggcatgagcgctgacttcacttccgaaaatttcagcgctgcatggtacctgatagagaatcactcaaatactagttttgagcagctgaagatggcagtgaccaacttgaaacggcaagccaacaaaaagtcagaggggtctcttgcttatgtcaaaggagggctcagtactttcttcgaggctcaggacgcactcagtgctatacaccagaaacttgaagcagacggcacagaaaaagtggaaggaagcatgacccagaagctggagaacgtgctgaatcgagcaagtaatactgccgacacgttgttccaggaagtgctgggccgaaaagacaaagctgactccaccagaaatgcccttaacgtgttgcagcgcttcaagttcctgttcaaccttcctctgaatatcgagcgaaatattcagaagggtgactatgatgttgttattaacgattacgagaaggccaagagcctattcggcaagactgaggtccaggtctttaaaaagtattacgcagaagtggagaccagaattgaagcactgagggaactgcttcttgataagttgttggaaaccccctccacgttacacgatcagaagagatacatcaggtacctctcagacctgcacgcttctggcgaccccgcttggcaatgcattggcgcacagcacaagtggatcttgcaactcatgcacagttgcaaggagggttacgtgaaggacttaaagggaaatccaggactccactcccccatgctggacctcgacaacgataccagaccttcagtcctgggtcacttgtcccagacagcctccctcaagcgcggatcctctttccagagcggccgagatgacacctggcggtacaagaccccccatagagtggctttcgtggaaaagctcacaaagctggtgttatctcagctccccaatttctggaagctatggatcagctacgtgaacggctcgttatttagtgagaccgccgagaaaagcgggcagattgagcggtcgaaaaatgtccgccagagacaaaacgatttcaagaagatgattcaggaggtgatgcattctctcgtcaaactgacccgaggcgctctgctccccttgtccataagagatggtgaggcaaagcaatatggcggatgggaagtgaagtgcgaattatctggacagtggctggcccacgccatccagaccgtacggctgactcacgagtctttgaccgcccttgaaatacctaacgatctgctgcagactatccaggatctcattctcgatctgagggtgagatgtgtcatggccacgctgcagcatacagcagaggaaatcaaaagactagccgaaaaggaggattggatcgtcgacaacgagggactgaccagtctgccatgtcagttcgagcagtgtattgtgtgttctctgcagtccctaaaaggggtactggaatgcaaacctggcgaagcctctgtgttccagcagcctaaaactcaggaagaggtgtgtcagctatccattaatattatgcaggtattcatctactgtctagaacaactgtctactaagccagacgctgacatcgacactacccacctttcagtcgacgtgtcctctcctgacctgtttgggagtattcatgaagacttctccttgacctctgagcagcggctcctcatcgttttgtccaattgttgctatctggaaaggcacacttttctcaatattgcagaacattttgagaaacacaactttcagggaattgagaagattacccaggtcagcatggcatcactgaaagaactggatcagagactctttgaaaattacattgagctgaaggccgaccctatcgtcggaagccttgagccaggcatttatgccggatattttgattggaaggactgtcttcccccaacgggcgttaggaactatctcaaagaagccctcgtgaatattatcgccgtccatgcagaggtttttaccatttctaaggagctggtgccacgagtgctgtccaaggtgattgaagccgtgtccgaggaactgagtagattgatgcaatgtgtctccagctttagtaagaacggggctcttcaggctagactcgaaatctgcgcactgcgggatacagtggccgtgtacctcacaccagagtctaaaagctcattcaaacaggcgctggaagccctgccccagctgagctccggagctgacaagaaacttctagaagaactgctcaacaaattcaaatcatctatgcacctccagctgacctgtttccaggcggctagtagcaccatgatgaagacctag

SEQ ID NO: 219807 - DNA, 348 bp, synthetic construct
  misc_feature 1..348: note = Description of Artificial Sequence: Synthetic coding sequence
  source 1..348: mol_type = other DNA
atgcacacccaagattcggaagtagtgccagtgcctgcgtggcctttctctcttgttgtgttctcctgcggaggctgctggtccgtcacagctaagatgctccgcaatctcctcgccctccggcagattggtcaaagaaccatctcgaccgcctccagaaggcacttcaaaaacaaggtgcctgagaagcagaagttgttccaggaggacgatgaaatccctctctacctgaaggggggtgtggcagatgccctgctgtatagagcaacaatgatacttacagttggcggaaccgcgtacgcaatctacgaattagccgttgcctcctttccaaagaaacaagagtag

SEQ ID NO: 219808 - DNA, 348 bp, synthetic construct
  misc_feature 1..348: note = Description of Artificial Sequence: Synthetic coding sequence
  source 1..348: mol_type = other DNA
atgcacacccaggacagcgaggtggtcccagttccagcgtggccatttagcctggtggtgttctcctgtgggggttgctggagcgtcacagccaagatgctcaggaatttgctggctctccgccagattggccagaggacaattagtacagccagtagacgccatttcaaaaacaaggtgcctgaaaagcagaagctctttcaggaagacgacgaaatccccctctacctcaaggggggtgtggccgacgctctgctctacagggcaaccatgattcttactgtaggaggaactgcttatgccatttacgagctggctgtcgctagctttccaaaaaagcaggaatag

SEQ ID NO: 219809 - DNA, 1734 bp, synthetic construct
  misc_feature 1..1734: note = Description of Artificial Sequence: Synthetic coding sequence
  source 1..1734: mol_type = other DNA
atgagtaaacctgagctgaaagaagataaaatgctcgaagtacatttcgtaggtgatgatgacgtgctcaatcacatactcgaccgcgaagggggagcaaaactcaagaaagagagagctcaactgctcgtcaaccccaagaagatcattaagaagcccgagtatgatctagaggaggacgatcaggaagttttgaaggatcagaattacgttgaaatcatgggtcgggacgtccaggagagtctgaagaacggctcggcaacaggaggcggaaataaagtgtactcatttcaaaacaggaagcatagcgagaagatggccaagctcgccagcgagctggcaaagaccccgcagaaatcagtgtcgtttagcttgaagaatgatccagagatcaccatcaacgtgccacagtcgtccaagggacacagcgcttcagataaagtccagccaaaaaacaacgataaatccgagtttctttccaccgctccaagatccctgaggaagcgacttatcgtgcctcgaagtcactccgactccgaatcagagtactcagccagtaattcagaggatgacgaaggggtcgcgcaggaacacgaagaggacaccaacgcagtgatcttttctcagaaaattcaagctcagaatcgggtggtctctgcccctgtgggcaaggaaactccatcaaagagaatgaagagggacaaaactagcgacctggtcgaggaatacttcgaagcacattcatcatcaaaggtgctgaccagtgatcggacattgcaaaagctcaagcgagcgaagttggatcagcaaactctgcgcaatctgctgtccaaggtgagcccttcattttctgccgaacttaaacagctgaatcaacagtatgaaaagctgtttcataaatggatgttgcagctccacctggggttcaacattgtgctatacggtctcggaagcaaaagggacctgctagaacggttcagaaccaccatgttacaagactctatccacgtcgtaattaacggattctttccaggcatttcagtaaagagtgtcctgaacagtatcaccgaagaggtcctagaccatatgggtaccttccggagcatactggaccagctggactggatcgtgaacaagtttaaggaagactcgtcacttgaattgttcttgttaatccataacttagactcacagatgctaagaggagagaagagccagcaaatcattgggcagctatcttctcttcacaatatttacctgatcgcctcaatagaccacttaaatgcacctcttatgtgggaccacgcaaagcagtcactcttcaattggctgtggtacgaaactaccacatacagcccctacactgaggagacttcctacgaaaattctctcctcgtgaaacaaagcggatctttgcccctgtcttctctgacccatgtgttgaggtccctcacacccaatgctagaggtattttcaggttgctgattaagtaccagttggacaaccaggataacccctcttatatcggcttgtccttccaggacttctaccaacagtgcagggaggcctttctggtgaattcagacctgaccttaagagcccagctgacagagtttagagatcacaagctcattaggacaaagaaagggacggatggagtggaatatctattgatccccgtagataacgggactctaactgactttctggaaaaggaagaagaggaagcatag

SEQ ID NO: 219810 - DNA, 345 bp, synthetic construct
  misc_feature 1..345: note = Description of Artificial Sequence: Synthetic coding sequence
  source 1..345: mol_type = other DNA
atgtactacaaatttagtgggttcacgcaaaagctcgctggggcttgggcctctgaagcttattctccacagggcctgaaacctgttgtcagtactgaagcgcctcccatcatcttcgctactcctacgaaactcacatccgactcaactgtgtacgactacgcagggaaaaacaaagtgccagagctgcagaagttttttcagaaggccgacggggtgcctgtgtacttgaagagagggcttccagatcagatgctgtatcgcaccacaatggctttgacagtgggaggtacgatctattgcctcatcgccttatacatggcgtctcagccgaaaaacaagtag

SEQ ID NO: 219811 - DNA, 246 bp, synthetic construct
  misc_feature 1..246: note = Description of Artificial Sequence: Synthetic coding sequence
  source 1..246: mol_type = other DNA
atgatgttccctctggcacgcaacgcgctctcgagcctgaaaattcaatccatactccagtccatggccaggcattctcacgtaaaacacagcccggattttcatgacaagtacggaaacgcggttctcgcttcaggcaccgcgttctgtgttgcaacttgggtctttactgctactcagattggcatcgaatggaacctgtcacccgtgggcagagtgacccccaaagaatggaagcaccaatag

SEQ ID NO: 219812 - DNA, 246 bp, synthetic construct
  misc_feature 1..246: note = Description of Artificial Sequence: Synthetic coding sequence
  source 1..246: mol_type = other DNA
atgatgtttccgctggccagaaacgccctatccagtctgaaaattcaatcaatactgcaatcaatggcccgacactcacacgtgaagcactctcctgactttcatgataagtacggcaatgccgtgttggcttccgggactgccttttgcgtggctacatgggttttcaccgcgacccaaattgggatcgagtggaacctatccccagtggggcgtgtcacgcccaaggaatggaagcatcagtag

SEQ ID NO: 219813 - DNA, 246 bp, synthetic construct
  misc_feature 1..246: note = Description of Artificial Sequence: Synthetic coding sequence
  source 1..246: mol_type = other DNA
atgatgtttcctctggcaagaaacgccttatccagcctcaagatccaatcaattcttcagagtatggctaggcactcacacgtgaaacactctccggacttccacgacaagtatgggaacgcagttctggcatcaggcactgctttctgcgtggctacctgggtcttcaccgctactcagattggaatcgagtggaatctcagcccagtgggacgcgtgacgccaaaggaatggaaacaccagtag

SEQ ID NO: 219814 - DNA, 99 bp, synthetic construct
  misc_feature 1..99: note = Description of Artificial Sequence: Synthetic coding sequence
  source 1..99: mol_type = other DNA
atgatgtttcccctggccaggaatgccctgtcctcgctgaagattcagtcaatcctgcaatccatggctcgccatagtcacgtaaagcacagtccttag

SEQ ID NO: 219815 - DNA, 243 bp, synthetic construct
  misc_feature 1..243: note = Description of Artificial Sequence: Synthetic coding sequence
  source 1..243: mol_type = other DNA
atgttcccgcttgccagaaatgcactatcatcattaaagatccaatccatcctccaaagtatggccaggcacagtcacgtgaaacactctccagactttcacgacaagtatgggaatgccgttctggccagtggtacagccttttgtgttgctacttgggtcttcactgcgactcagatcggaattgaatggaatctctcaccagtaggtcgagtgacccctaaggagtggaagcaccagtag

SEQ ID NO: 219816 - DNA, 192 bp, synthetic construct
  misc_feature 1..192: note = Description of Artificial Sequence: Synthetic coding sequence
  source 1..192: mol_type = other DNA
atgttggggcagagcattcggaggttcaccacaagcgtcgtaaggaggtcccattatgaggaaggccctggaaagaatctaccattctccgttgagaacaagtggtccctcctcgctaagatgtgcttgtattttggctcagctttcgctacccccttcctggtggtgcgtcatcagctattgaagacctag

SEQ ID NO: 219817 - DNA, 192 bp, synthetic construct
  misc_feature 1..192: note = Description of Artificial Sequence: Synthetic coding sequence
  source 1..192: mol_type = other DNA
atgttggggcagagcatccgaaggtttacgacaagtgtagtgcggaggagccattatgaggaaggaccaggcaaaaatctgcctttcagcgtggagaacaagtggtccctgctggctaagatgtgcctctatttcggatctgcattcgccacccccttcctggttgttaggcaccagcttctcaaaacctag

SEQ ID NO: 219818 - DNA, 978 bp, synthetic construct
  misc_feature 1..978: note = Description of Artificial Sequence: Synthetic coding sequence
  source 1..978: mol_type = other DNA
atggctgccgcagctgcttccttgcggggagtagtgctgggtccaaggggcgcaggactgcccggagcacgcgctcggggactgctttgtagcgctagaccgggacagctacctctgaggacacctcaggccgtggctctctcgtccaagtcaggactttcccgaggtaggaaagtaatgctgagcgctcttggaatgctcgctgccggaggagcgggactggcaatggccctacattccgccgtcagcgcatcggacctggagctgcatcctccatcttacccctggtcccatagaggtctcttgtcaagtctggatcacacttcaattcgccgaggatttcaggtatacaagcaggtgtgcgcgtcctgtcatagtatggacttcgtggcatacaggcaccttgtcggcgtatgctacacagaggacgaggcaaaggaactggccgctgaagtagaggtgcaggatggtccaaatgaggatggggagatgtttatgcgaccaggtaaactctttgattacttccctaaaccttacccaaacagcgaagccgcaagagcagccaataacggagccctgccacctgatctcagctatattgtgagggccaggcatggtggcgaagattatgtgttctcgttactgacaggctactgcgagcctcctacaggcgtgtcactccgcgaaggcctgtactttaacccgtacttccccggacaggcaatagctatggcaccccctatatacacagacgtcttggagttcgacgatggcacaccggcaacgatgagccaaattgcaaaggacgtgtgcacattcctgcgctgggccagcgagccagagcacgatcacagaaagcgtatgggactcaagatgctgatgatgatggccctcctggtccccctggtgtatacaatcaagaggcataaatggtccgtcctgaaatctaggaagttggcctacagaccgccaaagtag

SEQ ID NO: 219819 - DNA, 252 bp, synthetic construct
  misc_feature 1..252: note = Description of Artificial Sequence: Synthetic coding sequence
  source 1..252: mol_type = other DNA
atggagcccttcgtggtcctggtactatgcctcagttttatgctgctttttagtctgtggagacagtcgtgtcgaagaagaaagttgcctcctgggccaacgccgctgccaatcataggcaatatgcttcagattgatgtcaaagacatttgtaaaagctttaccaatgtgagtttaccatacgttccccctgccaactgcaagggcagccagaaatccatggtgctctgcagtccttgtattctggcctag

SEQ ID NO: 219820 - DNA, 219 bp, synthetic construct
  misc_feature 1..219: note = Description of Artificial Sequence: Synthetic coding sequence
  source 1..219: mol_type = other DNA
atggaaccctttgtggttctggtgctctgtctgagcttcatgttgctgttttccctatggaggcaatcctgtcggcgacgcaagctaccgccaggaccaaccccactgcccatcataggcaatatgctccaaatagacgtgaaggacatctgcaagagctttaccaacgttagtctgccctacgtgcctcccgctaattgcaaaggcgtgctgctttag

SEQ ID NO: 219821 - DNA, 423 bp, synthetic construct
  misc_feature 1..423: note = Description of Artificial Sequence: Synthetic coding sequence
  source 1..423: mol_type = other DNA
atggacttaatccccaacttggcagtggaaacctggcttcttttggctgtgtcccttgttctactctacttatacggaactcggactcatggattgtttaaacgcctcggaatccccggacctaccccactcccactcctgggtaatgtcttgtcctatcgccagggactgtggaagtttgataccgaatgctacaagaagtacggaaagatgtggggtacatacgagggccagttgcccgtcttggcaatcacagacccggacgtcatacggactgttttggtaaaagagtgctactctgtcttcacaaatagaagaatctgtgcaacaacctcaaccatcaaaatgcagacgcactccgtgacaatgtggctcccccctgctgtgttgcagtcccagcacggggtttgcctctttctgtag

SEQ ID NO: 219822 - DNA, 1563 bp, synthetic construct
  misc_feature 1..1563: note = Description of Artificial Sequence: Synthetic coding sequence
  source 1..1563: mol_type = other DNA
atgcctcagctgtccctgtcaagcctcggtctctggcctatggcggcttccccttggcttctgctgctgttggttggggcttcatggctgctggcaagaatcttggcgtggacatacactttttatgataactgttgccggctcagatgttttccacagcccccaaagcgcaattggttcctgggacacctgggactagtgacgccaacggagcagggaatgagagttttaacccagctagtggcaacatacccacaggggttcaaggtgtggatgggtcctattttccctgtcatccgtttttgccatcccaatattatacgatccgttatcaacgctagcgcggcaatcgtgcccaaggacaaggtcttctattcttttctcaagccgtggttgggcgacgggttgctgctttcggccggagagaagtggagtcgtcaccggaggatgttgacaccagcctttcacttcaatattctaaagccatacatgaagatctttaatgagtccgtcaacatcatgcacgcaaaatggcagctgctggccagtgaggggtcggccaggctcgatatgtttgagcatattagcttgatgacactcgattctctacagaagtgtgtgttctctttcgactcccattgccaagagaagccgagcgagtacatagctgccatcctcgagttgagcgccctcgttaccaagcggcaccagcaaattctgttatacatcgacttcttatattaccttaccccggacggacaacgatttcggcgagcatgtaggctggttcatgattttaccgacgcagtgatccaggagagacgaagaaccctgccatcccagggcgtggatgatttcctgcaggccaaggccaaaagtaagaccctggattttatagacgtgttgctcctgtctaaggacgaagacgggaaaaagctctccgacgaggatatcagggctgaagctgataccttcatgtttgagggacacgacaccaccgcctcaggactgtcctgggtgctgtatcacctcgcaaagcatcctgagtatcaggagcgctgccgccaggaagtccaggagcttctgaaggaccgagagcctaaggaaattgaatgggacgacctggcccagctgcccttcctgacaatgtgcataaaagagtccctgaggctgcatcccccagtccctgccgtctcacgctgttgcacccaagatatcgtgctgcctgatggacgggtgatcccaaaggggatcatttgtctgatatccgtgttcggcacccaccacaaccctgccgtgtggcccgatccagaagtctatgatccttttagattcgaccccaagaacatcaaggagcgttcccccctagcttttattcctttctccgccggaccccgtaattgtatcggacaggcctttgccatggcggagatgaaggtggtgcttggactgactctcctgagattcagagtgcttcctgaccacacagaaccgcgacgaaagccagagctggtgttaagagcagaagggggtctgtggttgcgcgtggaaccgttgtcatag

SEQ ID NO: 219823 - DNA, 1455 bp, synthetic construct
  misc_feature 1..1455: note = Description of Artificial Sequence: Synthetic coding sequence
  source 1..1455: mol_type = other DNA
atgttgtttcccataagtatgtctgctactgagtttttactagcaagcgttatcttctgtctggtattttgggttataagggcctctagaccacaagtgcctaagggtctgaaaaaccccccagggccttgggggtggcctctgatcgggcatatgctcactctcgggaagaacccgcatctcgccctgtctagaatgtctcaacagtacggggacgtacttcagattaggatcgggtcaactcctgtcgtagtgctcagcggtttagacaccattcggcaggccctggtgcggcaaggagacgacttcaaaggcagacctgacctgtacacttttacacttatttctaatggtcaatcaatgtccttcagccctgatagcggacctgtctgggccgcacgacggaggctggctcagaatggtctgaaatccttctctatcgcaagcgatcctgctagctccacatcgtgctacctggaagagcacgtgagtaaggaggctgaagtgctgattagcacgttgcaagagttaatggccggaccagggcacttcaatccctaccgttatgtggtggtctccgtgactaatgtcatttgtgccatctgttttgggaggaggtacgaccataaccatcaggaactcctgagcttggtcaatctcaatgcctttaaggatctgaacgaaaagttttacagctttatgcaaaagatggtgaaggaacactataagacgttcgaaaagggacacattagagacatcacagatagtctgattgagcattgtcaggagaagcaactggacgagaatgcaaacgtgcagcttagtgatgaaaaaattatcaacatcgtgctggatctgttcggggcaggctttgataccgtcaccacagccatttcatggtccctcatgtatttggtgatgaatccaagggtgcagcgaaagatccaggaagagctggacactgtcattggtaggagccgtagacccagactcagtgaccgcagtcatcttccctatatggaagcctttatcctggaaacctttaggcactcctccttcgtgccgttcactatccctcactccacgaccagagatacctctttgaaaggtttttatataccaaagggacgttgcgtattcgtcaaccagtggcagattaaccatgaccagaagctgtgggtgaacccttcagagtttctgcccgaaaggtttttgactccggacggggctattgataaggtcctctctgaaaaggtgatcatctttgggatgggcaaacgaaaatgtattggtgaaacaatcgctaggtgggaagtgttcctcttccttgccatcttgttgcaaagagttgagttctccgtgcccctcggagtaaaggttgatatgacaccaatctatgggctgaccatgaaacatgcatgttgcgagcacttccagatgcaactgcgcagctag

SEQ ID NO: 219824 - DNA, 1539 bp, synthetic construct
  misc_feature 1..1539: note = Description of Artificial Sequence: Synthetic coding sequence
  source 1..1539: mol_type = other DNA
atgctcttcccaatctcaatgtccgctactgaatttttgctggcatcagtcattttctgcctcgtattttgggtgatcagggctagccgcccacaggtgcctaaggggctgaaaaatccccctggtccctggggatggccgctgattggccatatgttgacactgggcaagaatccccacctagctctctctcggatgtcgcagcagtacggtgatgttcttcaaatccgaatcggctctactcctgtggtggttctcagcgggctggacaccatacgtcaggccctggtccgtcagggtgatgatttcaagggcagacccgacctgtacactttcaccctgatctccaacggtcagtctatgtctttctccccagactccgggccagtttgggcagcacgaagacgactggctcagaacggcctaaagtctttttcaatcgcgtcagatcccgcatcctccacctcctgttacctggaggaacacgtgtcaaaggaggccgaagtgctcatttccaccctacaagagctcatggctgggccaggtcactttaatccctatcggtacgttgtggtatcagtgactaacgtcatctgtgccatctgttttgggaggcgctacgaccataatcaccaggagctcttgtcgctggttaatctcaacaataacttcggtgaggtagttgggagtggaaatccagcagacttcattcccatcttacggtatctgcccaatccttctcttaacgcattcaaagacctcaatgagaagttttactcgttcatgcaaaagatggtgaaggaacactacaagaccttcgaaaagggccacatccgggacataaccgactcactcatcgaacactgtcaggagaaacaattagacgagaatgcaaatgtacaactatcagacgagaagataattaacatagttctggatttgttcggcgcaggctttgacacggttaccaccgcaattagttggtccttaatgtatcttgtgatgaatcctcgggtccaacgaaagattcaagaggagctggatactgtgatcggcagaagtagacgaccaaggctcagcgacaggtcccatcttccctatatggaggcttttatattggaaacattcaggcattcatctttcgtgccctttacaattcctcattccaccactcgggatacaagcctaaaaggcttctatattcccaaaggcagatgcgtttttgtgaatcagtggcagatcaaccatgaccaaaagctgtgggtcaatcctagcgagtttctgcccgaacgttttttgacgcccgacggtgccatcgataaagttcttagcgaaaaagttatcatattcggaatgggcaaaaggaagtgtattggcgagacaatcgcacggtgggaggtttttctcttccttgcaatcttgctccagagggtcgagttttctgtgcctcttggtgtcaaggtggacatgacaccaatttatgggttgacaatgaaacacgcctgctgcgagcatttccagatgcagctcaggtcatag

SEQ ID NO: 219825 - DNA, 1539 bp, synthetic construct
  misc_feature 1..1539: note = Description of Artificial Sequence: Synthetic coding sequence
  source 1..1539: mol_type = other DNA
atgcttttccccatcagcatgagcgctaccgagttcctgctggcaagcgtaattttttgtctggtgttctgggttatccgagcttccaggccacaggttcccaagggtctgaagaatccaccagggccatggggatggccactgataggtcacatgcttacactcggcaaaaacccccacctagccctgtcaaggatgtctcagcagtatggagatgttctccagatccgcataggatctacccccgttgtggtgctctccgggttagacacgatccggcaagcccttgtacggcaaggggacgactttaaaggtaggccagatctctatacctttaccttgatctcaaatggacagtctatgagcttctctccggacagtggcccagtatgggcagctaggcgaagactggcccagaatggtctgaagtccttttccatagcttctgatcctgcctcttcaacaagttgctacctggaggaacatgtgtctaaagaggctgaagtgttgataagtactctccaggagttgatggcgggaccaggtcacttcaatccatatagatacgtcgttgtctcggtgactaatgtgatctgtgccatttgcttcgggagacgctatgatcacaaccaccaagaactcctgagtctcgttaatcttaataacaacttcggtgaggtcgtgggctctggaaacccagcggacttcatccccatcctgcgctacctgcctaatcccagcctgaacgccttcaaggacctgaatgagaagttttattcgttcatgcagaaaatggtcaaagagcattacaaaacctttgaaaagggtcacatccgcgacattaccgactcgttaatagagcactgccaggagaaacaattagacgagaatgcaaacgttcagctgtccgacgaaaagatcattaatattgtactggatcttttcggcgctggttttgataccgtcactacagctatatcctggagcctaatgtacctcgtgatgaatcctcgggtccagcggaaaatccaggaggagctcgacaccgtgatcggaaggtcccgccgtccccgtctgtcggacaggtctcatttgccatacatggaggccttcatacttgagacttttaggcactcatcctttgtcccatttactatccctcacagtacaacacgtgatacctctttgaaggggttctatatccctaagggcagatgtgttttcgtgaaccagtggcagatcaaccacgatcaaaagttgtgggtcaacccttcagaatttctgcctgaacgctttctgacgcccgatggcgctatcgacaaagtccttagcgaaaaggtaattattttcgggatgggcaaacgcaagtgcatcggcgagacaatagcaaggtgggaggtgtttttgttccttgcaattcttctccagagagtggagttctcagtccctctgggcgttaaggtagacatgacacctatttatgggcttacgatgaagcatgcttgctgtgagcacttccagatgcagctgcggtcctag

SEQ ID NO: 219826 - DNA, 1452 bp, synthetic construct
  misc_feature 1..1452: note = Description of Artificial Sequence: Synthetic coding sequence
  source 1..1452: mol_type = other DNA
atgttgttccctatatctatgagtgcgaccgagttcctgttagcttcagtgattttctgtctagtgttctgggttatcagggcaagccgtccacaggtgccaaaagggttgaagaaccctccgggaccgtggggctggcctttaatcgggcatatgttaacactcggaaaaaatccacacctggccttgagtcgaatgtcccaacagtacggagatgtgctccagatccggattggtagcacccctgtagtggttctgtccggactcgacacgatcaggcaggcgctcgtgcggcagggagatgattttaagggacgcccagacctctacactttcacccttatctcaaatgggcaatccatgtctttcagcccagatagcggccctgtctgggccgctagacggcgactggctcaaaacggtctgaagtcctttagtatcgctagtgatccagcgtctagtacctcctgttacctcgaggagcacgtgtccaaagaggccgaggtcttaatctccacactgcaggaacttatggccggacccggtcacttcaacccctatcgctacgtcgtagttagcgtgacaaatgttatttgcgctatctgcttcggcaggcgctatgaccataatcatcaggagctgctaagtcttgtaaatttgaataacaactttggagaagtcgtcgggtccggcaaccctgcggatttcatacccatcctcagatacttgcccaatcccagcctgaatgcgttcaaggatctgaacgagaagttctattccttcatgcagaagatggtcaaggaacactacaagacattcgagaaggggcacattagagatatcacggattcacttatagaacactgtcaggagaaacaactggacgaaaatgcaaacgtacagcttagtgatgaaaagattattaatattgtgcttgacctgttcggggctggattcgatacggttacgaccgccatcagttggagtctgatgtacctagtgatgaatcccagagtgcagcggaagatccaggaggagctagacaccgtaataggcaggtcccgtcggccacggctctccgatcgaagccacttaccgtatatggaggcttttattttggagacctttaggcattcatccttcgtgccattcacgataccccacaggaagttgtgggtgaacccctcggaattcctgcctgagagatttcttaccccagacggcgctatcgataaggtcttatctgaaaaggtgatcatctttgggatgggcaagcgcaagtgcattggtgaaaccatcgctcggtgggaggtgtttctcttcttagctatacttctgcaacgggtcgaattctcggtcccgttgggggtaaaggtcgatatgacccctatttatgggctcacaatgaagcacgcatgctgcgagcactttcaaatgcagctgcggtcctag

SEQ ID NO: 219827 - DNA, 1551 bp, synthetic construct
  misc_feature 1..1551: note = Description of Artificial Sequence: Synthetic coding sequence
  source 1..1551: mol_type = other DNA
atggccctgagccagagcgttccattcagcgcaacggagctgctcctggcttcggctattttctgtctggtgttttgggttttgaaaggactgcggcctagagttccaaagggcctcaaaagtcctcctgagccctggggctggcctctgttaggccatgtactgacattgggcaaaaacccccacctagccttgtcccgtatgtctcagaggtacggagatgtgctgcagattagaattggctcgacgccagtgctggtgctgagccgactcgatactatcaggcaggcattggtgaggcagggcgacgattttaaaggcagaccggatctttacacgtccactttaatcaccgacgggcaatcgctcaccttcagcaccgattctggccctgtctgggctgcacgacgcagactggctcaaaacgccctgaacactttttctattgccagcgacccagcttcttcttcttcgtgctaccttgaggagcatgtctccaaggaggcgaaggctctgataagtaggttacaggagttgatggccggacccggtcatttcgacccctacaaccaggtcgtggtgtcggtggctaatgtaataggagccatgtgctttgggcagcattttccagaatcgagcgatgaaatgctatctttggtgaaaaacactcatgagttcgtggagacagcctcctcaggaaacccgctcgatttcttcccgattctgaggtacttaccaaacccggcactacagcgatttaaggcattcaatcagcgcttcctgtggtttctacagaagacagtgcaggagcattatcaagattttgataaaaactccgtcagggatataaccggcgcactcttcaaacattcaaagaaaggtcccagggcctccgggaacttgattccccaggaaaaaatcgtgaatttggtgaacgacattttcggagccggattcgatacagtgacaacggccatatcatggagtctgatgtacctcgtcactaagcctgaaattcaacgcaaaatccaaaaagagttagacaccgtgattgggagagagcgacggcctcggcttagcgatcgccctcagctgccatatctcgaggcatttatcttggagacctttcgtcacagcagtttcttaccattcacaatcccccacagcacaacccgcgacacaacactaaatggattctatatcccaaagaaatgctgtgtgttcgtgaaccagtggcaggtaaaccacgatccggagctttgggaagaccccagcgagtttcgtccagagagatttctgactgctgacggaactgcaatcaacaagcccctgagcgagaaaatgatgctcttcggaatgggcaagagacgttgtattggagaagtacttgctaaatgggagatctttctgttccttgccattctcctgcagcaactcgagttctccgtacctcccggagtcaaagtggatctgaccccaatttacggcctgactatgaagcacgctagatgtgaacatgtccaagcacgactgaggttcagcattaattag

SEQ ID NO: 219828 - DNA, 1512 bp, synthetic construct
  misc_feature 1..1512: note = Description of Artificial Sequence: Synthetic coding sequence
  source 1..1512: mol_type = other DNA
atggccctgcgggcaaaagctgaagtatgcatggccgtcccatggctctctttacaacgcgcacaggccctaggcacaagagcggcacgtgtacctagaacagtactgccttttgaagccatgcccagacgacccggaaaccgatggttacggctcttacagatatggcgtgagcagggttacgaggacttacacctcgaggtgcatcaaacattccaggaacttggacccatctttaggtacgatctcggaggggctggcatggtgtgtgtcatgctgcctgaagatgtggagaaattgcagcaggtagatagcctgcacccacaccggatgtcactggagccatgggtcgcctaccgtcagcaccgcggtcataagtgtggagtgttcctcctgaacggccctgaatggcggtttaaccggctgcgtttaaatcccgaagttctgagtcctaatgccgttcagcgcttccttccgatggtggacgccgtggccagagacttctcccaggctctgaaaaagaaggtcctccagaacgctcgcggatctctgaccctggacgtgcagccgtctatcttccactacaccatagaggcttcaaacctggccttgtttggtgagaggctaggccttgtcgggcattccccttcttcagctagtttgaacttcctccacgccctcgaggtaatgttcaaatccacagtgcagctaatgttcatgccaaggagtttgagcagatggaccagtccgaaggtgtggaaggaacattttgaggcttgggattgtatcttccaatacggcgacaactgcatccagaagatctatcaggaactggcgtttagccgtcctcaacaatatacctccatcgtggcagagttgctgttgaacgctgagctttctcccgacgctattaaggccaactctatggagctgaccgctggcagcgttgacacaaccgtgttcccactgctaatgaccctgttcgaactcgctcgtaaccctaatgttcagcaggctttgagacaggaatccctagccgcagctgcttccatttcagagcaccctcagaaggccacaacagagctgccactactacgggcagctttgaaggagaccttgcgactgtaccctgtgggtctgtttttagagcgcgtcgctagttcagatctggtcctgcagaactatcacattcctgccggaacgctggttagagtatttttgtattctctcggtaggaatcccgctctctttccacggcctgagcggtacaatccccagcggtggctggatattagaggaagcggtaggaatttttaccacgtgccattcggttttgggatgcgacagtgtctcggaagacgcctggctgaggctgaaatgttgctccttttacatcatgtgttaaaacaccttcaggtggagactctgacgcaggaggacatcaaaatggtgtattctttcatactccgtccgtcgatgtttccattgttaacctttcgcgctattaattag

SEQ ID NO: 219829 - DNA, 1314 bp, synthetic construct
  misc_feature 1..1314: note = Description of Artificial Sequence: Synthetic coding sequence
  source 1..1314: mol_type = other DNA
atggccctgcgcgctaaggccgaggtatgtatggcagttccctggttgagcctgcagcgagctcaggccctcgggaccagagccgcacgggtaccgaggaccgtgctgccttttgaggccatgccccgtaggccaggcaatcgatggctgcgattgttgcaaatctggcgcgagcagggttacgaagatttgcacctcgaggtgcaccagacgtttcaggaactgggtccgatttttaggtacgacctaggtggagccggtatggtttgcgtgatgctgcctgaagacgtcgagaaactccagcaggtggactccttgcacccacacaggatgagtctggagccctgggtcgcgtacaggcagcacagaggacacaaatgcggcgtgttcttgctcaatggtcccgagtggcgctttaataggctccggttgaaccctgaagtactctcgccaaacgcggtgcaacggttccttccaatggtcgacgcggtggcccgagacttctcccaggcactcaaaaaaaaggtgcttcagaacgctagggggtcactgactcttgatgtgcaaccctctatcttccactataccatcgaggcctctaacctggccttgttcggggaacgcttgggtctcgtgggccacagccccagctcggcctctttgaactttctgcacgcccttgaggtgatgtttaagagcactgtgcagctgatgtttatgcccaggagtttgtccaggtggaccagccctaaagtgtggaaggagcattttgaagcttgggactgcatcttccaatatggcgataactgtatccagaagatttaccaggagttagccttttcacgcccacaacaatacacctccatcgtcgcggaactgctgctgaacgcagagctctcgccggatgccatcaaagcaaacagcatggaactcaccgcaggatcagttgataccaccgtcttccccctcttgatgacactgtttgagttggccaggaatcccaacgtccaacaggccctgcgccaggaaagtctggccgcagctgcctctatttccgaacacccccaaaaagccacaaccgaattacctctccttagagcagccttaaaagagaccctcagattgtacccagtcggtctcttcttggagcgcgtggcttcctctgatctggtcttgcagaattatcatatccccgctggcgttctcaaacatctccaggtggagaccctgacgcaggaagatattaagatggtgtactcgtttatcctgcggccatctatgtttcctttgctgacatttagagctatcaactag

SEQ ID NO: 219830 - DNA, 1512 bp, synthetic construct
  misc_feature 1..1512: note = Description of Artificial Sequence: Synthetic coding sequence
  source 1..1512: mol_type = other DNA
atggcattgcgcgcaaaggctgaagtgtgcgtagcggcaccctggctctctctgcagcgggctagggctctgggcacaagagccgctcgtgcccctagaacagtgcttcccttcgaggccatgccgcagcaccctgggaacagatggctacggctgctgcagatctggagagagcagggttatgaacacctccacttagagatgcaccagaccttccaggaactgggaccgattttcagatataatctggggggacctcgaatggtctgcgtaatgctgccagaggacgttgagaaactacaacaggtagactcgctccacccgtgcaggatgattttggagccgtgggttgcctaccgacagcaccggggtcataagtgtggcgtctttctcctcaacggcccagagtggagattcaatcggttgagattaaatcctgatgttctaagtcctaaggctgttcagaggtttctaccaatggtggacgcagtggctagggacttcagtcaggcactgaaaaaaaaggttctgcagaacgcccgaggctcactgacactcgatgttcaaccatccatcttccattacactatcgaggcctccaacctggccttgttcggggaacgcctgggcctggtcggacacagtcctagctccgcttccttgaatttcctccacgcactcgaggtcatgtttaagagcactgtgcagcttatgtttatgcctagatccctgtctcgttggattagccctaaggtctggaaggaacatttcgaggcatgggactgcatctttcaatacggagacaactgtatccaaaagatataccaggagctggccttcaatcgcccacagcattacaccggcatcgtggccgaactgcttcttaaagctgaactctctctggaagctatcaaagccaattccatggagcttaccgccggatcagtggatactactgcctttccactcctgatgaccctcttcgagctggctcgcaaccccgacgtgcagcagatattacgccaggagagcctggccgcagccgcatctatcagcgagcatcctcagaaagctactacagagttgcctctgttgagggctgccttaaaggagacgctcagactgtacccagttggcctctttctggaaagggtcgtgagctccgatctcgtactgcaaaattaccacataccagcaggcactctggtccaagtttttctctactcattgggccgtaatgccgctttgtttccgagacctgagcgctataatcctcagagatggttggatattaggggctccgggagaaattttcatcacgtcccgttcggcttcggcatgcggcaatgcttagggagaagactcgcagaagctgagatgttgttgctgctgcaccatgtgttgaagcactttctcgtagagacactcacccaagaggacatcaagatggtgtactcttttatactgcggcctggcacttcccctctgctgactttccgcgcaatcaactag

SEQ ID NO: 219831 - DNA, 1527 bp, synthetic construct
  misc_feature 1..1527: note = Description of Artificial Sequence: Synthetic coding sequence
  source 1..1527: mol_type = other DNA
atgtgggaattggtagcgctgctcttgctgacgcttgcctaccttttctggccaaagcgcaggtgtcctggggctaagtatcccaaatcgctgctgagtctccccctggtgggttccctgcccttcttacctaggcacggacacatgcataacaactttttcaagttacaaaagaaatacggtcctatttacagtgtacgtatggggacgaaaacgaccgtcatcgtggggcaccaccaattagccaaagaggttctgatcaagaaaggcaaggatttctctggtaggccacagatggccactctggatattgcttcaaacaacaggaaagggatcgctttcgccgattcgggcgcacactggcagctgcacaggcgtctagcgatggccaccttcgctttattcaaagacggtgatcagaagctagagaaaatcatatgtcaggagatttcgacactgtgcgatatgttggcgactcacaacggacaaagcattgacatttctttccctgtcttcgttgctgtcaccaacgtcatctcactgatatgttttaatacaagctataagaacggagaccctgaactgaatgtgattcagaattataacgaggggatcatagataatctgtccaaagacagtttggtcgatctggtgccctggctgaagatatttcctaacaaaactctcgaaaagttaaaaagtcacgtgaaaatccgtaacgatcttttaaacaagatccttgagaactataaggaaaaatttagaagcgacagcattaccaacatgttggacacacttatgcaagctaagatgaatagtgacaacgggaacgccggtccggaccaggattccgagctcctgtctgacaatcacattctcacaactatcggggatatctttggcgctggggtggaaaccaccacctctgttgtgaagtggacactcgccttcttgctccataatccgcaggtgaagaaaaaactttatgaggagattgaccagaatgttggttttagcaggacaccaaccatttcagatagaaataggctcctattactggaagccactattagggaggtgctcagactgcggcctgtggccccaatgctcattcctcataaagcaaacgtggacagctcgatcggggagttcgcagtggacaagggaactgaggtcatcattaacctgtgggcgctgcaccacaacgagaaggagtggcatcagccagatcagtttatgcccgaacgattcctcaatcctgccggaacacaactcatatctccatccgtgtcatatctccccttcggcgcaggaccgcgatcctgtataggtgaaatcctggccagacaggaactgttcctcattatggcatggttgctgcagaggttcgatttagaggtaccggacgatggccagctcccttctttggaaggaatccccaaagtcgtgtttctcatcgactcctttaaagtgaagatcaaagtgcgccaggcttggagggaggcccaagcagaagggtctacctag

SEQ ID NO: 219832 - DNA, 1512 bp, synthetic construct
  misc_feature 1..1512: note = Description of Artificial Sequence: Synthetic coding sequence
  source 1..1512: mol_type = other DNA
atggtgctcgagatgctcaaccccatccactacaacattaccagtatcgtacccgaagcaatgcctgccgctaccatgccggttctgcttttgaccgggctttttcttctggtctggaattacgaaggaacctcctctatacccggaccgggttactgcatgggtataggtcctcttatttctcatggtaggttcctgtggatgggtattggatccgcctgcaactattacaacagagtgtatggtgaattcatgagggtgtggataagtggcgaagagaccctgatcatctccaaatcaagttcaatgttccatatcatgaagcacaatcattacagtagtcgatttggcagcaaactcggtctgcaatgcataggtatgcatgaaaagggtatcatcttcaataacaatccagaattatggaagacaacccggccattctttatgaaggctctctccggtcctggactggtgcgcatggtcacagtctgcgctgagagcctgaaaactcacctggatcgcctggaagaggttactaacgaaagtgggtacgtggacgtgctgaccctcctgcggagggttatgctggatacgagcaacacactctttttaaggatcccactggacgagtccgccatcgtcgtgaaaatccagggctactttgacgcatggcaggccctgcttataaaacctgacattttttttaagatcagctggttgtataagaaatacgaaaagtcagtgaaggacttgaaagacgccattgaggtgctcatcgccgagaaacgaagaaggatttcaactgaagaaaagctagaagagtgcatggacttcgccacagaacttattctcgccgagaagagaggggatcttaccagggagaacgtcaatcaatgcattctggagatgctgatcgctgccccagacactatgagcgtctccctgtttttcatgctgtttctcatcgctaaacaccctaatgtggaagaggccataatcaaagagattcaaaccgtgatcggcgagcgggacataaagatcgacgacatccaaaaactgaaagtcatggaaaatttcatctatgagtctatgcgctatcagcccgtggtcgacctcgtgatgcgaaaggctctcgaggacgacgttattgacggctacccagtgaagaaagggacaaatatcatattaaatattggtaggatgcatcggctagagttctttccaaagccaaacgaattcacactggaaaacttcgccaagaatgtcccctaccgctatttccagcccttcgggttcgggcctcggggttgcgcagggaagtatattgcaatggtgatgatgaaggccatcttggttacactcctgcggaggtttcatgtgaagactctgcaaggccagtgcgtggagtctatccagaaaattcacgacctatccctacaccccgacgaaacaaagaatatgctcgagatgatcttcactcccagaaattctgacaggtgtctagagcactag

SEQ ID NO: 219833 - DNA, 1512 bp, synthetic construct
  misc_feature 1..1512: note = Description of Artificial Sequence: Synthetic coding sequence
  source 1..1512: mol_type = other DNA
atggttcttgaaatgctcaaccctatccattacaatatcacaagcatagtgcccgaagccatgccagctgccacaatgccagtgctactactcaccggtctgttccttctggtttggaattacgaaggtacgtcctcaattcccggtcccggatactgtatggggatcgggcctctcatctctcacggtcgcttcctgtggatgggcataggcagcgcctgcaattactataacagagtctacggagagtttatgagagtgtggataagcggggaagagaccttgattatcagtaaatcatccagcatgtttcatataatgaaacataaccactattcaagccggttcgggagtaagctcggtctgcagtgtattgggatgcacgagaagggcattatattcaacaataatccggaactttggaagacaacgcgacctttcttcatgaaggccctgagcggtccaggactggtccgcatggtcacggtgtgtgccgagtccctgaaaacacatttggatcgcctcgaggaagtgacgaatgaaagcgggtacgtggatgtactgaccctccttagacgtgtgatgcttgatactagcaatacactgttcctgcggattcctctggacgagagcgctatcgtggtcaaaatccagggatacttcgacgcttggcaggcgctcctgattaagcctgacatctttttcaagatttcttggttgtacaagaagtatgagaagtcagtgaaggatctcaaagatgctatcgaagtccttattgccgaaaagcgcaggaggattagtactgaagagaagctggaggaatgcatggacttcgccacagagcttatactcgctgaaaaaaggggagatctgaccagggaaaatgtgaaccagtgtatccttgaaatgctcatcgccgcaccagataccatgagcgtgagcttattctttatgctgttcctgatagcaaagcatccgaatgtcgaggaggcgattatcaaggaaatccaaaccgtcatcggagaaagagacatcaagattgatgacattcagaagctgaaggtcatggagaacttcatctatgaatcgatgcggtaccaacccgtcgtcgatctagtgatgcggaaggcacttgaggatgatgtaatcgacggttacccagtgaaaaaaggtacaaacattatactaaatatcgggcgaatgcacaggttggagttctttcctaagcccaatgaattcacacttgaaaactttgcgaagaacgtaccttaccggtactttcagccctttgggtttgggcctcgcggatgcgcaggcaagtacattgcaatggtgatgatgaaggctattctggtcaccctgctgcgaagattccatgtgaagactctgcaggggcaatgtgttgaatctatccagaagatccatgacctgagcctgcaccccgatgaaacgaaaaatatgttggagatgattttcacacctcgtaacagcgacaggtgtctcgaacattag

SEQ ID NO: 219834 - DNA, 1512 bp, synthetic construct
  misc_feature 1..1512: note = Description of Artificial Sequence: Synthetic coding sequence
  source 1..1512: mol_type = other DNA
atggtcctggaaatgctaaaccccatccattataacatcacaagtatagtgccagaggctatgccggctgctacaatgccagtgctcttgctgacgggtctgttcctgttggtttggaactatgagggcacctctagcattcctgggccaggttactgcatggggattggacctttgatctcccacggacgtttcctgtggatgggaattgggtctgcctgcaactactataacagagtgtatggcgaattcatgcgggtgtggatctccggtgaggagaccttaatcatctccaagtcatcgagcatgttccacattatgaagcacaaccactactcctcacggtttggctcaaaactgggcctgcaatgcatcggtatgcatgagaaaggcatcattttcaacaacaaccctgagctgtggaaaacgacacgccctttctttatgaaggccctgagtgggccaggtttggtgcgtatggtgacagtgtgtgcggagtccctgaaaacgcacttagaccgtctggaagaggtgaccaatgagagcggctatgttgacgtcctcacattgctccggcgagtaatgctggatacgtccaatacactgtttctccggatacctttggatgaaagcgcgattgtagtaaagattcaggggtatttcgatgcctggcaagcacttctcattaagcctgatatctttttcaaaataagctggctctataaaaagtatgagaaaagcgtgaaagacctcaaggatgccattgaggtactgattgcagagaaacgcagaagaatttccaccgaggaaaaactagaggagtgcatggacttcgcaaccgagttaatcttggccgagaagcgcggagatttgacgagagaaaatgtaaaccagtgtatccttgagatgctgatcgcagccccagatactatgagtgtgtcactatttttcatgttatttctgatagcgaaacatccaaatgtggaggaagccataattaaggagattcaaaccgtgatcggcgaacgcgacatcaaaatagacgacatccagaagcttaaggtaatggagaactttatatatgagtccatgcggtatcagcctgtggttgacctggtgatgcgtaaggctctcgaggacgacgttatcgatggatacccagtcaagaaaggaaccaacatcattctgaatatcgggagaatgcacaggctcgagttcttcccaaaaccaaacgaatttactctagagaattttgcaaaaaacgtgccatataggtattttcaaccattcggattcggcccacgtggatgtgccggaaaatacattgctatggttatgatgaaagctatcctcgtcacactacttcggcgtttccacgtcaaaactcttcagggccagtgtgtggagtctattcagaaaattcacgatttgagtctccaccctgatgagacaaaaaacatgctggagatgatttttacgcctcgaaattctgatcgctgtctcgaacactag

SEQ ID NO: 219835 - DNA, 501 bp, synthetic construct
  misc_feature 1..501: note = Description of Artificial Sequence: Synthetic coding sequence
  source 1..501: mol_type = other DNA
atggttcttgaaatgctcaaccctattcattataatattaccagtatcgttcctgaagccatgccggcagctactatgcctgttctcttgttgactgggctcttcctcctagtatggaactatgagggcacaagttccataccaggtccaggatactgtatggggattgggcctttaatatcccacggaaggttcctgtggatgggcattgggagtgcttgcaattactataaccgggtgtacggagagttcatgagggtgtggatttcaggcgaggaaaccctaataatctctaagtccagctccatgttccatataatgaagcataaccattattcttccagattcggttcaaagctcggcttgcaatgcatcggtatgcatgaaaaaggcatcattttcaataacaatcccgagctgtggaagactacccgccctttctttatgaaggccttgagtgggcctggcctggtgcggatggttactgtctgtgctgagtag

SEQ ID NO: 219836 - DNA, 657 bp, synthetic construct
  misc_feature 1..657: note = Description of Artificial Sequence: Synthetic coding sequence
  source 1..657: mol_type = other DNA
atggtcctggaaatgctgaatccaattcattacaacattacaagtatagtaccggaggcaatgcccgcagctaccatgccagtccttctgcttactggcctgtttctgctagtgtggaactatgaaggtacatcaagcatcccgggaccaggctactgtatgggcattggacctctcatcagtcacggccgatttctttggatgggtattggctcggcatgtaactactataatagagtgtacggcgaattcatgagggtctggatcagcggcgaggaaacactgatcatcagcaaaagctccagtatgtttcatatcatgaagcataaccattatagctcacgattcggctcaaagcttggactgcaatgtatcgggatgcatgaaaaaggcataatcttcaacaataaccccgagctgtggaagacaactcggccattttttatgaaggccctgtcaggtccaggcctggttcggatggttactgtctgtgcggagtcacttaagacacatttggatcgcttggaagaggtcaccaacgagtctggttatgtcgatgttttaaccctgcttagacgagtgatgctcgatacatctaataccctttttctgcgcataccgttagacggcactgagatcttcaccctcacatcttag

SEQ ID NO: 219837 - DNA, 1080 bp, synthetic construct
  misc_feature 1..1080: note = Description of Artificial Sequence: Synthetic coding sequence
  source 1..1080: mol_type = other DNA
atggtactagagatgctgaatcctatccactataatattacttcaatcgtccccgaagctatgccggcagcaacaatgccagttttgctcctcaccggactcttcctgttagtgtggaactacgaagggacaagttccatcccaggccctgggtactgtatggggattggtcctctgattagtcatggtaggtttctgtggatggggattgggtctgcatgtaactactataacagagtgtacggtgagttcatgcgggtctggatttctggtgaagaaacattgatcatcagtaagtcttcctcaatgttccacatcatgaagcataaccactatagtagccgatttgggagtaagctcgggctgcaatgcatcgggatgcacgaaaagggtattattttcaataataaccctgagttatggaaaactacacggccattttttatgaaagctttaagcggtcctgggctggtgcgcatggtgactgtgtgcgccgagagtctcaagactcacttggacagacttgaggaggttacgaatgaatccggatatgtcgatgtcctcactctgctcaggcgcgttatgctggatacgtcaaatacgctctttctgagaattccgctagacgagtccgcgatcgttgtgaaaatacagggctactttgacgcctggcaagcccttctaatcaagccagatatattcttcaaaatctcctggctgtataagaaatatgagaagagcgtgaaagatctgaaggacgcgattgaggttctgattgccgaaaagcgtagacgcatttccacagaggaaaagctggaagagtgcatggatttcgcaaccgagctgatccttgctgagaaacgaggagaccttacccgggaaaacgtgaaccaatgcatcctggaaatgttaatagccgcaccagacactatgtctgtctctttattctttatgctcttcctgatcgctaagcatcctaacgttgaggaagctatcatcaaagagattcaaaccgtgattggggagagagacataaagatcgatgatattcagaagctgaaaaagcacgacgcaaaatag

SEQ ID NO: 219838 - DNA, 1059 bp, synthetic construct
  misc_feature 1..1059: note = Description of Artificial Sequence: Synthetic coding sequence
  source 1..1059: mol_type = other DNA
atggttctcgaaatgctcaatccaatccattataacatcacaagcatcgtgcctgaggcgatgcccgctgccaccatgcccgtgcttttactgacgggactttttttgctggtgtggaactatgagggaacctcaagtatacctggaccaggttattgtatggggattggtcccctcatcagccacggtagattcctgtggatggggattgggtccgcatgcaactactataacagggtgtatggcgagtttatgagggtgtggatctctggagaggagactttaatcatttcgaaatccagttccatgtttcatatcatgaagcataatcattatagttccagattcggttccaaactggggttgcagtgcataggcatgcatgagaagggcattatttttaataacaatccagaactgtggaagaccactcgaccctttttcatgaaagcactgtccgggcctgggctcgtccggatggtgacagtttgtgctgaatcccttaagacacatttagaccgattagaggaggtcacaaacgagtccggatacgtagatgtgcttaccctcttgcgcagagtgatgctagacactagtaatacacttttcctcaggattccgctcgacgaaagtgctattgtcgttaagatccaggggtacttcgatgcctggcaggccctgctgatcaaaccagatatttttttcaagatctcttggctctataaaaagtacgagaaaagcgtgaaggatctgaaagacgctatcgaggtgctcatcgccgaaaagaggagacggatcagcacagaagaaaaactggaggagtgtatggatttcgcgaccgagctgattttagcggaaaaacgcggtgacctgactagagaaaacgtgaaccagtgtattcttgagatgcttatcgccgcacccgacaccatgagtgtatccctgtttttcatgctattcttaattgccaaacatcctaacgtcgaggaggcaatcatcaaggagatccagacagtgataggagaacgggatatcaagattgatgacatacagaagtag

SEQ ID NO: 219839 - DNA, 729 bp, synthetic construct
  misc_feature 1..729: note = Description of Artificial Sequence: Synthetic coding sequence
  source 1..729: mol_type = other DNA
atggtgctggagatgctgaaccccatacactataatatcacctcgattgtgcctgaggccatgcccgctgccaccatgcctgtgctgctgcttactgggctgtttctgctggtctggaattacgaaggcacctccagcattccaggccctggctactgtatgggcattggccctcttatttcacacggccgattcctgtggatgggtatcggctcagcctgtaattactataacagggtctacggggagttcatgcgggtatggatcagcggggaagagaccttaattatcagtaagagtagctccatgtttcacatcatgaagcacaatcactacagctcccgcttcggcagtaaactcggccttcagtgtatcggaatgcatgaaaaaggtattatctttaacaataatccagagctctggaaaacgaccaggccattctttatgaaggcacttagcgggccaggccttgttcgtatggtcacagtgtgtgccgagtctctcaagacgcatctcgatagactggaagaagtaaccaatgagtctggctacgtggacgtattgacactgctgcgaagagttatgcttgatacctcaaacacactgtttttacgcataccactggacgagtccgccatcgtggtaaagatccagggatacttcgacgcctggcaagccctgttgattaaaccagacatatttttcaagatttcgtggctttacaagtag

SEQ ID NO: 219840 - DNA, 546 bp, synthetic construct
  misc_feature 1..546: note = Description of Artificial Sequence: Synthetic coding sequence
  source 1..546: mol_type = other DNA
atggtgctcgaaatgttaaatccaatacactataacatcacatcaatcgtcccggaagccatgcctgctgcaactatgccggtccttctgctgactggcctcttcctactggtgtggaattacgaaggcacctcttcaatccccggaccgggatactgtatgggtatagggccactgattagtcatggaaggttcttgtggatgggaataggctcggcgtgcaactactataaccgggtgtatggcgaatttatgcgcgtatggatcagtggggaggaaacactgattatctcaaagtcaagcagtatgttccacattatgaaacataaccactacagtagtagattcggatccaaattggggctgcagtgtattggaatgcatgagaagggcatcatttttaacaataaccctgagctttggaaaacaacacgcccatttttcatgaaagctctgtcggggcctggactggtccgaatggtgacagtatgtgccgagagccttaagacgcacctactcctatttacaccagcaagcgttaactag

SEQ ID NO: 219841 - DNA, 657 bp, synthetic construct
  misc_feature 1..657: note = Description of Artificial Sequence: Synthetic coding sequence
  source 1..657: mol_type = other DNA
atggtcttggaaatgctcaaccctatccattacaatataaccagtatagttccagaggccatgcccgcagcaacaatgcctgtgctactgctcacaggcctgttcctgcttgtttggaactacgagggcaccagtagtatccccggtcccggttattgtatggggataggcccactaatatctcacgggaggttcctgtggatggggatcgggtcagcatgcaactactataatcgggtgtatggggaatttatgcgggtgtggatttccggagaagaaactctgataatctcaaagagtagttccatgttccacattatgaagcataatcattactccagcaggttcggatcaaagctgggactgcagtgcattggaatgcatgagaaaggtattatcttcaacaacaaccccgaactgtggaagacgacgcgaccattctttatgaaagccctgtctggcccaggcctcgtccgcatggtcaccgtgtgtgctgaatcgctgaaaactcatttggaccggctggaagaggtgaccaatgagagcgggtatgtcgatgtactgaccctcctgcgacgagtcatgctggatactagcaatacgctgtttttacgtataccgttggatgggaccgagatttttactcttacgagctag

SEQ ID NO: 219842 - DNA, 1059 bp, synthetic construct
  misc_feature 1..1059: note = Description of Artificial Sequence: Synthetic coding sequence
  source 1..1059: mol_type = other DNA
atggtcctcgagatgctaaacccaattcactataatattacaagcattgttccggaggcaatgcctgccgctactatgccagtccttttgctaactggcctgttcctcctcgtctggaattatgaggggactagctccatccccggtcctggctattgcatgggcattggacccctgatttcccatggtcggtttttgtggatgggaatcggcagcgcctgcaattattataatagggtgtacggcgagttcatgcgggtgtggattagtggtgaggagacactaatcatcagtaaatccagctctatgttccatatcatgaaacacaaccactattcaagcagatttggctctaagctggggctgcagtgtattggaatgcatgagaagggcatcatcttcaataacaatcccgagctgtggaaaaccacgagaccattcttcatgaaagcactttccgggcctggattagtgcgaatggtgaccgtgtgcgcggaaagcctaaagacccatctggatcggctagaagaggttacaaatgaatccgggtatgtggacgtcctgactctcctcaggcgagtaatgcttgatacatctaacactctgttcctccgaattcccttagatgaatctgccatcgttgttaaaatccagggatacttcgatgcttggcaagccttgctaataaagccagatatattttttaaaatctcctggctttataaaaagtacgaaaagtccgtgaaggatctgaaggatgctattgaagtgttgatagctgagaagaggcgcaggatcagtacagaagagaaactggaagagtgtatggacttcgctacggaactgatactcgcggaaaagcgaggcgacctaacacgcgagaacgtcaatcagtgcatcttagaaatgctgatcgctgcccctgacacaatgtccgtctcgctgtttttcatgttatttcttatcgcgaaacacccgaatgtggaagaggctatcatcaaggagatccagaccgtgattggcgaacgcgatataaagatagacgacattcagaaatag

SEQ ID NO: 219843 - DNA, 852 bp, synthetic construct
  misc_feature 1..852: note = Description of Artificial Sequence: Synthetic coding sequence
  source 1..852: mol_type = other DNA
atggtgttagaaatgctcaacccgatacactataacataacatctatcgtgcctgaggcaatgcccgcagcaactatgcccgtgctgctcttaaccgggttgtttctcttggtctggaactacgaggggacctcaagcatccccggtccgggatactgcatgggcataggacccctgatcagtcacgggcgtttcctatggatgggaatcgggtccgcctgcaattattacaatcgagtatacggtgagttcatgcgtgtgtggatctctggcgaggagactttgataatttccaaatcatcatcgatgtttcacattatgaaacacaatcattacagctcacgcttcggaagtaagcttggcctccagtgcatcggtatgcacgagaagggtatcatctttaataacaaccccgaactctggaagacgacacgcccattcttcatgaaagctctctctggtccgggtctagtgagaatggtgaccgtatgcgcagagagtctgaagactcatctggaccgacttgaggaggtcacaaatgagtccgggtacgtggacgtgctgactcttctcagaagagtgatgctcgacacatcaaatacgttattcctgaggattccactggacgagtcggctatcgtagtgaaaatccaggggtatttcgatgcctggcaggctctgcttatcaaaccggacatcttctttaagattagctggctttacaagaagtacgagaagtccgtaaaggatctgaaggatgccattgaggtcctgatcgctgagaaaaggcgccgtatctccacggaggaaaagctcgaggagtgtatggatttcgcaacagagctgatttag

SEQ ID NO: 219844 - DNA, 498 bp, synthetic construct
  misc_feature 1..498: note = Description of Artificial Sequence: Synthetic coding sequence
  source 1..498: mol_type = other DNA
atggtgctcgaaatgcttaatcccatccattacaatatcacctcaatcgtgccagaagcaatgccagcagcgaccatgccagttcttttgctgactggactgttcctgttagtatggaattacgagggaacaagctcaatacccggtccagggtactgtatgggcatcggacccctgatttctcacggccgatttctttggatggggattgggagtgcatgcaactactataaccgggtgtatggggaattcatgcgcgtgtggatctcgggggaggagacattgatcattagtaagagcagttccatgtttcatatcatgaaacataaccactacagcagtagattcggctccaagctggggttacaatgcataggaatgcatgagaagggcatcatcttcaacaacaaccctgaactgtggaagacgactaggcccttcttcatgaaggctctctctggtcccggactggtcagaatggtcactgtgtgtgcctag

SEQ ID NO: 219845 - DNA, 1512 bp, synthetic construct
  misc_feature 1..1512: note = Description of Artificial Sequence: Synthetic coding sequence
  source 1..1512: mol_type = other DNA
atggtgttagaaatgctcaatccaatccattacaacattaccagcatcgttcctgaagctatgcccgcagccacaatgcctgttctgctcctgactggcttgtttcttctcgtctggaattatgagggcacttcttcaatcccaggccctggatactgcatggggatcgggccactgattagccacgggcgattcctttggatgggcatcggcagcgcgtgtaattattataatcgcgtctatggggagttcatgcgcgtctggatctccggagaagagaccctcattatctccaaatcctccagcatgtttcacatcatgaaacacaaccattactccagccgattcggctcaaaactgggactgcaatgtattggtatgcacgagaaagggatcattttcaataataatccagagttgtggaagaccaccaggcctttttttatgaaggctctgtctggtcccggactcgttagaatggtcaccgtatgcgccgaatcactcaagacccatctggaccgcctggaggaggtcacaaacgaatccggctacgtagacgtgctcaccctcctccgtcgtgtgatgttagatacgagtaataccctcttcctacgcatcccccttgacgaatctgcgatcgtggttaaaatccagggttactttgacgcctggcaagccctgctcattaaaccagacatcttttttaagatttcttggctttacaaaaagtacgagaaatctgttaaggatctgaaggacgccattgaggtgttgattgccgagaagaggcggaggatctctacagaggagaaactggaggaatgcatggacttcgctacagagcttatcctcgcggagaagagaggggacctgactcgtgagaacgtgaatcaatgtatcctagaaatgttgatcgccgcacctgataccatgtctgtgtcactttttttcatgctgtttctgattgccaaacaccctaacgtggaggaggccatcatcaaagagattcagacggtgattggggagcgagacatcaagatcgacgacatccagaaattgaaggtgatggagaatttcatctacgagagcatgcgctatcaacctgtggtcgacctcgtgatgcggaaggcacttgaggacgacgtgattgatggttatccggtgaaaaagggtactaatattatcctgaatattggccgtatgcaccggctggaatttttccccaagccaaacgagttcactctcgaaaactttgctaaaaacgtgccctaccggtattttcagcccttcggatttggaccaaggggctgtgccggaaagtatatagctatggtgatgatgaaagccatcctggtgaccctgctccgaagatttcatgtcaagacactgcagggccagtgcgtggaatccatccagaaaatccatgatctgagcttacaccccgacgagaccaaaaacatgcttgaaatgatattcacccccaggaatagcgaccgatgtttagaacattag

SEQ ID NO: 219846 - DNA, 519 bp, synthetic construct
  misc_feature 1..519: note = Description of Artificial Sequence: Synthetic coding sequence
  source 1..519: mol_type = other DNA
atggtcctcgagatgctgaaccccatccactacaatatcactagcattgtgccagaggctatgccagcagctaccatgcctgttctgctgttaaccggactgttcctgctggtttggaactacgaggggacgagcagtatccctgggcctggctattgtatgggcatagggcctctgattagccacggcagattcctctggatgggaattggatcggcatgcaattactacaacagggtgtatggcgaatttatgagagtgtggattagcggtgaagagaccctcatcatttcgaagagctcatccatgttccacatcatgaagcacaatcactactcatcacggttcggtagcaagttagggctgcagtgcatcggaatgcacgagaaaggaattattttcaacaataaccccgaactttggaagacaaccagaccttttttcatgaaagctttgagcggacctggcttagttaggatggtgaccgtgtgtgctgaaagcctgaagacccacttgtag

SEQ ID NO: 219847 - DNA, 735 bp, synthetic construct
  misc_feature 1..735: note = Description of Artificial Sequence: Synthetic coding sequence
  source 1..735: mol_type = other DNA
atggtacttgaaatgctgaatccaatccactacaatatcacgtccatcgtgccggaagccatgccagctgctactatgccggtgcttcttctcacgggactattcctcttagtttggaactacgaaggcacttcctcaatccctggtcctgggtattgcatgggtattgggcctctcatttcgcatgggagattcctgtggatgggcattggtagcgcttgcaattactacaaccgggtgtatggcgagtttatgcgcgtatggatttcgggagaagagacactgatcatctctaagtccagctcaatgttccacatcatgaagcataaccactactcctccagatttggttctaaactgggcctgcaatgcatcggaatgcacgagaagggaattatctttaacaataatcctgaactctggaaaacaacacgcccttttttcatgaaagagtccgcaatcgtggtcaagattcagggctattttgatgcctggcaggcactcctaattaaacctgacatcttttttaagatcagttggctgtacaagaagtatgagaaatctgtgaaggaccttaaagacgcgatagaggtcttgatcgcagagaagcgcaggcgcatctccaccgaagaaaaacttgaggagtgtatggatttcgccactgaacttatcctggcagagaagcgtggagacttgacacgtgaaaatgtcaaccagtgcatcctggagatgtag

SEQ ID NO: 219848 - DNA, 1485 bp, synthetic construct
  misc_feature 1..1485: note = Description of Artificial Sequence: Synthetic coding sequence
  source 1..1485: mol_type = other DNA
atgctcgcctcaggcctcctcctggtgacgttactcgcctgtctcactgtgatggtgctcatgtccgtctggcggcagcggaaatcccgcggaaaacttcccccaggacccacccctcttccctttatcggtaactatctacagcttaacactgagcaaatgtataatagcctgatgaaaattagcgagcggtatggtcctgtgtttaccattcacttgggccctcggagggtcgtggtcctatgtggccacgatgccgtaaaggaggcactggtggatcaggctgaggaattttccggtaggggggagcaggcaactttcgactggctgtttaaaggttatggggtggctttcagtaacggcgagagagcaaagcaacttcgaagattctcaattgctaccttgagggggttcggagtcggcaaaaggggcattgaagagcggattcaagaggaggcaggtttcttaatcgacgcactgagagggacccacggtgctaacatagaccccactttctttctctctaggactgtttcaaatgtgataagcagcatcgtgtttggtgaccgctttgactatgaggataaggaattcttgtcacttctgcggatgatgctcggctcgttccagtttacagctacgtcaacaggtcagctctatgagatgttcagcagtgtcatgaagcatctcccaggccctcagcagcaagcctttaaagagctgcagggtctggaagacttcattgcaaaaaaagtggagcataatcagcgaactcttgaccctaactcccccagggattttatagatagctttttgattagaatgcaggaggaagagaaaaatcccaatacagagttttaccttaagaacttagtgatgaccacgctaaacctgttcttcgctggaacggagaccgtctcaaccaccctacggtatgggttcctgcttctaatgaagcacccagaggttgaggcaaaagtgcatgaggagattgaccgcgtgatcggcaagaacagacaaccgaaatttgaggatagagccaagatgccatacactgaagccgtaattcatgaaattcaacggtttggagatatgctgcctatgggactcgcccaccgggtgaacaaggatacaaaatttcgagacttcttcctgcccaaaggtactgaggtgttcccgatgttaggctccgtgctgcgggaccctagatttttctcaaatccaagagattttaatccccagcattttctcgataagaaagggcagttcaagaaaagcgatgctttcgtcccattctccataggcaagcggtattgttttggagagggcctggctcggatggaactgtttctcttttttacgactatcatgcagaacttccgctttaagagtcctcagtctcctaaagacattgacgtctctcccaagcacgtggggttcgcgacgatacccaggaactatactatgtcattcctgccccgttag

SEQ ID NO: 219849 - DNA, 1485 bp, synthetic construct
  misc_feature 1..1485: note = Description of Artificial Sequence: Synthetic coding sequence
  source 1..1485: mol_type = other DNA
atgctggcttctggcatgctgctggttgcattactcgtgtgtctgacagtgatggtgctaatgtctgtctggcagcagcgaaagtcaaagggcaagttaccgccaggacctaccccactaccttttatcggaaactatctgcagctcaacactgaacagatgtacaacagcctgatgaagattagcgaacgctacggcccagtctttactatccaccttggcccaaggagagtggtggtgctgtgcggacacgacgctgttcgtgaagccctggtggaccaagctgaggaattctccggacgtggcgagcaggccaccttcgattgggtgttcaaggggtacggagtggtctttagcaatggcgaacgggctaagcaactacgtcgcttttctattgcaaccttgagagatttcggggtgggaaaacgcggtatcgaggaacggatccaggaggaagcaggttttctcatcgacgccctgagggggacaggcggtgcaaacattgatccaaccttctttctgtcacgaaccgtgagcaacgtcattagcagtatcgtgttcggtgaccggtttgactacaaggacaaagagttcctttcacttcttaggatgatgttagggatttttcaatttacatccacctcaaccggccagttatacgaaatgttctcttcggtgatgaaacatctgccaggaccacagcaacaggcatttcagctccttcaaggcctcgaagacttcatcgccaagaaagttgagcacaatcagagaacccttgacccaaatagcccgcgtgattttatcgactcattcttgatcaggatgcaggaggaagagaagaacccgaacactgagttctacctgaagaatctggtcatgactactctcaacttgtttatcgggggtacggaaaccgtttccactactctgagatacgggttcttgcttctgatgaagcatcctgaagtggaggccaaggtccacgaggaaatagatagggtaataggcaagaaccgccagcctaagttcgaagaccgggctaaaatgccatacatggaggcagtgattcatgagatccaaaggtttggcgatgtgatacctatgagtctagccagacgcgtgaaaaaagacaccaagttcagggatttcttcctgccaaagggaactgaagtgtttcctatgctgggaagcgtgctgagagatccatcttttttctccaacccacaagacttcaatccacagcacttcctgaacgagaaaggccagttcaaaaaatcagatgcctttgtcccattctctatcggcaagcgtaattgtttcggggaagggctagcgaggatggagttgtttctgttctttactaccgtgatgcagaattttagactcaaaagttcacagagtccaaaagacattgatgtgagtccaaaacacgttgggttcgccacgatccccagaaattacactatgtcattcctccccagatag

SEQ ID NO: 219850 - DNA, 1332 bp, synthetic construct
  misc_feature 1..1332: note = Description of Artificial Sequence: Synthetic coding sequence
  source 1..1332: mol_type = other DNA
atgctcgcatccggcctgcttctggtggccttacttgcctgtcttacagttatggtgctaatgtcagtttggcaacagcgcaagtcccggggaaagctgcctcccggtcccacccctctcccctttattgggaactatcttcagttaaatacagagcacatctgtgactcaatcatgaaggtcagtcagggcgtggcattctccaatggagaacgggctaagcagcttctgcgatttgcaattgcaacactgagagatttcggggtgggcaagagaggtatagaggaaaggatccaggaggaaagtgggttccttatcgaagcgatccgctccacacacggagcgaatatcgatccaactttctttctgtcacgaaccgtcagcaatgtaatctcctctattgtgtttggagacagattcgactatgaagataaggagttccttagtctgctgtccatgatgctgggcatatttcagttcacatcaacatctactgggcaactctatgagatgttttcctccgtgatgaaacacctgccaggccctcagcaacaggcattcaaactccttcagggcctggaagattttatcgcgaagaaagtcgagcataaccaacggacactcgaccccaatagtccccaagactttatcgactcgttcctgatccacatgcaggaggaggagaaaaatcccaataccgaattttacctcaaaaacctcatgatgtctacgctgaatttatttatcgccggtacagaaaccgtaagcacaaccctgcggtacggctttctcttgctgatgaagcatccggaggtggaagcaaaggtccacgaagagatcgacagagtaattgggaagaatcgccagccaaagttcgaggatagaaccaagatgccctacatggaagctgtgattcatgaaattcaacgcttcggcgacgtgattcctatgtcactggctcggagagtcaagaaggacactaaatttagagatttcttcctgcccaagggaaccgaagtattccctatgctgggtagcgtcctaagagatccgagttttttctcaaacccacaggatttcaatccgcagcacttccttgacgataaaggacagtttaagaaatctgatgctttcgttccattttccatcggaaagcggaactgctttggtgaaggcttggctagaatggaactctttctgtttttcacaaccgtgatgcagaattttcgcctgaagagctcccagtcccccaaagacatcgatgtatcacctaagcacgtggtctttgccaccattcccaggaactacactatgagctttctgcccagatag

SEQ ID NO: 219851 - DNA, 1485 bp, synthetic construct
  misc_feature 1..1485: note = Description of Artificial Sequence: Synthetic coding sequence
  source 1..1485: mol_type = other DNA
atgctggcctctggtctcctgttggtcgccctgctggcttgtttgacggtgatggtgctgatgtctgtgtggcagcaacggaagtcgcgcggtaagcttccacccggacccacacccctgcctttcatcggtaattacttacagctgaataccgagcacatctgcgactcaattatgaagtttagtgaatgttacggaccagtcttcaccatccatctgggaccgcgtcgcgtagtcgtgttgtgcggccacgacgccgttcgcgaggccctagtcgatcaagccgaagaattttccgggaggggtgaacaggcaacgttcgattgggtgtttaaaggatacggggtggcattcagcaatggggagagggctaaacaactcctgcgcttcgcaattgcaacccttcgggacttcggcgtcggtaaacggggaatcgaagaacgcattcaggaggaatcaggattcctcatagaggctattaggagtacccatggtgccaacatcgacccgacttttttcctttctcgcacagtgagcaacgtgatctcctctattgttttcggggacaggttcgattacgaggacaaggagtttctgagtttactgtcaatgatgttgggtattttccagttcacgagtacttctaccggccagctttatgaaatgttttcatccgtcatgaagcacttgccgggaccacaacagcaggcattcaagctgcttcaggggctggaagattttatcgccaagaaagtcgaacacaatcagagaactctagaccctaacagccctcaggacttcatagattcctttttaattcatatgcaggaggaggagaaaaaccctaacaccgaattctatctcaagaatctcatgatgtccacacttaatctcttcatagctggaaccgaaaccgtgtccaccacacttaggtacggctttctgctacttatgaaacatccagaggttgaggcaaaggtgcatgaagaaattgatcgggtgatcgggaaaaatcgacagccgaaattcgaggatcgcacaaagatgccctatatggaggccgtgatacacgaaattcagcgatttggcgacgtcattcctatgtcccttgcacgacgggtcaaaaaggacacaaagtttagagatttttttctgcccaagggaaccgaagtgtttcctatgctaggttctgtcctgagggacccatcattcttctccaaccctcaggatttcaacccgcagcacttccttgacgataaagggcagtttaaaaaaagcgacgctttcgtgccctttagtatcggcaagcgtaactgtttcggtgaggggctggccagaatggaactgtttctgttttttactacagtaatgcagaatttcaggctgaagtccagtcagtcacccaaagacatcgatgtgagtcccaagcacgtggtcttcgccacgatccctcggaactatacaatgtcctttctacctcgctag

SEQ ID NO: 219852 - DNA, 1476 bp, synthetic construct
  misc_feature 1..1476: note = Description of Artificial Sequence: Synthetic coding sequence
  source 1..1476: mol_type = other DNA
atggagctcagtgttctgctatttctggccctgctgacagggcttctgctgttgttggtacaacgtcacccaaatacacacgatcgactgcctcccggtccccgtcctctgcccttactgggcaatttgttgcagatggatagacggggtctccttaagtccttcctgcgctttcgcgagaagtacggggatgtgttcacagtgcacctgggccctagaccggtggttatgttatgtggtgtggaggcaatccgcgaggccctcgtggacaaagctgaggccttctccggtcggggaaagatcgctatggtggatccgttttttcgaggctacggtgtgatctttgcaaatgggaaccgatggaaggtgcttcgcagattttccgttacaacgatgcgcgactttggcatgggcaagagatccgtggaggagaggattcaggaggaagcacagtgtctgatcgaagaattgaggaagagtaaaggagcattgatggaccctactttcttattccagagcattaccgctaatattatctgcagtatcgtgttcggcaaacggttccactatcaggatcaagagttcttaaaaatgctgaatttattctaccagacattcagtctgataagcagcgtgttcggtcagctgtttgagctcttctcagggttcctaaagtattttcctggtgcacataggcaggtatacaaaaatctgcaggagatcaacgcatacatcgggcatagtgttgagaaacacagagagacactagacccgtccgccccaaaggaccttatcgacacctatttactacacatggaaaaggagaagtctaatgcccattccgaatttagccaccagaacctcaatcttaacacactttccctatttttcgcaggcacagaaacaacctcaactacactgaggtatggattcctcctgatgttgaagtatccacacgtggcagagagggtctaccgggagattgaacaggtcataggtccacacaggccgcctgagctccacgaccgcgctaaaatgccatacaccgaagccgtcatctacgagatacagagattttctgacctgctgccgatgggcgtgcctcacattgtcacacagcataccagcttccggggatatataattcctaaggataccgaggtctttctgattctgagcaccgctcttcatgatccccactacttcgaaaagccagatgcatttaatccggaccattttcttgacgcaaatggagccctgaagaagaccgaggccttcataccattctctctgggcaaacgcatatgccttggggaggggatcgctcgcgctgaattgttcctgtttttcacaaccattctgcagaacttttccatggctagcccggttgcaccagaagatatcgatctcactccacaggagtgtggtgtcggtaagattcctccgacatatcagattagattcctgcctcggtag

SEQ ID NO: 219853 - DNA, 876 bp, synthetic construct
  misc_feature 1..876: note = Description of Artificial Sequence: Synthetic coding sequence
  source 1..876: mol_type = other DNA
atgagatgtatgcttaccaattcccacccttggtgcggttgcgactggcagttcagagaaaagtacggcgacgtttttacagtgcacctgggtcctcgtccagtggtcatgttgtgtggcgtggaggctatacgagaagcgctggtggacaaggctgaggccttctctggtcgcggaaagatcgcaatggtcgacccctttttccgcggatatggcgttatctttgccaatgggaaccggtggaaagtgctccgcaggttttcagtgaccaccatgagagattttggtatggggaaacggagcgtggaagagcgaatccaggaggaagctcagtgcctcattgaagaacttaggaagagcaaggaacgcgtgtacagagagattgaacaggtgatcgggccacatcggcctccagagctgcacgaccgtgctaagatgccctataccgaagccgtgatttacgagatacagcgatttagcgatcttctgcccatgggggtgccacatatagtcacacagcacacttcttttcggggatatatcatccctaaagacactgaggtgttcttgatactttctactgccctgcatgacccacactattttgagaagcccgacgcctttaacccagatcactttctggatgccaatggagctttgaaaaaaactgaagcattcatcccattttcgcttggcaaaagaatttgcctgggcgaaggcattgctagggcggagctgttcctgtttttcaccacaatcctgcagaatttctccatggcaagccccgttgctccagaggacattgatctgacgccgcaggagtgcggagtaggcaaaattcctccaacataccagattcgtttcttacctagatag

SEQ ID NO: 219854 - DNA, 1473 bp, synthetic construct
  misc_feature 1..1473: note = Description of Artificial Sequence: Synthetic coding sequence
  source 1..1473: mol_type = other DNA
atggatccgtttgtagttctggtattgtgcctgtcctgcctcctgctcctgagcatttggcgccaaagctccggtcggggtaagctgcccccaggcccaactcccttgccagtgattggtaatattctgcagattgatattaaggatgtaagcaagtctttgaccaacctctcaaagatatacggtcccgttttcacgctctattttggcctagaacgcatggttgtccttcatggatacgaggtggtcaaagaggctctgatcgatttgggcgaggaattttccgggcgtggtcactttccattagcagagcgcgctaaccgcggtttcggtatcgtattctcaaacggcaagcggtggaaggaaattcgtcgtttctctctgatgactctgcggaattttggaatgggcaagaggagcatagaggaccgggtgcaagaggaggcgaggtgtctggtggaggaacttcggaaaaccaaagcctcaccttgcgacccgacctttatcttagggtgtgccccatgtaacgtgatctgtagcattatctttcaaaaacggttcgattataaagaccagcagtttctaaatttaatggagaagctgaatgagaatataaggatcgtttccaccccatggattcaaatctgtaacaattttccaactattatcgactacttccctggcacacataataagctactgaaaaatctggctttcatggaaagcgatatactggaaaaggtgaaagagcaccaggagagcatggacatcaacaacccgagagattttattgattgtttcctgatcaagatggaaaaagagaaacagaatcagcaatctgaattcactattgaaaacctggttattacagcagcagacttgctgggtgcaggaactgaaacaacttctacgaccctgaggtatgccctattgctgctcctgaaacaccctgaggtcacggccaaggtgcaggaagaaatagaaagggttgttggacgcaacagatcaccctgcatgcaagatcgaggccacatgccttacactgatgccgtggtacacgaggtacagcggtatatagaccttatccctacctcccttccccatgcagtaacgtgcgacgtgaagtttaggaactacttgatccctaagggcaccacaatattaacctccttgacgtccgtgctgcacgacaataaagaattcccaaaccccgagatgttcgaccctaggcactttttagacgagggcggaaatttcaagaagtccaattacttcatgccatttagtgctggcaaacgcatttgcgtgggggaaggcttagctcgtatggaactgtttctgtttctgacattcatcctgcagaactttaatcttaagtctttgatcgaccccaaagaccttgacaccacgccagtggttaacgggttcgcttccgtgccccctttttaccaactgtgtttcattcccgtatag

SEQ ID NO: 219855 - DNA, 1473 bp, synthetic construct
  misc_feature 1..1473: note = Description of Artificial Sequence: Synthetic coding sequence
  source 1..1473: mol_type = other DNA
atggagccattcgtggtcctggtactgtgtctgtcatttatgttattattttctctctggaggcagtcatgccgacggaggaagctgcctcctggaccaacgccactgcctatcatcggaaacatgttgcagatcgacgtgaaggacatatgtaagtcatttacgaacttttctaaagtctacggcccagtgttcacagtctatttcggcatgaatcctatagtcgtgtttcatgggtatgaggccgtgaaggaggccttgattgataatggtgaagaattttctggcagaggtaacagcccgatcagtcagaggatcaccaaggggctggggatcatctcaagcaacgggaaaagatggaaagaaatcaggaggttctcgctgaccactctccgaaacttcggcatgggtaagcgatccatcgaggaccgggtccaggaggaagctcattgcttggtggaggagcttcgcaaaacaaaggccagtccgtgcgaccccacatttattttgggctgcgccccatgtaatgtgatttgtagtgtggttttccaaaaacggttcgattacaaggaccagaattttttgactctgatgaaacgattcaatgagaactttcgcattctcaactcaccctggatccaagtgtgcaataattttcctcttctgatagactgtttccccggaactcataacaaggtcctgaagaacgtggctctgacccggtcttacattcgcgaaaaggtgaaagaacaccaggcctccctggacgtcaataatccgagagactttatcgattgtttcttgattaaaatggaacaagagaaagataaccagaagtccgagtttaatattgagaatcttgtgggcacagtggccgatctcttcgttgccggtacagaaactacctcgacaactttgcgatacgggttgcttcttctcctcaagcatcccgaggtaactgctaaagtgcaggaggaaatcgaccacgtgatcggccgacaccgctccccatgcatgcaggaccgaagtcatatgccctacaccgatgcagtggtacatgaaattcagcggtactccgatctagtgccaactggagtgccgcatgctgtcacaacagacacaaagtttcgaaactaccttatcccaaaggggactactatcatggcactgcttacctctgtgttgcatgatgataaagagtttcccaaccctaacatctttgaccccggacactttctcgacaagaacgggaatttcaagaagtctgattattttatgcccttctcggccggaaagcggatttgtgctggcgaaggattggcgcgtatggaactttttctatttttaacgactatactccagaacttcaacctcaaaagcgtggacgatcttaagaacttaaataccacagccgtgactaaggggatcgtgagtctgcccccttcttaccagatctgttttattccggtgtag

SEQ ID NO: 219856 - DNA, 1374 bp, synthetic construct
  misc_feature 1..1374: note = Description of Artificial Sequence: Synthetic coding sequence
  source 1..1374: mol_type = other DNA
atggagcgttccttcctggaagaagcaattcctcagtatttaaaagagctcctcaaagatctcgtgggtgcccatattagcgtgtccgcccttgtcactggggtgcgcggaatggaaaaccgcgctctcaagagcttcagcgctgaactcagcctatccgcctggctgccgagcgtggccgcacttagttctttagcggtaaactccccatccttctgtccgttcttcctcggtattatcagctccaatggcaagaggtggaaagagatacggaggttcagtctgaccaccctcaggaatttcggaatgggcaagcgctccattgaggaccgcgtgcaggaggaagctcactgtttggtggaagagctgagaaagaccaaggccagcccatgtgacccaacttttatattggggtgcgcaccctgcaacgttatctgctcagttgttttccagaaacgcttcgactataaagatcagaactttttaaccctcatgaaaaggttcaatgagaactttaggatcctcaatagtccttggattcaagtctgcaacaattttccccttttaatcgactgtttccctggcacccacaataaagtgctcaaaaacgttgctttgactaggagctatattagggaaaaagttaaagaacaccaagcctctctggacgtaaacaaccctagagatttcatcgactgtttcctgatcaagatggagcaggaaaaggataatcaaaaaagcgagttcaacattgaaaatctggtgggcaccgtggccgatttgtttgtggcgggtacagaaacaactagtacaaccctgagatatggactgctgttgttgctcaagcatcctgaagtgactgccaaggtgcaggaagagatcgatcatgtgattgggagacatcggagtccctgtatgcaggataggtctcacatgccctacaccgacgcagtcgtgcatgaaattcagaggtactcggatttggtgcctactggagtgccccatgctgtgactaccgataccaaatttagaaactatctaattccgaagggaactactatcatggctttgctgacaagtgtgctccatgatgataaagaattcccaaaccccaatatctttgaccctgggcactttctggataagaacgggaacttcaagaagtctgactatttcatgccgttctccgccggtaagaggatttgtgcaggcgaaggactggcaaggatggagctgttcctgtttctgacgacaatcctgcagaacttcaacttaaagtccgtggatgatctgaaaaatcttaacacgaccgctgttacaaaagggatcgtctccctccctcccagctatcagatctgtttcatccctgtgtag

SEQ ID NO: 219857 - DNA, 1167 bp, synthetic construct
  misc_feature 1..1167: note = Description of Artificial Sequence: Synthetic coding sequence
  source 1..1167: mol_type = other DNA
atgttcttgcagccgatcgccaaggggataatctcatcgaatgggaaaaggtggaaagagataaggaggttctctctaaccaccttgagaaactttggaatggggaagcgctctatcgaagatcgtgttcaggaggaagcccattgtctggttgaggagttacggaagaccaaagcttccccttgtgaccccacattcatcctcggctgtgccccatgcaacgtgatttgcagcgtggtgttccaaaaacgtttcgattataaggaccaaaacttcctgacattaatgaaacggttcaacgaaaacttcaggattctcaactcaccatggatccaggtatgtaataacttccccttgctcatagattgtttccctggaactcacaataaagttctgaagaatgtggccctgacaagaagttacatcagagagaaagtgaaagaacaccaggcatctttggacgtgaataaccccagagacttcattgactgctttttaattaagatggagcaggaaaaagacaaccaaaagtctgagttcaatatcgagaatctggtgggtactgtcgcagacctgttcgtagctggcaccgagacaacctccacaacgctacgatacgggttactgctgctgctgaaacacccagaggttactgcaaaagtccaggaggagatcgaccatgtgatagggaggcaccgatccccttgcatgcaggaccgttcacacatgccctacacagatgctgtcgtacatgaaattcagagatacagcgacctggtgcccacaggagtgcctcacgctgtgacaaccgatactaagttcagaaattacctgatccccaaaggaaccactattatggccctgctcacttctgtcctccatgatgacaaggaatttccaaaccccaatatcttcgatccgggacatttcttagataaaaacggaaatttcaaaaagtccgactacttcatgcccttttccgccggaaagaggatctgtgccggtgaaggtcttgccagaatggagttgtttcttttccttactacgattctccagaatttcaacctgaagagcgtcgatgacctgaaaaatctgaacaccaccgctgtgacaaaaggcatagtgagcctgcctccaagctatcagatttgttttattcctgtgtag

SEQ ID NO: 219858 - DNA, 924 bp, synthetic construct
  misc_feature 1..924: note = Description of Artificial Sequence: Synthetic coding sequence
  source 1..924: mol_type = other DNA
atggccgcaaaatgctgcagcaccttcttcttaggttgtgaattcagtcagttcctgcctctttttctccttggaatcatcagctccaatggcaagagatggaaagagattcgacggttcagcctcacgacactccggaattttggcatgggaaagagatccatcgaagacagagtgcaggaggaagctcactgtctggttgaagagctccggaagacaaaggcaagtccttgcgatccaaccttcatcctggggtgcgccccatgtaatgtgatctgctcagtcgtttttcagaagcggtttgattacaaggaccagaatttccttaccttgatgaagcggtttaacgagaactttcggattctcaacagcccatggattcaggtgtgcaacaattttcctctgttaatcgattgcttccctggcacacataacaaggtcctgaaaaacgtggcactgacccggtcctacattcgtgagaaggtgaaagagcaccaggcctcactggacgtgaacaaccccagagacttcattgattgctttctgattaagatggagcaggagaaggacaatcagaaaagcgaattcaacatcgagaacctggtcggaaccgtggccgacctgttcgttgccggtaccgaaaccacttctacgaccctgaggtacggactgctcctgctgctgaagcatcctgaggtcacagctaaggtccaggaggaaatcgatcatgtgatcggtagacatcggtctccgtgcatgcaggatcgttcccatatgccctatacggacgctgtcgtgcatgaaattcaacgttactccgacctggtgcctacaggggtgccacatgcggtgaccacggacaccaaatttagaaattatttaatacccaaatcttttgacaataagattatgttggccgcatag

SEQ ID NO: 219859 - DNA, 1473 bp, synthetic construct
  misc_feature 1..1473: note = Description of Artificial Sequence: Synthetic coding sequence
  source 1..1473: mol_type = other DNA
atggatagcctggtggtactggtcctgtgtctgtcttgccttctccttttgagtctgtggagacagagctcaggccgaggcaagctgcccccaggtccaacacctctacctgtgattggcaatatcctgcaaatcggaattaaggacatttctaaatctctaacaaacctaagtaaggtgtatggaccagtgtttacactttacttcggactgaagccgatagtggttctccacggttatgaagctgtgaaagaggcgctcatcgatctgggagaagaatttagtgggcgaggcatcttcccacttgccgaacgtgccaaccgcggatttgggatcgtgttttccaatgggaagaaatggaaagaaattagacgattttccttaatgaccctccggaactttggaatgggcaagcgcagcatcgaggacagagtacaggaagaggccagatgcctcgtcgaggagctgaggaaaactaaggcaagcccttgcgaccccacattcatcctgggctgcgccccatgcaatgtgatctgctcaatcatctttcataagaggttcgactacaaggatcagcagtttctgaacctgatggagaagctcaacgaaaatatcaaaatcctctccagcccttggatacagatctgtaataattttagccctatcattgactatttccccggaacgcataacaaactattgaagaacgtggcatttatgaagagctatattttggagaaggttaaggaacatcaggagtctatggacatgaacaatccccaggattttattgactgcttcttaatgaagatggaaaaagagaaacacaaccagccaagcgagtttacaatagagtctctagagaatacggcagtcgacttattcggggcaggaaccgaaaccactagcacgaccctgagatacgccttactgttattactgaagcatcctgaagtgacagcaaaagtccaggaagaaatagagcgggtcatcggaagaaatcgctccccatgtatgcaggatcgaagccacatgccctacacagatgccgtggtccacgaggtgcagaggtatattgacctcttgcctaccagcctcccccatgctgtcacctgtgacataaagttccgaaactacctgatacccaagggcacaaccatcctgatctcactgacgtcagtcctgcatgataataaggagttcccaaatcctgagatgtttgacccccaccatttcctggatgaaggaggcaatttcaagaaatcgaaatacttcatgcccttcagcgcgggtaagaggatatgtgtgggcgaagctctcgccggtatggaactctttttgttcctcacatccatactgcagaacttcaacctcaaaagtctcgttgatccgaaaaatctggacactacccccgtggtcaatggcttcgcctccgtgccccctttttaccagttgtgtttcatcccagtgtag

SEQ ID NO: 219860 - DNA, 1362 bp, synthetic construct
  misc_feature 1..1362: note = Description of Artificial Sequence: Synthetic coding sequence
  source 1..1362: mol_type = other DNA
atggactcactcgtggttctcgtgttgtgcctatcctgcctgctcctgctcagcctctggcgacagtcaagcggcagaggtaagttacctcccggtccgactccattgcctgtgatcggaaatatcctgcagattggaattaaggatattagtaagtctcttacgaatttatcgaaggtgtacggcccagtctttaccctgtattttggcctgaaaccaattgtggtactacacggctacgaggcagtcaaggaggctctcattgacctgggcgaagaattctcaggaagggggatattccccttagctgaacgggcaaaccgcggattcgggatcgtgttcagcaatggcaagaagtggaaagagatccggaggttctcccttatgactttgagaaacttcggcatggggaagcgctccattgaagaccgagtgcaggaagaagctcgctgtctggtcgaggagcttaggaaaaccaaggcaagtccttgtgatcctacttttatcctgggctgtgcgccttgcaatgtaatttgttccattatttttcacaagaggtttgattataaggatcagcagtttctgaatcttatggaaaagctgaacgagaacatcaagatcctttcatcgccctggattcagatctgcaacaacttttcacctataatagattatttccctgggacccacaataaattgctgaagaatgtcgcattcatgaagtcttacatcctggagaaagtaaaagagcatcaggagagcatggatatgaataatccacaggatttcatcgattgttttctgatgaaaatggagaaggagaaacacaatcagccttctgaattcactattgaaagcctggaaaatacagctgtggacctgttcggggcaggaactgaaactaccagcaccacgctgcggtatgccctgctgctgctgctgaaacatcctgaagttaccgccaaagtccaggaagaaatcgagagagtgattggtaggaacaggagtccctgtatgcaggaccgaagccacatgccctataccgatgccgtggtccacgaagtgcagaggtacatcgaccttctgccaacatccctgccacatgcagtaacctgcgacatcaagtttaggaattacttaataccaaagggtaccacaatactgattagtctgacatccgtactgcatgacaacaaggagttccctaatcccgaaatgtttgacccgcaccattttttggatgagggcggtaacttcaaaaagtccaagtacttcatgctggtgctgaagatgatcaggacagagcggaccaaaaggaaaagggtcggcaaactgttttgggtatccgtgagagtaacatag

SEQ ID NO: 219861 - DNA, 1341 bp, synthetic construct
  misc_feature 1..1341: note = Description of Artificial Sequence: Synthetic coding sequence
  source 1..1341: mol_type = other DNA
atgggtttggaggctttagtacctttagctgtgattgtggcaatttttctactgctagtggacctgatgcatcgacggcagcgatgggcggctaggtacccaccaggccctctgcctcttcctggcctcggcaatctactacacgtcgatttccagaataccccctactgttttgaccagctccgaagaagattcggcgacgtattctctctgcagctcgcctggactcccgtggttgtgttaaacggacttgccgcagtgcgagaggcgcttgtcacacatggcgaggatacagcagatcggcctcccgtgccaatcactcagatccttggattcggacctaggagccagggcagaccctttcgtcctaatgggctgctagacaaggctgtgagtaacgtgattgcctcactaacctgtggacgtcggtttgaatacgacgatcctcgcttcctgcgtcttctggacctggcacaggaagggttgaaagaagagtcagggttcctgcgcgaagttctcaatgcagtgcctgtgctcctgcacatcccagcgctggcgggaaaagtgctgcgattccagaaagccttcctgacccagctggacgaactactgacagagcacaggatgacgtgggatccagcccagcctcctagggacctgacggaagcctttctggctgagatggagaaggctaagggaaatcccgaatcatcctttaatgatgagaatctctgtatagtggtagccgatctcttttcagctggcatggtcaccacgtccaccaccctggcgtggggactgttgctgatgatcctccatccggatgtacaaagacgcgtgcagcaagagatcgatgatgtcattggtcaggttaggcggcctgagatgggcgaccaggctcacatgccttatacaaccgctgtgatccatgaagtacagcggttcggagatattgtgccactgggagtcacacacatgacatcccgtgacatcgaagtgcaagggtttagaatcccgaagggcacgaccttgatcaccaatctctcatcagtgcttaaggacgaggcagtgtgggaaaagccttttcgattccacccggaacatttcctcgacgcacagggtcacttcgtgaaaccagaggctttcctgcctttttcggccggaaggcgcgcatgcctcggcgaaccactggccaggatggagctcttcctatttttcacctcactattgcagcatttttcgttctctgtgcctacaggtcagccccgtccttcgcaccacggggtgttcgccttcttggttaccccaagtccctatgaactctgtgccgttcccagatag

SEQ ID NO: 219862 - DNA, 1494 bp, synthetic construct
  misc_feature 1..1494: note = Description of Artificial Sequence: Synthetic coding sequence
  source 1..1494: mol_type = other DNA
atgggactggaggccctggtacccctggcagttatcgtcgccatttttttattactagtcgatctgatgcacagacggcagcgatgggccgctcgttacccacctggccctctccctctgcctggtctaggcaacctactgcacgtggatttccaaaataccccatattgttttgaccagctgagaagaaggtttggagatgtgtttagcctgcaattggcctggacaccagttgtcgtgcttaacgggctggccgcagtaagggaagcactagtcacccatggtgaagataccgccgatagacccccagttccaattacccagatattgggctttggccctcggagtcaaggagtgttcctggctcggtatggccctgcttggcgcgaacaacgccgtttttccgtgtcaactttacggaatctagggttgggcaaaaagtcactggagcagtgggtcacggaagaagccgcatgtctgtgtgctgccttcgcaaaccacagtggcagacctttccgcccaaatggcctgctggacaaagccgtgtcgaacgtaattgctagtcttacctgcgggagaaggttcgaatacgacgaccccaggtttctcagactgttagatctcgcacaggaaggcttgaaagaagaatctgggttcctcagggaggtacttaacgctgtccccgtcttgctgcacatcccagcactggcgggaaaagtccttcgctttcaaaaggcttttctaacacaattggatgagttgttaacagagcaccggatgacttgggacccagcccagccaccacgggaccttaccgaagcatttctcgcagaaatggagaaggcaaaaggaaatccagaatcaagtttcaacgatgagaatttgtgcatcgtggtagctgatttgttcagcgcgggaatggttaccacctctacaactctggcgtgggggctgctgctcatgatcctacaccccgacgtccagagacgagtacagcaggaaatcgacgatgttattgggcaggttcgtcgcccagagatgggggatcaggcacatatgccctacacgacagcagtgatacatgaagtccaacgcttcggggatattgtaccactgggcgtgacgcatatgacttccagggatattgaggttcagggtttccgtattcctaagggtaccaccctgataactaacctcagtagtgtgctgaaggatgaggctgtgtgggaaaaaccgttccgtttccacccagagcattttctcgatgcgcagggccacttcgtgaagccagaggctttcctccctttcagcgctggaagaagagcttgtttgggtgaaccactggcccgaatggaacttttcctttttttcacgtctcttctgcagcacttttcattctccgtgcccacaggacagcccaggccctcccaccacggtgtgttcgcttttctggtcacaccctccccctatgaactctgtgcagtgccccgatag

SEQ ID NO: 219863 - DNA, 1494 bp, synthetic construct
  misc_feature 1..1494: note = Description of Artificial Sequence: Synthetic coding sequence
  source 1..1494: mol_type = other DNA
atgggcctggaggccttggttccactggccgttattgtggcaatcttcctccttctcgtagatcttatgcacagaaggcagagatgggcagccagatacccaccaggaccattgcccttacccggtcttggaaacctcctccatgtagatttccagaatacgccctactgctttgaccagctgcggcgacgttttggtgacgtgttcagtctccaactggcatggacacccgtggtggtgttgaacggtttagccgcagtgagggaggccctggtgacacacggagaggatacagccgataggccacccgtgcctattacgcaaattctggggtttggaccccgagggcagggcgtgttcctcgctcgctatggcccagcttggcgggagcagcggaggttttcggtgagcacccttagaaatctgggtctgggaaaaaagtctctagagcagtgggtgaccgaggaagcggcatgcctgtgtgctgctttcgctaaccatagtggcagaccgtttaggccaaacgggctgttggacaaggcagttagtaatgtgatagcatctctaacctgcggtagaagattcgagtatgatgatcctcgctttcttagactattagacttggcccaggaaggcttaaaagaggaatctgggtttctgcgggaggtgctgaacgccgtcccagttcttctccacatacccgcactagcagggaaggtgctgcggtttcagaaggcctttctgacacagctggacgaactgctgacagagcaccgcatgacgtgggaccctgcacagccaccgcgtgatctgacagaagctttcttagccgagatggagaaggccaagggaaaccccgagtcttccttcaacgacgagaacctgtgtattgtggtagctgatttattcagcgcgggaatggttaccacgtctaccacgctcgcgtgggggctgcttctgatgattctccatcccgacgtgcaacgaagagtgcagcaggagatcgacgacgtgattggtcaggtgcgcagacctgagatgggggatcaggctcacatgccatacaccaccgcagtgatccatgaagtacagaggttcggcgacattgtaccactaggcgtcacacatatgacctcgcgggatatagaggtccagggattccgtatacctaaagggacaaccttgattaccaacctgagcagcgtgcttaaggatgaggcagtttgggagaagcccttcaggttccatccggagcatttcctggatgctcagggccatttcgtgaaacccgaggccttcttgccattctcagctggcaggcgggcttgcctgggggagccactcgctaggatggagttgttcctgttttttacatctctgttacagcatttctccttcagcgtccccactggacaaccgcgacccagccatcacggagtgtttgcctttttagtcaccccctcaccatacgagttgtgtgctgtccccaggtag

SEQ ID NO: 219864 - DNA, 1332 bp, synthetic construct
  misc_feature 1..1332: note = Description of Artificial Sequence: Synthetic coding sequence
  source 1..1332: mol_type = other DNA
caggaggccctgacacttccactgcaattaaggcgccgttttggggacgtattttctctgcaactggcctggacccctgtagtggtcctgaacggccttgcagccgtgcgggaagcactagtgacacatggtgaagacacagccgatagaccacctgtgccaatcacccagattctggggttcggccctcgcggacagggcgtattcctcgcccgatacggccctgcttggagagagcagcgcaggtttagcgttagtacactgcggaacctaggcctcgggaagaagtccctcgagcaatgggtaacagaggaggcagcttgcctatgcgcggctttcgccaatcacgatgccccatttgcgccaactgtgagctggacgaaacctaatgtgattgcctctttgacttgtggcagaagattcgagtatgatgacccaagattcctgaggttgctcgacttagctcaggaagggctgaaagaggaaagtggttttctcagagaagttttaaacgccgtccccgtcctgctgcacattccggcactagctggtaaggttctgcgtttccagaaagcattcctaactcagctggatgagctgctcacagaacaccgcatgacctgggaccctgcacaaccccctagagacttaactgaggcttttctggccgagatggagaaggctaaaggaaatcccgaatcaagcttcaatgacgaaaacctctgcattgtggttgcggacctcttttcagcagggatggtcaccacaagcacaacactggcctggggtctccttctgatgatattgcatcctgatgtacaacgcagagtgcagcaggagattgacgacgtaatagggcaggtcagacgacctgagatgggtgatcaggcccatatgccgtacacaaccgccgtgattcacgaggtgcaacgctttggcgacattgtgcctctgggagtgactcatatgacctcaagggacatagaagtccagggatttcgcatccctaaggggacaacattgattacgaaccttagtagcgtccttaaggacgaagcggtttgggaaaaaccattcagattccatcctgaacactttctggacgcacaaggccacttcgtgaagcccgaggcttttttgccattttcagctgggaggcgggcatgtctgggcgagcctctggcacgcatggaactttttctgtttttcacttctctgctccaacatttcagcttcagcgttcctaccggtcagccaagaccatcccatcacggcgtctttgcttttttagtgacccccagtccttatgagctgtgcgccgtcccaagatag

SEQ ID NO: 219865 - DNA, 1341 bp, synthetic construct
  misc_feature 1..1341: note = Description of Artificial Sequence: Synthetic coding sequence
  source 1..1341: mol_type = other DNA
atgggtttggaagctctcgttcccttagccatgatcgtagccattttcttgctgctggtagatttaatgcatcggaggcagagatgggcagctcgctatcctccaggccctttgccactccccggactggggaacctactgcacgtggacttccaaaatacgccctactgtttcgaccagctgagaagacgtttcggggacgtctttagtctgcagctcgcttggacaccagtcgtcgtactgaatggcttggcagccgtgagagaggctctggtgacccacggcgaggataccgcagacagaccccctgtgcctattacccaaattctcggctttggtcctcggagtcagggtaggccttttcgaccaaacgggctactcgacaaggccgtctctaatgtgattgccagtctgacttgtggacgaaggttcgaatacgatgatcccagattcctgcgcttgctcgacctggcacaggaaggcctgaaggaggagtccggatttcttagagaggttttgaatgcagtcccagtgctgcttcatatccccgcactcgctggaaaggtccttaggttccagaaggctttcttgacccagcttgatgaactgctcacagaacatcggatgacctgggacccagcccagccacctcgcgatctcaccgaagcttttctggcggagatggagaaggctaagggaaacccggagtccagtttcaatgacgaaaatttgtgcatcgtagtggcggacctgttctccgccggaatggtaacaacctctacgaccctggcttgggggcttctgcttatgatactccaccctgatgtccagcgcagagtgcagcaagagatagacgacgtcatcggacaggttagaaggcccgaaatgggggaccaggcccacatgccgtataccactgccgttatccatgaggtccagcggttcggagacattgtacctctgggggttacccacatgacatcaagggatatagaggtacaggggtttcgcatcccaaaggggacaaccctgattaccaatctgtcaagcgttctcaaggacgaagctgtgtgggagaagcctttccgattccaccccgaacactttctggatgcgcaaggacacttcgtgaaacccgaagcctttcttcctttctctgcgggacggagggcatgtctgggtgagccactggccagaatggagcttttcctgttctttactagcctcctgcagcatttctcgttctccgtacccaccggccaacccagacccagtcatcatggcgtgttcgcgtttcttgttactccctccccctatgagctgtgtgcggtgcccaggtag

SEQ ID NO: 219866 - DNA, 1482 bp, synthetic construct
  misc_feature 1..1482: note = Description of Artificial Sequence: Synthetic coding sequence
  source 1..1482: mol_type = other DNA
atgtctgcgctcggcgtaacagttgctttattggtgtgggctgcctttctgctgctggtaagtatgtggaggcaggtacatagcagctggaacttgcccccaggcccatttccgcttcctattatcggcaacctttttcagctagagctcaagaacatacctaaatccttcacacggttggcacaacggtttggccctgtgtttaccctttacgtagggtcacagcggatggtcgtgatgcacggctataaggcagttaaagaggcactccttgattacaaggatgaattttccggtcgaggggacctgcctgcattccacgctcatcgggataggggaatcattttcaataatggaccaacttggaaagacatacggaggttttcgctaacaacattgcgaaattacggaatgggtaagcaagggaacgaaagccggatccagcgcgaagcccacttcctcctggaagccctgcgtaaaacccaagggcaaccttttgaccccacatttttgatcgggtgcgccccatgcaatgtcatcgccgatattctttttaggaaacattttgactataacgacgagaaattcctgcgtttaatgtatctcttcaatgaaaatttccaccttttgagcactccctggctgcagctttacaacaactttccatccttcttacactaccttcctgggtctcatcgtaaagtgataaagaacgtggccgaggtgaaagagtatgtgtcggagagggtcaaggaacatcatcagtctttggatccgaactgtcccagggatctgacggattgtctgctggtggagatggaaaaggagaagcattctgcagagcgcctatacacgatggacggtattactgtaacggtggcggatcttttctttgcagggactgaaaccacatccactacactcaggtacggactgctgattctcatgaagtaccccgagattgaagaaaagttgcatgaagagatcgacagagtgattggacctagtcgtatcccagctatcaaagacaggcaggaaatgccatacatggacgctgtagtgcacgagatccagcgattcattactctggtgccatcaaacctgccccacgaagccactagggatactattttccgcggatatcttatacctaagggaaccgttgtagtacctacacttgattctgtgctgtacgataaccaggagttcccagaccctgaaaaattcaagcccgaacattttcttaatgagaacgggaaatttaagtattcagactactttaagccctttagcacaggcaaaagggtgtgtgctggggaaggtctggccagaatggaactattcctactcctatgtgccatcctgcagcactttaacctgaagcccttagtggatcccaaggacatcgatttgtctcccatccacatcggattcggctgcattccaccccgatataagctctgcgtgatccctcgatcttag

SEQ ID NO: 219867 - DNA, 1482 bp, synthetic construct
  misc_feature 1..1482: note = Description of Artificial Sequence: Synthetic coding sequence
  source 1..1482: mol_type = other DNA
atgagcgctctgggtgttactgtggctcttcttgtgtgggcagcctttctgttattagttagcatgtggagacaggtgcactcttcttggaacctccctcctgggcctttcccactgcctataataggaaacctgtttcagttggagctcaagaatatccctaagagcttcactaggctggcccagagattcggacccgtgttcacgctgtacgttgggagtcagaggatggtcgtaatgcatgggtacaaagccgttaaagaggcacttctggattataaggatgaattttcaggccgtggggacctgccggcatttcacgcccacagggaccgagggatcatcttcaataatggcccaacatggaaagatatcaggaggttcagcctgaccaccctccgtaactacggtatggggaagcaaggcaatgaatccaggatccagagggaggcccactttctgctggaagccctgagaaaaacccaggggcagcctttcgacccaacttttttgatcggctgtgcaccctgcaacgtcattgccgacatcctctttaggaaacactttgactacaatgacgagaagtttcttcggctcatgtatctcttcaatgagaattttcaccttttaagcactccatggcttcagttgtacaacaattttcctagcttcttacattatcttcccggaagccaccgcaaggtgattaaaaacgtcgctgaggtcaaagagtatgtatctgagcgtgtgaaggagcatcaccagagcctggaccccaactgccctcgcgacctgactgattgccttctggtggaaatggagaaggagaagcacagtgccgaacggttgtatacaatggacggaataacggtcactgtggcagacttgttctttgccggtactgaaacaacttcaaccaccctgcggtacggattgttgatacttatgaagtatcccgaaattgaggagaagctccacgaagaaattgatagggtgattggcccttccaggattcccgcaattaaggaccgacaggagatgccttatatggatgctgttgtacatgagatacaaaggttcatcacactggtgccgtcaaatctgcctcatgaggcgactagggacactatctttaggggctatctgattccaaagggcacagtggtagtaccgaccctggattctgtcctctatgacaaccaggaattccccgaccctgaaaagtttaagcccgaacacttcctcaatgagaatggaaagttcaaatatagtgactatttcaagcccttttccaccgggaagagggtttgtgccggagaaggcctggccaggatggaactatttttactgctctgtgcaatccttcagcatttcaacctcaaaccactggtcgacccaaaggacatagaccttagccccattcatattggctttggctgtatcccaccaagatataaactttgcgtgatccccaggtcgtag

SEQ ID NO: 219868 - DNA, 261 bp, synthetic construct
  misc_feature 1..261: note = Description of Artificial Sequence: Synthetic coding sequence
  source 1..261: mol_type = other DNA
atgtctgccctgggcgtgacggttgcattgctggtgtgggcggctttccttctccttgtgtccatgtggaggcaggtgcactctagctggaatcttcccccaggcccttttcctcttcctattattgggaatctgtttcaattggagctgaagaatattccgaaatcattcacacgtctggcccaacggttcggccctgtgtttacactgtacgtgggaagtcagcggatggttgtgatgcacggttataaagctgtgtag

SEQ ID NO: 219869 - DNA, 1476 bp, synthetic construct
  misc_feature 1..1476: note = Description of Artificial Sequence: Synthetic coding sequence
  source 1..1476: mol_type = other DNA
atggattctataagtaccgctatccttttgctgctgctagcactggtatgtctgcttctaacgctgtccagccgagacaagggaaaacttccccctgggccacggccactaagcatcctgggtaatctcctcctcttgtgttctcaagacatgctcactagtttgaccaagctgtcaaaggagtatggcagcatgtataccgtacaccttggacccaggagggttgtagtactaagcgggtatcaggccgtgaaggaggcactcgtggaccagggagaagagttcagcggaagaggcgactacccagccttctttaatttcaccaagggaaatggcatcgccttttcaagcggcgatcggtggaaagtgctgcgccagttcagcatccagatcctaaggaattttgggatggggaagagatcgatcgaggagcggatcctggaagaaggcagctttctgctcgcagagctcagaaaaaccgagggagagccatttgatcctactttcgtgctctcgcgatctgtttcgaacattatttgctctgtattgttcggatcgcgctttgactatgatgatgaaagactcctgacgattatccggcttataaacgataactttcagatcatgtcctctccctggggtgagctctacgacatttttccctccctgctggactgggtgcccggaccacaccagaggatttttcagaacttcaagtgtctgcgggatttgatcgcacacagtgtgcatgatcaccaagcaagcctggaccctagatcaccacgagacttcatccagtgcttccttacaaaaatggccgaggaaaaagaagaccccctcagtcacttccacatggataccctgttgatgactacccataaccttcttttcggtgggaccaaaactgtttctacaacccttcaccacgcttttcttgccttaatgaaataccccaaagtgcaggcgagagtgcaggaggagatcgatcttgtagtaggaagagcacggctacctgctttgaaggaccgggctgctatgccatatacggacgctgtcatccacgaagtacagagatttgccgatataatccccatgaatctgccccacagggtaactcgagacacagctttcagaggcttcctcatacccaaaggcacagatgtgatcactctgctgaataccgtgcactatgacccaagccaattcttgactcctcaggagttcaatccagaacactttttagatgccaatcagtcttttaagaagtcacccgcttttatgcccttctccgccggtagacgactctgtctcggcgagagcctggctcgtatggagcttttcctatacctgacagcgattttgcagtccttctcactgcagcctttgggagcccctgaggacatcgacctgaccccgctgtcaagcggactgggcaatttacctagacctttccagctatgcctacgaccaaggtag

SEQ ID NO: 219870 - DNA, 1509 bp, synthetic construct
  misc_feature 1..1509: note = Description of Artificial Sequence: Synthetic coding sequence
  source 1..1509: mol_type = other DNA
atgctggcagcaatgggctcactggcagccgctctatgggccgtggtccatcctcggactcttttacttggcactgttgcttttctcctagccgctgatttcctcaaacggagacggccaaagaattacccacctggaccatggcgtttgcctttcctgggaaacttcttcctggtcgatttcgagcagtcacatctggaggtacaattattcgtcaagaaatatgggaatctgttcagcttggagcttggagatatcagcgctgtcctgattactggacttcccctcattaaggaagcactgattcatatggatcaaaactttggcaatcggccagttacccctatgagggagcacatattcaaaaagaacggcctcatcatgagttcaggtcaggcttggaaggaacagaggagattcacactgacagctctccggaatttcgggctgggcaagaagagtcttgaagagaggattcaggaggaagctcaacacctgactgaggcgatcaaggaggagaatgggcagccatttgatcctcatttcaagattaacaacgccgtgagtaatataatctgcagtattaccttcggagaaaggttcgagtatcaggactcgtggttccaacagttattaaagcttctggatgaggtcacctacctggaagcttccaagacctgtcagttgtacaatgtctttccttggatcatgaagttcctgccaggcccacaccagaccctgttctctaattggaaaaagcttaagctgttcgtcagccacatgattgacaagcataggaaagactggaatcctgctgaaactcgcgattttattgacgcttacctcaaggaaatgagcaaacacaccggtaacccaacttcctcctttcatgaggagaacttgatatgttctactctggacctgttcttcgcgggtactgagacgacgagcactaccctccggtgggcactgctgtatatggccctgtacccagagattcaggagaaagttcaagcagagatcgaccgggtgatcggtcagggacagcagccatcaacagctgcgcgtgaatcgatgccatacacgaatgcagtgatacacgaggttcaacgaatggggaacattatccctttaaatgtgcccagggaagtcacggtggacaccactcttgctggctaccacctgccgaaaggcacgatgattttgactaaccttactgccttacaccgtgatcccaccgaatgggccacccccgacacgttcaaccccgatcattttctcgagaacggccagttcaagaaacgagaggcattcatgccatttagcataggaaagagggcttgtttaggcgaacagcttgcgaggactgagctttttattttttttacatctctgatgcagaaattcaccttccgccctcccaacaacgagaagctcagcctcaagtttcgcatggggattaccatttcacccgtgagtcataggctgtgcgccgtgccccaggtctag

SEQ ID NO: 219871 - DNA, 1506 bp, synthetic construct
  misc_feature 1..1506: note = Description of Artificial Sequence: Synthetic coding sequence
  source 1..1506: mol_type = other DNA
atgtggaagctttggcgtgccgaagaaggggctgccgctctcggcggtgcccttttcctgctcctctttgctctgggagtaagacagttgttaaaacaacgaagacccatggggttcccacctggacccccaggactgccatttattgggaatatatactccctggctgcgtcttcagaactgccacacgtttatatgaggaaacagtcacaggtatacggggagatcttttccttagacctggggggtatctctacagtggttctgaatggctacgacgtggtgaaagaatgtctggtacaccagtccgagatatttgccgaccggccatgtctgcctctcttcatgaagatgacgaagatgggtgggcttctcaatagccgttatgggaggggatgggtggaccatagacgactcgctgtcaactctttccgctacttcggatacgggcaaaagagcttcgagtctaagatacttgaagagacaaagttcttcaacgacgccatagagacctacaaaggtcgcccatttgattttaaacagcttattactaacgcagtgagtaatattaccaatttaataatcttcggcgagcgatttacttatgaggacaccgacttccagcacatgatcgagctgtttagcgaaaatgtcgagttagctgcatcggcgtctgtctttctttataatgccttcccatggattggcattctccccttcgggaaacaccaacaactgttccgtaacgcagccgtagtgtacgattttctgtcgcgccttattgaaaaagcttcagtcaatcgaaagccacagctgcctcagcacttcgtcgacgcatatctggacgaaatggaccaggggaagaacgacccgagcagcacatttagcaaagagaacctgatcttctcagttggagagctcattatcgccggaacagagacaaccactaacgttctgagatgggccatccttttcatggccctctacccaaacatccagggacaagtgcagaaggagattgatctgattatgggacccaacggtaaaccgagctgggacgacaagtgcaaaatgccctatacggaggccgtgctccacgaggtattaaggttctgcaacattgtccccttaggcatatttcacgcgacaagcgaggatgcagtagtgcgcggatactctataccaaagggtacaaccgtcatcacgaatctgtattcagtgcatttcgacgagaaatactggcgcgatccagaggtcttccatccagagagattcctggattcgtcaggatatttcgccaagaaggaggctctcgttccattttccctgggacggaggcattgccttggagagcacttggccagaatggaaatgttcttattctttacagctctgctccagcgcttccacctgcattttccccatgaactggtgccagatctcaaacctcgcctcggaatgaccctgcagccccaaccctatctgatttgcgccgagaggcggtag

SEQ ID NO: 219872 - DNA, 1695 bp, synthetic construct
  misc_feature 1..1695: note = Description of Artificial Sequence: Synthetic coding sequence
  source 1..1695: mol_type = other DNA
atggaagctaccggcacgtgggcgctgctgctggctctcgcactcctcctgttactgacactcgccctgagtgggacccgcgcacggggacatctgccccctggacccacacccctacctctgcttggaaacctgctgcagctccggcctggggcactgtactctgggctgatgagactatcaaaaaagtacggaccggttttcactatatacctgggcccttggcggccagtggtcgtgttggtggggcaggaagcagtgcgggaagcccttgggggacaggcagaagagtttagtgggaggggtacagttgccatgctggaaggcaccttcgacggccatggagtgttcttcagtaacggagagcggtggcgacagctacggaagtttacgatgctggcactgagggatctcgggatgggcaagagagagggtgaggagctgatacaggctgaggccagatgcttggtcgaaaccttccaaggcaccgagggacgaccctttgacccaagcctgctgttggcccaagccaccagcaatgtcgtgtgcagtctgttatttggcttaagattctcttacgaagacaaggagttccaggccgtggtgcgggctgccggagggacactgctgggtgtgtcctcccaagggggacagacttacgagatgttctcttggtttttgagaccactccctggcccacataagcagctgctgcatcatgtgagtacccttgccgctttcacagtgagacaggtccagcagcaccaggggaatttggatgcttccgggcctgccagggatctggtcgacgcctttctgctcaagatggctcaggaggaacaaaatcctggaacggagtttaccaataagaatatgctgatgaccgtgatttacctcttgttcgctgggacgatgactgtgtcaactaccgtaggttacaccctgctgctgctgatgaaataccctcacgtgcagaaatgggtgagagaggagcttaaccgggagctgggtgcagggcaagcgcctagtctgggggaccgtaccaggcttccatataccgacgctgtcctgcatgaagcccagagactgctggccctcgttcccatgggaatcccccgtactttaatgcgcactacccggtttcgaggatacacccttccccaaggcaccgaagtctttccactgcttgggtcaattctccacgatcctaatatttttaagcaccctgaagaatttaacccggacagatttctcgatgcggacggacgctttcggaagcacgaggcattccttccctttagtctgggaaagcgcgtttgtctgggggaaggactagccaaagccgaattattccttttttttaccacgatacttcaagcattttcactcgagtctccgtgcccacccgacactttaagcctcaaacccacagtgtcaggactctttaatattccacccgcttccacagtgggaatggacagagtcaatgtaagcagggtgtatactgccggatcacatatctataccccagccgtagtgtttcggtccctcagccatgggcctcacgcccacctgactcacgccgctaagatgcacaaccgaacaccaattcataattacaagggccacaaagcaaccgccggactcgcctttcatcgacataagtactcacccagtgcgattacctccacatag

SEQ ID NO: 219873 - DNA, 1515 bp, synthetic construct
  misc_feature 1..1515: note = Description of Artificial Sequence: Synthetic coding sequence
  source 1..1515: mol_type = other DNA
atggaagctacaggaacatgggctctcctcctcgcactagctctgctactgctgctcaccctcgcccttagcgggaccagagctagaggccatctgcccccaggcccaactccacttcccctgctaggtaacctgctgcagctcaggccaggcgctctgtacagcggtcttatgcgcctcagcaaaaaatacgggcctgtttttactatataccttgggccatggcgcccagtcgtggtcctggtgggacaagaggcggtacgagaggctttgggcggtcaggcagaggagtttagtgggcgaggaacagtagccatgctggagggtacctttgacgggcacggcgtgtttttttctaacggcgaaagatggcgccagcttcggaagtttacaatgctggcgctgcgtgatctcgggatgggaaaacgtgagggggaggagctcatccaagctgaagctcgatgcttagtcgaaacctttcagggcaccgaaggaaggccatttgacccgagcctgctcttggcccaagccacaagtaatgttgtctgctccctcttatttggcctgcggttcagctatgaggataaggaattccaggccgtcgtccgcgctgctgggggaactctgctgggggtgagctcacagggtggtcagacatacgaaatgttcagttggtttctgagacccttacctggcccacacaaacagctattacaccacgtttccaccctggcggctttcactgtacggcaggtgcagcaacaccaagggaatctggacgctagcggtccggctcgcgatctcgtagacgccttcctgttgaaaatggcacaagaagaacagaaccctggtactgagttcacaaacaaaaacatgctgatgaccgtgatttaccttttattcgctgggactatgacagtttctaccacggtaggctataccctgctactactgatgaagtacccgcacgtacagaaatgggtacgggaagagttgaatcgcgaacttggcgctggacaggccccttccttgggggaccggacaaggctcccgtataccgatgctgtgctacacgaggcccagaggctcctggctctcgtccctatgggcattcctcgaacactgatgaggactacaaggtttagaggctacactctgccacagggtactgaggtgtttcctctcctcggcagcattctgcacgatccgaacatcttcaagcaccccgaagagtttaaccctgaccggttcctggatgcagatggcagatttagaaagcacgaagcctttctcccgttttcactgggtaagcgagtgtgcctcggcgagggcttggcaaaggctgagctgttcctgttctttacgacaatcctgcaagccttcagcttagaatcaccatgtccgccagatacactcagcctgaaacctacagtgagtggattgtttaacatccctccagcctttcagctccaggttaggcctaccgatctgcacagcacaacccagacaagatag

SEQ ID NO: 219874 - DNA, 690 bp, synthetic construct
  misc_feature 1..690: note = Description of Artificial Sequence: Synthetic coding sequence
  source 1..690: mol_type = other DNA
atggctatggaagaacagaacccagggacagagtttacaaataagaacatgttaatgaccgtaatctatctgctcttcgccggaacaatgactgtgagcacaaccgttggctacacacttttgctgcttatgaagtatcctcacgtccagaaatgggtgcgcgaagaactcaaccgtgagctgggggcaggccaggcccctagtcttggtgacagaacacggttaccatataccgacgcagtcctgcacgaagcacagaggttgttggcgctggttccgatggggatcccaagaacgctcatgcgaaccaccagattcagaggatacactctgcctcaaggcacagaagtgttcccccttctcggaagcattctacatgatccaaatattttcaagcatcctgaagagtttaatcccgaccggttcctcgacgcggacggaaggttccgaaagcatgaggcctttcttccattctcactgggtaaacgcgtgtgtctgggcgagggcttagctaaggcagagctgtttctgttttttactactatcctacaggctttctccctggaatccccttgtccacctgatacattgagtttgaagcctactgtgtcgggcctcttcaatatcccaccagctttccagttgcaggtgagaccaactgatctccattccacgacccagacccgttag

SEQ ID NO: 219875 - DNA, 1635 bp, synthetic construct
  misc_feature 1..1635: note = Description of Artificial Sequence: Synthetic coding sequence
  source 1..1635: mol_type = other DNA
atgtctagcccgggacccagtcaaccgcctgccgaggacccaccctggcctgcccgacttctgcgggctcctttggggctcctgcgcctcgacccatcaggcggagccttgctcctttgtggcctggtagcattactaggatggagctggctgcgccgacgcagagctcggggtatcccgcctggaccaactccatggccactcgtaggcaattttggccatgtattgctccctccctttctccggagaagatcttggctttcttctcggactcgtgctgccggaatcgacccatccgtgatcggtccgcaggtacttctggctcacctcgctagggtgtatgggtctattttttccttcttcatcggacactacctggttgttgtattgtccgattttcactcagtgagagaggcattagtgcaacaagcagaggtcttctctgatcgtccacgagttccactgatcagtattgtgacaaaggagaaaggcgtggtgtttgcccattacgggcctgtgtggcggcaacagaggaagttctctcactctaccctgcggcacttcggcctcgggaagctgagcctggagcctaagataatcgaggaatttaaatacgtcaaggctgagatgcagaagcatggtgaggatcctttctgtccattctcaattatctctaacgccgtgtccaacatcatttgctccctttgttttggccagcgcttcgattacaccaactctgagttcaaaaaaatgcttggcttcatgtcacgcggattagagatctgtctgaattctcaggtcctgcttgtcaacatctgcccatggctttattacctgcctttcgggcctttcaaagagctgaggcagattgaaaaggacattacgagctttctgaaaaagatcatcaaggaccaccaagaaagcttggaccgtgaaaacccacaggattttattgacatgtatttgctgcacatggaggaggagcgcaagaacaacagtaacagcagctttgacgaagaatatctgttctatattatcggagatctctttatcgccggaaccgacaccacaactaactcactgctgtggtgtctgctttatatgtcactgaaccccgacgtacaggaaaaagtccacgaggagatcgagagagtgattggagccaaccgggctccaagcctgaccgataaagctcaaatgccatatacggaagccacgataatggaggtgcaacgcttaaccgtcgttgtacccctggctatcccacatatgacctccgagaatactgtgctgcaaggttataccatccctaaaggcacgttgattctgccaaatctgtggtctgtgcaccgagatcctgcgatctgggagaaacccgaagacttctaccctaaccggttcctggacgaccaaggccagctcattaagaaggaaacatttatccccttcggaataggcaagcgtgtatgcatgggggaacagcttgcaaaaatggagttgttcctgatgtttgtgagtttaatgcagagctttgcatttgccctccctgaagacagcaagaagcccttgttaacgggcaggttcgggctgaccctggcacctcatccctttaacatcactatttctcgcaggtag

SEQ ID NO: 219876 - DNA, 1506 bp, synthetic construct
  misc_feature 1..1506: note = Description of Artificial Sequence: Synthetic coding sequence
  source 1..1506: mol_type = other DNA
atgagctcacctggcccatctcaaccccctgcagaggatcccccttggccagctagactgctccgtgctcctctagtgggtaatttcgggcatgtgctactgcctccattccttagaaggcgctcatggcttagctcacggacaagagcagctggaatcgaccccagcgtgatcggtccccaggtgttactggctcatctcgcgagagtttacggctctattttcagtttcttcattggtcattacttggtggttgtgctgtcagatttccatagcgttagagaagctctcgtccagcaagctgaggttttcagcgaccgccctagagtgccactgatcagtattgtgacgaaagaaaagggtgtcgtctttgcccactacggcccagtgtggagacaacagcggaagttttctcattccacccttcggcacttcgggctgggcaagcttagcctggagcccaagatcatcgaggaatttaagtatgtaaaagccgaaatgcagaagcatggggaggatcctttttgccccttttccataataagtaacgctgtgtcgaatattatatgcagcctgtgtttcggccagcggttcgattacacgaattccgagttcaagaagatgctcggttttatgagccgagggctagagatctgtcttaattctcaggtattactcgtaaacatctgtccatggctctactacctgccctttggcccttttaaggaactgaggcaaattgagaaagacattacctcgttcttgaagaagatcattaaagatcaccaggagagtctggaccgagagaatcctcaggactttattgacatgtacctgctgcatatggaggaggagcgaaaaaacaatagtaatagcagcttcgacgaagagtacctcttttatatcataggcgatcttttcatagccggaactgataccaccacaaattcactgctctggtgcctcctttacatgagtcttaatccggatgtgcaggagaaagtgcacgaagaaattgagcgggtgatcggtgcaaaccgagccccaagcttgacagataaggcccagatgccttatacagaagccaccattatggaagtgcaaaggcttaccgtcgtcgtgccccttgcaatacctcacatgacttctgagaataccgtgctgcagggctacaccattcctaaagggacactgatcctgcctaacctgtggtccgtgcatagggaccctgcaatctgggaaaagcctgaagacttctaccctaatcggttcctggacgaccaagggcagctgattaagaaagaaacctttatcccctttgggatcggcaaaagggtgtgcatgggggagcagttagcaaaaatggagttgtttctgatgttcgtaagtttgatgcagagtttcgcctttgccctgcctgaagattcaaagaagccactgctcaccgggaggtttggacttaccctcgctccccacccatttaacattactatttctcggaggtag

SEQ ID NO: 219877 - DNA, 1398 bp, synthetic construct
  misc_feature 1..1398: note = Description of Artificial Sequence: Synthetic coding sequence
  source 1..1398: mol_type = other DNA
atgctcctgctgggccttctgttgcttctacctctgttagccggagctaggctcttgtggaactggtggaaacttcgtagcctgcacttgccaccactggcccctggttttttacatctgttacagccagacttgccgatctacttacttggtttgacacaaaaattcggcccaatctatagactgcatctcggactgcaggacaaactggttagtaggaattatccagatctctccctaggcgactattctctcttatggaaagcccacaagaagctgacgagaagtgcgctgctgctgggaattcgggatagcatggagcccgtggtagagcagctgacacaggagttttgcgagcggatgcgcgctcaacccggaacccccgtagcaatcgaggaggaattcagtctgctgacatgcagtatcatctgctatctgactttcggagataagattaaggacgataacctcatgcccgcttattataagtgcatccaagaggtgctgaagacctggagccactggtcgatccaaattgtcgatgtgataccattcttgcggtttttcccaaatccagggctgcgtaggctcaaacaggctattgaaaaacgggatcacatcgtggagatgcagctccgccagcataaggagtccctggtcgctggtcagtggcgagatatgatggactatatgctccaaggggtggctcaaccttcaatggaggaaggcagcggccagctgctagagggacacgtacatatggctgccgtggatctgctaatcgggggtactgagactactgcaaacaccttgtcttgggccgtagtatttcttttacaccacccagagattcagcaacggctccaggaggagctggaccacgagctgggcccaggggcttcctcatctagagtgccctataaagaccgagcacgccttccgctgctcaatgctacaatcgccgaggttctacggcttcggcctgtcgtgccactggcgctgccacacagaactactaggcctagctctattagcggctatgacattccggaagggaccgttatcataccgaatctacagggggcacaccttgacgaaactgtatgggaaagacctcacgaattttggccggataggttcttggaacccggaaaaaacagtagagctctggcttttgggtgcggtgcacgggtgtgtctcggcgagcccctagcaaggctggagctgtttgtggtactcacccgactcctgcaagctttcaccctccttccatctggggacgctttaccctctctccagccgcttccccactgctccgtaatcctgaagatgcagccatttcaggttcgccttcaaccaagaggcatgggtgcccacagccccggtcagagtcaatag

SEQ ID NO: 219878 - DNA, 1488 bp, synthetic construct
  misc_feature 1..1488: note = Description of Artificial Sequence: Synthetic coding sequence
  source 1..1488: mol_type = other DNA
atgctcctgctgggactgctgcttttgctgcccctcctcgctggcgctcgactcctttggaattggtggaaactgcgatctctgcacctgccccctctggcccctggctttctgcatttactccagccagacctccctatctacctcttgggcttaacccagaaattcggccctatctaccgactccatctcggccttcaggatgtggtggtgttaaacagtaagaggaccatcgaagaggccatggtgaagaaatgggcggactttgcgggaaggcctgaaccactgacgtacaagctggtgagccggaactatccggacctctctctgggggactacagtctgctctggaaagcccacaaaaagctgacccggtctgcattacttcttggtatccgtgactcaatggaacccgtggtggaacagctaacccaggaattctgtgaaagaatgcgggcacagccgggaacacctgtggccatcgaggaagagttctctttgttaacatgttccataatctgctatttaaccttcggggacaaaatcaaggacgacaatctgatgcccgcatattacaagtgcattcaggaggtgctaaaaacttggtctcactggtctatccagattgtggacgtgataccttttctgcgcttcttccccaaccctggtctccggagacttaagcaggcaatcgaaaaacgcgatcatattgtggagatgcaattgagacagcataaggagtccctggtcgccggacagtggagggacatgatggattatatgttgcagggagtggcacagccctccatggaagagggaagtggccagttactggaagggcacgtgcatatggcagccgtggacttgctaatcggaggaacagagactacagctaatacactgtcttgggcagtcgtttttcttctccatcatcccgaaatacagcagcggcttcaggaggagttggatcacgagctgggccctggagcctccagttcgcgagttccatataaggaccgtgctcgcctgccattgctcaatgctaccattgccgaggttctaagactcaggccagttgtccccctggccctcccccatagaacaactcggccttcttctataagtggctacgacatcccggagggcaccgtgattattcccaacctgcagggggcacatctcgacgagactgtgtgggagaggcctcacgagttttggcctgacaggtttctcgaaccaggaaagaactctcgcgcactagcgtttggctgcggcgcacgggtgtgcctgggcgagcctttggccagactagaactgttcgtcgtcttgactcggttgcttcaagccttcacattgctcccatccggggatgctcttccgtccttgcaacccttgcctcactgttccgtcatcctgaagatgcagcccttccaagtgcgattacagccaagaggtatgggcgctcattccccagggcaaagccagtag

SEQ ID NO: 219879 - DNA, 1488 bp, synthetic construct
  misc_feature 1..1488: note = Description of Artificial Sequence: Synthetic coding sequence
  source 1..1488: mol_type = other DNA
atgttgttgctgggactccttctgctgctgcccttgttagccggtgctcgtctgctttggaattggtggaagctgcgatccttgcatctgcctccactggccccaggattccttcacttgctccagcctgaccttccaatctacctgctgggattaacccagaagttcgggcctatctatcgattgcacctcggcttgcaagacgttgtagttctaaacagcaaaaggaccatcgaggaggccatggtgaagaaatgggcggacttcgcagggagaccagagcctttaacctataagctggtgtcccgaaactatcccgacctcagcctgggggactatagtttgctctggaaagcccacaaaaagctgactcggagcgcattgctgttgggaatcagggattccatggaacctgtagtggagcagctcacccaggagttttgcgagagaatgcgcgcacagcctggcacaccagttgctatcgaggaagaattttccctgctgacctgttccattatctgttacctcactttcggcgataaaatcaaagacgataatctcatgcctgcttactacaaatgcattcaggaggtgttgaagacttggtcacactggagcatccagatagtagatgtgatccccttcttaaggtttttcccaaatccgggacttcgaaggctcaagcaggctatcgagaaacgagaccacattgttgaaatgcagctgagacagcacaaggagtccctggttgctggccaatggagggatatgatggactacatgttgcagggcgtcgcgcagcctagtatggaggagggctcaggacaactccttgaaggccacgtgcacatggctgccgtggatctcctgattggtggtactgaaaccaccgctaacactctatcctgggccgtcgtcttcctgctgcaccatccagagatacagcaacggttacaggaagagctcgaccacgagctgggaccaggcgctagcagctcccgggtcccctacaaagatagagcgagactgcctctcttgaatgccacgatcgctgaggtgctgagactgcgtccagtggttcccttggcccttccacacaggactactcggcctagttccattagcgggtacgacatccccgagggaacggtgataattcctaatctgcagggagcacacttggacgagacagtgtgggagcgaccccacgaattctggcccgaccggttcctggagcccggaaaaaactccagagccctggcgttcgggtgcggtgcccgagtgtgtctgggcgagcctttggcaaggctggaacttttcgtggtccttacaaggctgctgcaagccttcactcttctgccctctggagatgcgctgccttccctccagccactaccccattgttcagtaattttgaaaatgcagcccttccaggtgcgcctgcagcccaggggcatgggtgcccattctccaggacagtctcagtag

SEQ ID NO: 219880 - DNA, 1398 bp, synthetic construct
  misc_feature 1..1398: note = Description of Artificial Sequence: Synthetic coding sequence
  source 1..1398: mol_type = other DNA
atgttactcctaggactgctgctgttgcttccactgctggccggagccaggctgctgtggaactggtggaagttgcgatctctccatctcccccctctggcccctgggtttctccatctcttgcagccagacctgcctatctatctgttaggcctcacccagaagtttggcccaatataccgtctccacctggggctccaggataagctggttagtcgaaattacccggacctgtccctaggcgactatagtctgctttggaaggcacataagaagttaacacggagcgccctgctgttaggtatccgggatagcatggaaccggttgtggagcaactgacccaggagttttgcgaacgcatgcgtgcccagcccggtacacccgtcgccatagaagaagagtttagtttgttaacctgtagcatcatttgctacctgacattcggggataagattaaggatgacaatctgatgcccgcttactacaaatgcatacaagaggtcctgaaaacgtggtcgcactggagcatccaaattgtcgacgtcataccgtttctgcggttctttcctaatcccggactgcgacgacttaagcaggctatcgaaaagcgcgaccacattgtggaaatgcaactgcggcagcataaagaatccctggttgctggccagtggagagacatgatggattacatgctgcagggggtggcccagcctagcatggaggagggtagtggccagttgctcgaagggcacgtgcatatggcagcagttgatctactgatcgggggaaccgagaccacagccaatactctgagctgggccgtggtgtttctactgcaccaccccgagatccagcagcgactgcaagaagagctggaccacgagttaggtccaggagcgtctagtagcagagttccttacaaggacagggctagattacccctcttgaatgcaaccatcgcggaagtgttacgcctgcggccagtcgtgcctctggcactgcctcacaggacgactaggccgtcgagtatatccggttacgacataccagaggggaccgtgattattcctaacctccaaggcgctcatttagacgagactgtgtgggaacggccacacgaattctggcctgaccgttttttggagccaggcaagaactcccgtgcactagcttttggatgtggagcccgagtgtgtctcggagagccattggcacgcctggaattgtttgtggtgctaactcggcttcttcaggcgttcactctccttcccagcggagacgccttgccttctctgcagcctcttcctcattgcagtgtcattctgaagatgcagcctttccaggttcgcctgcaacccagaggcatgggagctcacagcccgggacagagccagtag

SEQ ID NO: 219881 - DNA, 1398 bp, synthetic construct
  misc_feature 1..1398: note = Description of Artificial Sequence: Synthetic coding sequence
  source 1..1398: mol_type = other DNA
atgttgttgctgggtctgctgctactgctgccccttttggccggtgctcgtttactctggaattggtggaagctgcgctcgctgcatttgccccctctcgctcccggattcttacatctgctgcagcctgacttaccaatctatctcctggggctaacacaaaaatttggccctatatacaggctccatttgggtctgcaggacaaactcgtcagccgcaactaccccgatctcagcctgggagattacagccttctttggaaggcacacaagaaactcacccgctcagccctattgcttgggatcagagatagcatggagcccgtggtcgaacagctgacacaagagttttgcgagcggatgagggctcagccaggaacacctgtggccatcgaagaagagttctctttactgacctgttcaataatatgctacttgactttcggcgataaaattaaggacgacaacctgatgcccgcttattacaaatgtattcaagaggtcctgaagacatggagtcactggtcgatacagatcgtcgacgtcattccgttcctccggttttttccaaaccccggtcttcgaaggctgaagcaagctatcgaaaagagggatcacatcgtggagatgcagctaagacaacacaaggaaagtctggtagcagggcagtggcgggacatgatggattacatgttgcagggtgtggcacagccgtctatggaggaggggagcggccagttactggaggggcacgtgcacatggccgcagtggacctcctcatcggcggaaccgagaccacagccaacacactcagttgggctgtcgtgttcctgctgcaccatcccgagatccagcaaagactccaagaggaactcgatcacgagcttggcccaggcgcttcttcctctcgcgtgccgtacaaagaccgcgctcgtcttccactcctgaacgcaacaatcgccgaagttctgcgcctgagacccgtggtgcctctggcacttccacatcgcacaacaaggccctccagcattagcgggtatgacatccccgaggggaccgtcataatccctaacctgcagggggctcacctggacgagacagtctgggaacgaccccacgagttttggccggacagatttcttgaacctggaaaaaactctcgcgcactggccttcgggtgcggcgcacgggtctgccttggtgaaccccttgcacggctcgaactttttgtggtgttaacccggctgttgcaggcatttacattgctgcccagcggggatgccttaccatccctacaacccctgccacactgtagcgtgattctcaagatgcagccattccaggtccgcctacaacctagaggaatgggagcacacagccctggccaatcccaatag

SEQ ID NO: 219882 - DNA, 1485 bp, synthetic construct
  misc_feature 1..1485: note = Description of Artificial Sequence: Synthetic coding sequence
  source 1..1485: mol_type = other DNA
atgctcctcctcggcttgctgctgcttccactcttggctggcgcaaggcttttatggaattggtggaagctgcgctccttacacctgccgcctctggctccagggttcctccatctccttcaaccagatctgcctatttacctcctgggcctcactcaaaagttcggcccaatctatagactccacttaggcctgcaggacgtagtggtgctgaattccaaaagaaccattgaggaggcaatggtgaagaaatgggcagacttcgccggtagaccggaacctctaacatacaagttagtgtctaagaactatcccgatctgagtctcggagattatagcttactgtggaaagcccataagaagttaaccaggtccgccctgctactcggcattagggacagcatggaacctgtggtagagcagttgacccaggaattttgtgaacgaatgcgggctcaaccaggaacccctgtggcaatcgaagaggaattctccctcttaacctgctctatcatttgctacctgacctttggggacaagatcaaagatgataatttgatgcctgcctactacaagtgtatacaagaggtgcttaaaacttggtcacattggagtattcagatcgttgatgtaattccatttctgcgattttttccaaatcctggattgcgtaggctcaagcaagccatagagaaacgcgaccatatcgtggagatgcaattgcgccagcacaaggagtccctggtggcgggtcagtggcgggatatgatggattacatgttgcaaggggtcgcccaacctagtatggaggaaggatcgggccaattactggagggccatgtccacatggccgcagtggatctcttgataggagggactgaaacaacagctaacactctgagctgggctgtggtcttcctccttcaccatccagaaatccagcagagactgcaggaagagctggatcacgagctgggaccaggcgctagctcatccagggtgccttataaggatcgcgcacgtttaccacttttaaacgccactattgctgaagtgcttaggctaaggcccgtggtcccactcgcactccctcaccggacaacccgtccgtcctctataagcggatatgacattcccgagggaaccgtgataatccccaatctgcaaggcgctcaccttgacgagacagtctgggaacggccacacgaattctggccagacaggttcctggagcccggtaaaaactcccgcgcactggccttcggctgtggggcaagggtgtgcctaggcgaaccactggccagactggagttgttcgtcgtgttaacgcgactcctccaggctttcacgctgcttccgagcggcgacgcactgcccagtctccagccacttcctcactgctctgttatcctcaagatgcaaccctttcaggtgcgcttacagccaagaggaatgggggctcatagtcctggacagaaccaatag

SEQ ID NO: 219883 - DNA, 1485 bp, synthetic construct
  misc_feature 1..1485: note = Description of Artificial Sequence: Synthetic coding sequence
  source 1..1485: mol_type = other DNA
atgctgctgctgggcctgctgctattgccactgcttgctggggcacggctgctatggaactggtggaagttacgctccctccatctgccacctctggccccaggatttctacatcttctccagccagatcttccaatctatctgctgggcttaacacaaaagttcggcccaatctaccgcttacacttgggcctccaggatgtcgtcgttctcaatagtaagagaaccatcgaggaagctatggttaaaaagtgggctgatttcgcgggacgcccagagccattgacctataagcttgtcagcaaaaattaccctgatttgagcttgggcgactactcactgctgtggaaggcacataaaaaactgacaagaagcgcgctgctgctggggattcgggactctatggaaccagttgtggaacagcttacccaggagttttgcgaacggatgcgggctcagccgggaacacccgttgctattgaggaggagtttagcctgctgacctgttccatcatctgctacctgacctttggggataagataaaagacgacaatctcatgcctgcatactacaaatgcattcaagaggttctgaaaacttggagccactggagtatacagatcgtggatgtcatcccttttctgcgctttttccctaatccagggttgcggaggctaaagcaggcgatagagaaaagagaccacatcgtcgaaatgcagcttaggcagcataaggagtcactggtggcgggacagtggcgcgacatgatggactacatgctacagggggtggcccagccttctatggaggaaggatcagggcagctcctggaaggccatgtccacatggctgcagtggatttgctgatcggcggaacagagacaactgcaaacacacttagctgggccgtcgtgttcttgctgcatcaccccgaaattcagcagagactacaggaggagctggatcacgaattagggccaggtgcatcctctagtagggttccttataaggaccgcgcaagactccccctgctcaatgcaaccattgccgaggtgctgcgcctgaggcccgtggttcctctggcgctgccacatagaactacccgcccttcatctatttcgggttatgatataccagaggggacggttatcatccccaacctgcaaggggctcacttagatgagacagtgtgggagcgaccccatgagttctggcccgacagatttcttgagcctggaaagaattcacgggctcttgccttcggctgtggcgcacgagtctgtctgggagagcctctcgccagactcgaactgtttgtcgttctgactcgactactgcaagcttttaccttgctcccttcaggggacgctctgcctagcttgcagcccctaccccactgctcagtgattctgaaaatgcagccttttcaggttagactgcagccaagaggcatgggtgcccattcacccggtcaaaatcagtag

SEQ ID NO: 219884 - DNA, 1488 bp, synthetic construct
  misc_feature 1..1488: note = Description of Artificial Sequence: Synthetic coding sequence
  source 1..1488: mol_type = other DNA
atgttgttattaggtttactgcttttgctgccactgctagccggagcccgattgttgtggaattggtggaagcttcggtcactgcatctccccccattagccccaggtttcctgcatctactgcaacctgaccttcccatatacctgctagggctgacccagaagtttgggccaatttaccggctccatttgggactccaggacgtggtggtcttaaacagtaagcggacaatcgaagaagccatggtgaagaagtgggctgacttcgccggaagacccgagcctctcacatataagctcgtcagtcgcaattaccccgacctgagcctgggggactattcccttctgtggaaggctcacaaaaagctcacccggagcgccctgctgttgggaatccgggattccatggagccagtggtcgagcaactgacgcaagagttctgcgaacgaatgagagctcaacctggcaccccagtggccatcgaggaagaattctctctgctgacctgttcaattatctgctatcttacatttggcgacaagattaaggatgacaatctgatgcccgcttactataaatgcatacaggaggttttgaagacctggagtcactggtcgatccagattgtggacgtgatcccctttctgcgcttcttccccaatcccggactccggagattgaagcaggcgatcgagaagcgcgatcacatagtggagatgcagctcaggcagcataaagaaagccttgtcgcgggacagtggcgcgatatgatggattacatgctgcagggcgtggcacaaccgagtatggaggagggctctggccagttgctcgaggggcacgttcatatggctgctgtggatctactgatcgggggaaccgaaacgacagcaaacacactgtcgtgggctgtcgtgttcctgttgcatcatccagaaattcaacagaggctacaggaggaactcgaccacgagttgggccctggagcaagctcgagcagagtcccttataaggacagagcaagacttcctctgctgaacgctacgatcgccgaagttcttcggctgaggcctgttgtccccctggcattgccacaccgcaccactaggccatccagcatctcaggctacgatattcccgagggcaccgttattatccccaaccttcaaggcgctcacctcgacgaaactgtttgggaacgaccccacgagttctggcccgaccggtttctcgaacccggaaagaacagcagagccttagcttttggatgtggagctcgcgtatgcttgggagaaccactagctagacttgaactctttgtggttcttactagactgttgcaggcttttactcttctgccaagtggggacgctctgccttctttgcagccactgccacactgctctgtcattctgaaaatgcaacctttccaagtgcggttacaacctcgtggaatgggagcgcatagcccaggacaaagccagtag

SEQ ID NO: 219885 - DNA, 1395 bp, synthetic construct
  misc_feature 1..1395: note = Description of Artificial Sequence: Synthetic coding sequence
  source 1..1395: mol_type = other DNA
atgcttctcctgggccttctactgttgcccctgctggctggagccagactcttatggaattggtggaagctccggagcctgcacctcccaccacttgccccaggcttcctgcacctgctccaacctgatctgcccatctacctgttgggactaactcagaaattcgggcctatctatcgacttcacctgggcctgcaggacaaactggtttctaagaactacccagacctgagtctgggagattatagcctgctgtggaaggctcacaagaagttaacccgatccgccctgctgcttggtatccgcgattcaatggaacccgtggtagaacaactcacccaggagttctgcgagcggatgagagcccagccaggaacgccggtggcaattgaagaggagttcagcttgctgacctgctcgatcatctgctatctgaccttcggggacaaaataaaggacgacaacctgatgcctgcctattataagtgtatccaagaagtgctgaagacctggagccactggtctattcagattgtggatgtgattccttttttaagattttttcctaaccctggtttgcgcaggctgaaacaggcgattgagaagcgggaccatatcgtggagatgcagctgagacagcacaaagagagtctggtagccggacagtggcgcgacatgatggattatatgctgcagggggttgctcagcctagcatggaggaggggagcggccagctgcttgaggggcacgtacacatggcagctgtagatctcctgattggcggtacagagacaaccgccaatactttgtcctgggccgtggtgttcttactgcatcacccagagatacaacagaggctgcaggaagaactggaccacgaactgggccctggcgcatcctccagcagggtgccttataaggaccgagctcggctacccctgctgaatgcaactatcgccgaggttttgcgcctcagaccggtggtccccctcgcccttccacatcgaactacccgccctagcagtatttccggctatgacatacccgaaggcacggtgatcattcccaatctccaaggcgctcacttagacgagacagtgtgggaacggccacatgagttctggcctgatcggtttctagagccaggtaagaacagccgagctctggcatttggttgtggagccagagtgtgtctgggcgagcccctggcgagactcgaactttttgtcgttttaaccaggttactgcaagcattcaccttactccctagcggggacgccttaccctctcttcaaccactaccacattgctctgtgattctcaaaatgcagcctttccaggttagactgcaacctcggggtatgggggctcatagtcctggacagaatcagtag

SEQ ID NO: 219886 - DNA, 1398 bp, synthetic construct
  misc_feature 1..1398: note = Description of Artificial Sequence: Synthetic coding sequence
  source 1..1398: mol_type = other DNA
atgctattgctgggacttctgttgcttttgccactgctggccggagccagactgctctggaactggtggaaactgaggtctctgcacttaccacctctggctcctgggttcctgcatcttttgcagccagacctccctatctacctcctgggacttacacagaaattcgggcctatttatcgattacacctggggttgcaggacaaactcgtgagcaggaactatccagatttgagcttgggagattattccctgctctggaaggcacacaagaaactgactcggagtgctctgctcctcggcatccgggacagcatggaaccagtggtggaacagcttactcaggagttctgtgagcggatgcgagcccaaccaggcactccggttgcaatagaggaagagttcagccttctcacctgcagcattatctgctacctgaccttcggagacaaaattaaagatgataacctgatgcccgcatattacaaatgcatccaggaagtgctgaagacctggtcgcattggagcatccagattgtcgacgtcattcctttcctgagattctttcctaatccgggtctgagacggctgaaacaagctatcgagaagcgcgaccatattgtggaaatgcagttgcgccaacataaggaatccctggtcgctggccaatggcgcgacatgatggattatatgctgcagggcgttgcacaaccctcaatggaggagggctccggacaacttttggagggacacgtgcacatggccgctgttgatcttctgattgggggaactgagacaactgccaatacattgtcctgggctgtggtatttctgttgcaccatccagagatccaacagcggctgcaggaggagctagaccacgaactagggccaggtgccagctctagccgggtgccttacaaggacagagctcgactacccttactgaacgcaactattgctgaggtacttcgattgcgtccagtggtgcccttagcactgccccataggaccacaagaccgagtagtataagtggctacgatatcccagaagggactgtaattatcccaaacctacagggcgctcatctcgacgaaacagtctgggaacggccacatgagttctggcccgaccgcttcctcgagcccggaaaaaattcccgtgcactggcctttggctgtggggcacgcgtctgtttaggagagcctttagctagattggagctgtttgtggtgttgacacggctgttgcaagcatttacactgctcccgagtggggacgctctgccttccctccaaccgctgcctcattgttcggtgattttaaagatgcaacccttccaggttcggctccagccaaggggaatgggcgcacatagtccaggtcagtcccagtag

SEQ ID NO: 219887 - DNA, 1395 bp, synthetic construct
  misc_feature 1..1395: note = Description of Artificial Sequence: Synthetic coding sequence
  source 1..1395: mol_type = other DNA
atgctgctgttgggactgctcctgctgccactgctggccggagcgaggctgctgtggaattggtggaaactacgttctctccacttgccaccactggcacctgggttcttacacctcctgcaaccagatctgccgatctatctgttaggcttgactcagaaattcggtcctatctacagactgcatttgggtctccaggataaactggtctctaaaaactacccagatctctccctgggcgactatagcctgctttggaaagcccataagaagttaacccggtcagctctgctgcttggcattagggattccatggagcccgtggtcgagcagttgacccaggagttctgtgagcgaatgcgggctcagcctggcactccagtagccattgaggaagagttcagtctgctgacatgtagtattatttgctacctgacctttggggacaagattaaggatgacaatctgatgcccgcatattataagtgtattcaggaagtgcttaaaacatggagccactggagcatacagattgtggacgtgataccttttctgcgcttcttcccaaaccccggactgcgcagactgaaacaggctatcgagaagcgggaccatatagtagaaatgcagttacggcagcataaagaatcccttgtagccggacagtggagagacatgatggattacatgctgcagggagtggctcagcctagcatggaagaagggtccggtcaattgctggagggccatgtccacatggccgctgtggacctgctgatcggcggtaccgaaaccacagccaacaccctaagctgggctgtggtatttctgcttcatcatcctgaaattcagcagagactgcaggaagagctagatcatgagctgggacctggagcctcctcgtcccgcgtgccatacaaagaccgggcaagactgccattgctcaacgccactattgcagaagtgctgagactgagacctgttgtgcctctggccctcccccaccgaactacccggccttcaagtatcagtgggtacgacatccctgaggggacagtgatcattcctaatttgcagggcgcacatctggacgaaacagtgtgggagcggcctcacgagttctggccggaccgattcttggagccagggaaaaattcaagagcactggctttcggatgtggagccagagtgtgcctcggtgaaccacttgccagactcgaactgttcgttgtgctcacgcgcctgctgcaggccttcaccctgctcccatctggagacgcgctaccatccctccaacctcttccccattgctcagtgatcctcaagatgcagccattccaggttagattacagcccaggggcatgggtgcacattcacccggacagaaccagtag

SEQ ID NO: 219888 - DNA, 1488 bp, synthetic construct
  misc_feature 1..1488: note = Description of Artificial Sequence: Synthetic coding sequence
  source 1..1488: mol_type = other DNA
atgctactgcttgggctcctactcctcctgcctctcctggccggtgccaggctgttgtggaattggtggaaattgaggagcttgcatttgctgcctctggctcccggtttcctgcatttgctacagccagacctgccaatttacctgctcggtttgacgcaaaaattcggtcctatttaccgtctgcacctgggtctgcaggacgtggttgtcctaaattctaagcgtacaatcgaggaggccatggttaagaagtgggcagacttcgccggaagacctgaaccattgacttataaacttgtgtccaaaaattatccggatctctccctcggcgactatagcctgctgtggaaagcgcacaagaagttaacacgctccgccctgctgttaggaatccgggattcaatggagcctgttgtagaacagctgacccaggagttctgcgagcgcatgcgcgcacaacctgggacacccgtcgctattgaagaggaattttccttgttaacctgcagcatcatttgttatttgacctttggggataagattaaagacgataacttaatgcccgcatactacaagtgcatccaggaagttcttaagacctggtcccattggtctatccagattgttgacgtcatcccgttcctgaggttctttccaaaccccggtctccggaggttgaagcaggcgatagaaaagcgagatcacattgtcgaaatgcaactgagacagcataaggagtcactggtcgcaggtcagtggcgggatatgatggattatatgctacagggcgtcgcccagccttcaatggaggagggttcaggccagctgttggagggtcacgtccatatggccgctgtcgacctgctcatcgggggaacagagactaccgctaacacgctgagttgggctgtagtttttctgctgcatcaccctgaaattcaacagcgtctgcaggaggaattggaccacgaactggggccaggggcttcatccagccgggtcccctataaagatagggcccgactccctcttttaaatgccacaatagcagaggtcctccggctccgacctgttgtacctctcgccctcccacacaggacaacacggccttccagtatcagcggatacgacatccccgagggcaccgtgatcattcctaatcttcagggcgctcatctggacgaaacagtctgggagcgccctcatgaattttggcccgatcgcttcctggaaccaggtaagaacagtagggcactggccttcgggtgtggtgcccgtgtgtgtctgggagagccccttgcccgattagagctctttgtggtattgacacgcctcctgcaggccttcacgctgctgccctcaggagatgctctgccgtccttgcagcctctgccacattgttccgtgatcttgaagatgcaaccattccaggtaagactccagcccaggggaatgggagcccatagcccaggtcagaaccagtag

SEQ ID NO: 219889 - DNA, 1488 bp, synthetic construct
  misc_feature 1..1488: note = Description of Artificial Sequence: Synthetic coding sequence
  source 1..1488: mol_type = other DNA
atgctcctcctcggcttacttctcctgttgcctttgctcgctggggctcgcctcctgtggaactggtggaagctgcgcagtctgcatttacccccactcgctccaggattcttacacctgctgcaacccgacttgccaatctatctgctcggtctgacacaaaaatttggcccaatttatagactgcacttgggccttcaggacgttgttgtgctgaattctaaaagaacaattgaggaagctatggtcaagaagtgggccgactttgctggcaggcctgagccacttacctacaagctggtgtcaaaaaactaccctgatctctccctgggagactatagtctcctgtggaaggcccataagaaactgacccgaagcgcccttctactgggcataagagacagcatggaacccgtggttgaacagcttacacaggaattttgcgaaaggatgagagcacagcctggaactcccgtcgcaatcgaggaggagttctcactgctgacatgctctatcatatgttaccttacattcggcgacaaaattaaggacgacaacctcatgccggcttactacaagtgtatccaggaggtgctcaaaacatggtcacactggtccatccaaatcgtcgatgtcattcccttcctgaggttcttcccaaatccgggtctccggagactgaagcaggctatagagaagcgggatcatattgttgaaatgcagctgcggcagcacaaggaaagtttggtggcagggcagtggagagatatgatggactatatgctacagggtgtggcccagccatcaatggaggaaggctcaggccagctgctagagggacacgttcatatggccgcagtggacctccttatagggggaactgagacgacggcgaacacactgagctgggccgtggtctttcttcttcatcatccggaaatccagcagagattacaggaggagctagatcacgaactcggtcctggagcttcttcctcccgggtcccatacaaagatcgggctcgccttccattactgaacgccactattgcagaggtgctgcgcctgcgccctgttgtccctcttgcgctgcctcataggactacccgccctagctctatctcaggttacgacattccggaggggaccgttatcattcccaatcttcagggcgctcaccttgacgagactgtttgggaacgtccccacgaattttggcccgaccggttcctggagccaggtaagaattcccgtgcactggctttcggttgtggcgcaagagtgtgtttaggggaaccactggcgaggcttgaacttttcgtcgtcctcacccgtctgcttcaagcttttacgcttctgccgagtggcgatgccctgccctctctgcagccactgccccattgctctgtcatcctgaaaatgcaaccatttcaggtccggctccagccacggggaatgggtgctcattcgccgggacagaaccagtag

SEQ ID NO: 219890 - DNA, 1398 bp, synthetic construct
  misc_feature 1..1398: note = Description of Artificial Sequence: Synthetic coding sequence
  source 1..1398: mol_type = other DNA
atgctcctgctgggattactattgctgctgcccctcctcgccggtgccaggcttttatggaactggtggaagctgcgatctctgcatcttctgcccctggcacccggatttcttcatcttcttcagcccgacctgcccatctaccttttgggcttgacccaaaagttcgggcctatttacagactgcatctcggtctgcaggataagctggtgagtaagaattatccagatctctcacttggagactacagcctcttatggaaggctcataagaagctgacgcgctcggcattgttgctggggatacgtgactctatggagcccgtagtagagcaactgacacaggaattctgcgagcgcatgcgcgcacagcccggtaccccagtcgctatcgaggaagagttttccctcctgacctgctctataatctgctatttgacttttggagacaagattaaagatgacaacttgatgcctgcatattataaatgcatccaggaagtgctaaagacttggtcacactggtctatccaaatcgtggatgtcatcccctttctgcggttcttcccaaatcccggactgagaaggcttaagcaggctatcgagaaacgagaccatatcgtggaaatgcaactcagacagcacaaggagtctttggttgctggtcagtggagagatatgatggattatatgcttcagggggtggcccagcctagtatggaggaaggctccggacagttgctggagggtcatgtgcacatggctgcagtcgacctactgatcgggggtaccgaaaccaccgcaaatactctatcttgggcagttgtcttcctgctgcaccaccccgagatccagcagaggctccaggaggagctggatcatgagctcgggccaggcgcatcctcaagtcgagtgccctacaaggatcgggcaagactgcccctgctgaatgcgaccattgcagaggttctgcgcttgaggccagtagtgccgctggcactcccacaccgcactacaaggccttcttctatctccggatatgacatccccgaaggaacggtgatcatacctaacctacagggagcacacctcgacgaaacggtgtgggagagaccacacgagttttggcccgaccgtttcctggaacccggtaaaaactcacgggctctggcctttggatgcggtgccagggtctgtttgggcgagccgttagcaaggcttgaactcttcgttgtcctgacaaggctgctgcaggccttcacactgctgccatccggtgacgcactgcctagcttgcagcctctgccacactgttcagtaatcctcaaaatgcagccatttcaggtgcgcttacagcccagaggaatgggtgcgcacagtccgggacagaatcaatag

SEQ ID NO: 219891 - DNA, 1704 bp, synthetic construct
  misc_feature 1..1704: note = Description of Artificial Sequence: Synthetic coding sequence
  source 1..1704: mol_type = other DNA
atgcatggccgactcaaggtcaagacatccgaagagcaagccgaagccaagcgccttgagagggagcagaaactaaaactatatcagtcagccacacaggccgtgttccagaagcgccaggcaggggaactcgacgaatctgtgctcgaactgacctctcaaatactaggagctaatcccgatttcgcgactttgtggaactgtcgacgagaggtgctgcagcagctggaaacccaaaagtctccagaagagctggccgctctggttaaagctgaactgggatttctggaatcctgtctgcgcgttaatcccaagtcctacggcacatggcatcaccggtgctggctgctaggacgccttcccgagcctaactggacaagggagctcgagctctgcgcacgtttccttgaagtggatgagcggaacttccattgttgggactaccgcaggttcgtcgcaacccaggccgctgtcccccctgccgaagaactggccttcacagacagtttgattacacggaatttttcaaattatagctcctggcattacaggagttgcctgctccctcagttgcatcctcagcctgattcaggaccgcaaggtcggcttccggaggacgtattattgaaagaactcgagctagtgcagaatgccttcttcaccgatcccaatgatcagagtgcatggttctatcataggtggttactgggtagagccgacccccaggacgcgttgagatgtttgcacgtgtctagagacgaggcatgtttgactgtatcattctcccgccctctactggtgggctcacgaatggagattcttctcctaatggtggacgattccccattaattgtcgagtggagaactcccgacggcagaaataggccaagtcacgtgtggctctgtgatctgcccgcagccagtctcaatgatcaactgccgcagcatacgtttcgggttatctggactgccggtgatgtgcagaaagaatgcgtattgctcaaggggagacaagagggatggtgtcgagattcaacaacggatgagcaactgtttaggtgtgaactatccgtcgaaaaaagcactgtgctgcagtccgagttggaatcatgtaaagaactccaagaactggagccagaaaacaaatggtgccttctcacaattatcctcttaatgcgcgcactcgatcccctgttgtacgaaaaagagactctgcagtatttccagaccctgaaagcggtggatcctatgagagctacttaccttgacgacttgaggagtaagtttttactcgagaactccgtgctgaaaatggagtatgctgaagtaagggtattacacctggcccataaggatctgaccgtcctctgtcatttggaacagctactgctggttacacatctcgatttgtcccacaatcgattgaggacgctgccgcctgctttggccgcactacgctgcctcgaggtgctccaggcttccgacaacgccattgagagcttggacggcgttacgaacctgcctagattgcaagagctccttctctgcaacaacagactgcagcagccagcggtgctgcaaccactggcaagctgcccccgtctagtgttgctaaacctgcaaggcaaccccctgtgtcaggctgtcggtatcctggagcagctggctgagctcttaccgagtgtgagctcggtgctcacttag

SEQ ID NO: 219892 - DNA, 1347 bp, synthetic construct
  misc_feature 1..1347: note = Description of Artificial Sequence: Synthetic coding sequence
  source 1..1347: mol_type = other DNA
atgagctctcctataagcaagtcccggagcttagccgctttcttgcaacaattgcgttccccaagacagccacctaggctcgttactagcaccgcctacacaagccctcagcctagagaagtgcctgtctgccccctgacggctggcggagagactcagaatgctgcagccctcccgggtccaacatcgtggccactcctcgggtctttgctgcagatcttatggaaaggcggtcttaagaagcagcacgatacacttgtggagtaccataagaagtacggcaaaatcttcaggatgaagctgggatcatttgaatctgtccatttggggagcccctgcctgttggaagccctgtatagaaccgaatcagcgtatcctcagaggttggagatcaagccttggaaggcctacagggactaccgaaaggagggctacggactcctcatcctcgagggtgaagattggcagagggtcaggtccgccttccagaagaagctcatgaagcctggggaggtaatgaaattggacaacaaaattaatgaggtgctggctgatttcatgggcagaattgacgaactgtgtgatgagagaggtcacgtggaagatttgtactcggagctgaataaatggagctttgagagcatctgccttgtactctacgagaagcgctttggcctcctgcagaaaaacgctggggacgaagctgtgaattttatcatggccatcaagaccatgatgtccacatttgggagaatgatggttacaccagtcgaactgcacaaaagcctgaacaccaaggtttggcaggatcatacccttgcttgggacacaattttcaagtcagtgaaggcttgtattgacaacagacttgagaagtattcacagcagccatccgccgactttctgtgcgatatttatcaccagaatcggttgagcaagaaagaactatacgctgccgtcaccgaattgcagctggctgccgttgagactacagccaacagcctgatgtggatactgtacaatctgtccagaaatccccaggttcagcagaaactccttaaggagatacaatcagttctccctgaaaaccaagtgccgagagccgaggatctgagaaacatgccctatctgaaagcttgcctaaaggagtccatgcgactcacccccagtgtcccctttacgacaagaactctggataaagccactgtcctgggggagtacgccctgccaaaaggcatagtaaggaaatacgacattcaggctacagataatgaacccgttgagatgctgcactcaggcacactcgtccctagccgggagctacccatcgcgttctgccaacggtag

SEQ ID NO: 219893 - DNA, 1371 bp, synthetic construct
  misc_feature 1..1371: note = Description of Artificial Sequence: Synthetic coding sequence
  source 1..1371: mol_type = other DNA
atggataagttgaataaaataactgtgcctgcgagccaaaagcttcgacaactgcagaagatggtacacgacataaaaaataacgagggcggaataatgaataaaataaaaaagttaaaggttaaggcgcctccctccgttcccaggcgcgattatgcctcagagtcccccgctgacgaggaagaacagtggtccgacgatttcgactctgattacgaaaatcctgacgaacattcagattctgaaatgtatgtgatgcctgctgaggagaacgctgatgacagctacgaaccccctccagtcgagcaggagacacgccctgtgcatcctgctctgccattcgccaggggggaatacatcgacaaccggagcagccaacggcattctcccccattctctaagacgcttcccagcaagccttcttggccatcagagaaagctagactgacctctacgttaccggcactgacagcacttcaaaaaccgcaagtgcctcctaagccaaaggggctgctagaggatgaagctgactacgtagtaccagtcgaagataacgatgaaaactacattcaccccactgagagctcgagtccacccccagagaaagccccaatggtgaataggtctactaagccaaacagttcgaccccagcctctccaccgggaaccgcttctgggaggaacagcggagcctgggaaacaaagagcccccctcctgctgctccatctccactgcccagagctggcaagaaaccaacgacacccctgaaaactacacctgtggcttcccaacagaacgcctcctcggtgtgcgaagaaaaaccgattcccgctgagcggcacagaggcagctcacacaggcaagaagccgtgcagagccctgtctttccacccgcacagaagcagattcatcagaagcctatccccttgcccagattcacagagggcggtaatcccactgtggacggacctttgccatccttcagtagcaattcgaccatttcagagcaagaggccggtgtgctgtgtaagccatggtacgctggagcatgcgatcgcaagagtgccgaggaggccttgcaccgctcaaataaagatggctccttccttattcggaagtctagtggacatgactctaagcaaccttatactctggtggttttctttaataagcgggtgtacaatatccctgttcggttcatcgaagctacgaagcagtacgccctcggtcgaaaaaaaaacggcgaagaatatttcggaagtgtggcggagatcataaggaatcatcagcattctcctttagtgctaattgactcccaaaataacaccaaagattccacacggctcaagtatgctgtcaaggtgtcctag

SEQ ID NO: 219894 - DNA, 1287 bp, synthetic construct
  misc_feature 1..1287: note = Description of Artificial Sequence: Synthetic coding sequence
  source 1..1287: mol_type = other DNA
atgaagaggagaaaatacgggtttatctataaaacccatttgtttgggagaccaacagtccgtgtaatgggggcagataacgtgcgaaggatccttcttggagaacacaggttagtctctgttcactggcccgcaagtgtgagaacaattctgggatccggttgcctgagtaacctgcatgactcatctcataaacagcgaaagaaagtcataatgagagcgttctcccgtgaagccctcgaatgctacgttccggtcatcactgaggaggtgggatcttcactcgagcaatggctgagctgcggggagcgagggctcttggtgtaccccgaggtaaaacgactcatgtttcggatcgccatgaggattctgcttggctgtgaaccacagctagcaggcgacggagattctgaacagcaattagtggaggcattcgaagaaatgactcgcaaccttttttctttgccaattgacgtgccattctcaggcctctaccgcggtatgaaggcgagaaacttaattcatgctcgcatcgaacagaacatacgtgcgaaaatctgcggacttcgagctagtgaagcaggtcagggctgcaaagacgccctccagttgcttatcgaacactcttgggaaaggggtgaaaggctggacatgcaggccctcaagcagagctctacggagcttctcttcggcggtcacgagactacagcctctgccgcaacttcacttatcacatatttgggcctttaccctcatgtacttcaaaaggtgcgggaggagctgaagagcaaaggcctgttatgcaaatccaaccaagacaacaaactagatatggaaatcctcgaacagcttaaatatattggctgtgtgattaaggagacactgcgtttaaacccaccagttccgggaggctttagggtggctcttaaaactttcgagcttaacggctaccagataccaaagggctggaatgtgatttacagtatatgtgacacccacgatgttgcggagatctttacaaataaggaagagttcaatcctgaccgctttatgctgccccacccagaggacgccagcaggttttccttcatccctttcggtgggggtttgcggagctgtgtggggaaagagtttgccaagattctgttgaagatctttaccgtcgaactcgcccgacattgcgactggcagctgctcaacggaccccctactatgaaaacctctcctactgtgtatccagtggataatctgcccgctcggttcacacactttcacggtgagatatag

SEQ ID NO: 219895 - DNA, 1287 bp, synthetic construct
  misc_feature 1..1287: note = Description of Artificial Sequence: Synthetic coding sequence
  source 1..1287: mol_type = other DNA
atgaaaagaaggaaatacgggtttatatacaagacccatctgttcgggcgacccacagtcagggtaatgggtgcagataacgtgcggcgtatccttttaggcgaacaccggttggtctccgtgcactggccagcatccgtgagaaccatcctgggcagtggctgcctgtccaacctccatgactctagtcataagcaaaggaagaaagtgatcatgagggctttttccagggaagctctggagtgctacgttcccgttattacagaagaggtcggctccagcctcgaacagtggctctcctgtggcgaacgcggactgcttgtgtaccccgaggtaaaaagactgatgtttcggatcgcgatgcgaatactgctcggatgcgagccacagttggctggcgatggcgactctgagcagcaacttgtggaggccttcgaggagatgacacgaaatcttttctccctcccaattgatgtcccattttccgggctttacaggggaatgaaggcacgtaacctgattcacgcccgaatcgagcagaatattcgtgcaaagatctgcggactgcgtgcttcagaggcgggtcagggatgtaaagacgctctgcagttacttatcgagcattcttgggagcgaggggaacggttggatatgcaagctctgaagcagtcttcaacagaactcttattcggtggtcacgaaacaactgcttccgctgcaactagtctgataacctatctggggctgtacccccacgtgttgcagaaagtacgggaagaactgaaatccaagggcctcttatgcaaatccaaccaagacaataagctagacatggagatattggagcagctgaaatatatcgggtgcgtgattaaggagactttaagactgaatccaccagttcctgggggatttagagttgccctaaaaacatttgagctgaatggataccagatccccaaagggtggaatgtcatctattctatttgcgacactcacgacgtggccgagatattcaccaacaaggaggaattcaacccagatcggttcatgcttccccacccagaagatgcctccaggttctcgttcatccccttcggcggaggactccggagctgcgttggaaaagaatttgcgaagattctcttgaagatatttacagtcgagctggccagacactgcgactggcagctactcaacgggccacctaccatgaagacttcccccactgtgtatcccgtggacaatttgccagccaggttcacccacttccatggcgaaatatag

SEQ ID NO: 219896 - DNA, 1569 bp, synthetic construct
  misc_feature 1..1569: note = Description of Artificial Sequence: Synthetic coding sequence
  source 1..1569: mol_type = other DNA
atgttcccctgggggctgagctgcctgagtgttttgggcgctgcgggaacagccctactgtgcgcaggtcttctcctttctctcgcgcagcatctgtggactctgagatggatgctaagcagagacagagcttccacacttccattgccaaaaggaagcatgggctggccattcttcggagaaacactgcactggcttgtgcagggcagcagatttcatagcagtcgccgagaaagatacggaaccgtcttcaagactcatctgctcggaagaccggtgattagagtttcaggtgctgagaacgtgcgaactatcctactcggtgaacaccggttagttcggtctcagtggccccagagtgctcatattctgctaggaagccatacgcttctgggcgcagttggtgagccacaccgcaggcgaagaaaagtactggctcgcgtcttctccagagccgctcttgagcgatatgtgccacgcctgcaaggagccctgcgccacgaggtgcgcagctggtgtgctgcaggaggtccagtaagcgtctacgatgcatcgaaagcactcacatttcgcatggctgcccgtatcttgttggggctcaggctcgatgaagcgcaatgtgctacccttgctcgtacatttgagcagctggtggagaatctcttctcccttcctctggatgtgcctttcagtgggctgagaaaaggcattagagcgcgagatcagctacataggcacctggaaggtgccatcagcgaaaagctgcatgaggataaggcagcagaaccgggagacgccctggatctcattattcactcagccagagaattaggtcatgagccttccatgcaagagctgaaggaaagcgctgtcgagctcctgtttgccgcttttttcaccacagctagcgcctcgacctcactagtgctgctccttctgcagcatcctgctgcaattgccaagattcgggaagagctggtagcacagggactgggaagggcctgtgggtgcgcccctggcgctgctggcggttccgagggccctcccccagactgtggttgtgagcccgacctctctctggctgccttaggacgattaagatatgtggattgcgtggttaaggaggttcttagactgcttccacccgtgagtggcggatacagaaccgcattgcgcacttttgaactggacggctaccagataccaaaaggctggtctgttatgtatagcatcagggacacccatgagacagccgctgtttaccgatcccctcctgaggggtttgacccggagcggtttggggcagctagagaggatagcaggggtgcgagctcacggtttcattatatcccgttcggcggtggggcaaggtcttgtctgggacaggagctcgcccaggcagtcttgcaactgctggccgtagagttagtgagaaccgccaggtgggaactagccaccccagcctttcctgctatgcagaccgtcccgatcgtgcaccctgttgatggactgagactgttttttcaccccctcacgccgtccgttgccggtaatggcttgtgtttatag

SEQ ID NO: 219897 - DNA, 1596 bp, synthetic construct
  misc_feature 1..1596: note = Description of Artificial Sequence: Synthetic coding sequence
  source 1..1596: mol_type = other DNA
atggccgcactgggctgcgcaagactgcgctgggcccttagaggtgcagggcgtgggctctgcccacacggcgcaagggctaaggctgccatccctgccgcactgccgagcgataaggcgactggcgcacccggtgccggacccggtgtacgccgtagacagaggtcattggaggagatcccacgcctagggcagcttagattcttttttcagctctttgtccagggatacgcactgcagctgcatcaacttcaagtcttgtataaggctaagtatggtccaatgtggatgtcttatcttgggcctcaaatgcatgtcaatctggcatctgcgcctctgctagagcaggtgatgcgacaggaggggaaatatccggtgcgcaacgatatggagctgtggaaagagcatagagatcagcacgacctgacctacggcccatttacaacggaaggtcaccactggtaccaactcaggcaggccctgaatcaacggcttctgaaaccagccgaggctgccttatacacggacgccttcaatgaggttatagatgacttcatgactcggctggaccaattacgcgcagagagtgcttcaggcaaccaggtctcagatatggcacaacttttttactacttcgcgttagaagcaatctgctacattctattcgagaaacgcatcgggtgtctgcagagatctattccagaggacaccgttacttttgtacgctcgattggactcatgttccaaaactctctgtacgcaacttttctgcctaagtggactcgtccagtgctgcctttctggaaaagatacctggatgggtggaatgccatctttagtttcggaaagaagcttatcgacgagaaattggaggatatggaagcacaattgcaagccgcaggaccagacgggatacaggtctctgggtatttacacttcttgctggcttccggtcaacttagtcccagagaagccatgggctcactcccggagctgctgatggccggagtggatactacatcgaataccctgacttgggctctttaccatctgtcaaaagaccctgagattcaggaagccctccacgaagaggtcgtcggggttgtcccggctggccaggtgcctcaacacaaggattttgcccacatgcccctgctgaaagccgtcctcaaggaaaccctcagattatatcctgtggttcctacaaattccagaattatcgagaaagagattgaagtggatggctttctgttcccaaaaaatacccagtttgtcttttgccactacgtagtgtctcgtgacccaacggccttctcggaacccgaaagctttcagcctcacagatggctgcgcaatagtcagcctgcgacccctaggattcagcatccgttcgggagtgtgccattcgggtacggtgtgagagcctgtctgggccgacgaattgcggaactggagatgcagttgctgctggcaaggctgatccagaagtacaaggttgtgctggctcctgagaccggtgagttgaaatcagtggcccgaatagtgttagtaccaaacaagaaggtcggccttcagtttctgcagcgtcaatgctag

SEQ ID NO: 219898 - DNA, 1572 bp, synthetic construct
  misc_feature 1..1572: note = Description of Artificial Sequence: Synthetic coding sequence
  source 1..1572: mol_type = other DNA
atgagtttccataaagaggacggcgtaaatagtctctgtcagaaagctctacatatcgtcactgagctgtgcttcgcaggtcaggtggagtgggagaagtgcagcggaatattcccccgagataggggatcacaagggggatcaagtaccgacatcagcgttagtctgctagccgtggtagtgagcttttgcggtttggccttgctcgtggttagtcttttcgtgttttggaaattgtgctggccctgctggaaatcaaaaccggtgacctcaaacattaccactctcccacagtctatctcgtctgcgccaactgaggtcttcgagaccgaggaaaagaaggagattaaggagaacgaaaaacctgcagtaaaagccatcgagccagccatcaagatctcgcacacttcacccgacatcccggctgaggtacagacagcactaaaagagcacctgattaagcacgcccgagtgcaaaggcaaattaccgaacccacgtcatccacaaggcattccagctttagaaggcacctgcccagacagatgcaggtcagcagcgtcgattttagcatgggcacggagccggtcctgcagcggggtgagacaaccacttcaattggtcggatcaagcctgagttgtataagcaaaaaagcgtggacagtgaaggaaatcagaacgaggacgtcaaaatctgcggaaaactgaatttcaccctgcagtacgactacgaaaatgaactgctcgtcgtcaaaatcattaaagctctggacctacctgccaaagactttacagggacttctgatccatacgtgaaaatgtacttgctgcctgaccggaagaaaaaattccaaactcgagtccatcgcaagactctgaatccccttttcgacgaaacattccagttccccgttgcttatgatcagctctccaaccgcaagctgcacttttccgtttacgattttgaccgattctcaaggcatgatatgatcggagaagtgattctggacaacctatttgaggtcagcgatcttagcagagaggcgaccgtgtggaaggacattcactgtgccacaaccgagtccattgaccttggagagataatgttctccttgtgctacctgcctacagccggacgcatgacactcaccgtcatcaagtgtaggaacttgaaggcaatggacatcactgggagtagtgacccctatgttaaggtctcccttatgtgcgagggaagacggctgaagaaaagaaagactacgaccaaaaaaaacaccctgaacccagtttacaatgaagctatcattttcgacattccccctgagaatgttgatcaagtcagtctatccattgctgtcatggactatgatcgggttggacacaacgaagtgattggcgtgtgcaggacaggcctggacgcagagggtctaggaagggaccattggaacgaaatgcttgcttatcatcgaaagcctatcacccactggcatccactgctcgagctgcctggccgagcgacaagttttgactcccaggggagttgtccatctccaaaacctccaagcacaccctag

SEQ ID NO: 219899 - DNA, 1512 bp, synthetic construct
  misc_feature 1..1512: note = Description of Artificial Sequence: Synthetic coding sequence
  source 1..1512: mol_type = other DNA
atggcccttatacctgatctggctatggaaacctggctgctgctggccgtgtctttagtgctgctgtatctctacggcactcattcacacgggctgtttaagaagctcggtataccaggacccactcccctaccatttctgggcaacattctctcctaccacaaaggattctgtatgttcgatatggaatgtcacaagaagtacggcaaggtttgggggttttacgatggtcagcaacctgtgctggcaattactgacccggacatgatcaaaaccgtgctcgtgaaggagtgctattccgttttcaccaatcgcaggccatttggaccggttggcttcatgaagtcagccatcagcatcgccgaagacgaggagtggaaaaggctgcggagtctgctgtcccccactttcacaagcggaaaactgaaagaaatggttccgataatcgcccagtatggcgacgtattggtgaggaatctgcgacgagaggcagagacggggaagcctgttaccctcaaggatgtgtttggagcctacagcatggacgtcatcaccagcacgtctttcggggtgaatatcgattcactgaacaacccacaggatcccttcgtcgagaacaccaaaaagttgctgagatttgatttcttggatccatttttcctttccataaccgtgttcccctttttgataccaattctggaggtactcaatatttgcgtcttcccaagggaggtgactaatttccttaggaaaagcgtgaaacggatgaaagagtctagactggaagacacacaaaagcatcgggtcgacttcctccagcttatgattgactctcagaactccaaagagactgagtctcataaggctctctctgacctggaactagtggctcaatctattatattcatctttgccggttatgaaactacttcttcagtcctgtctttcatcatgtatgaactggcaacccatcctgacgtgcagcagaaactgcaggaggagatcgatgccgtgctgcccaacaaggcaccccctacatacgatactgttctgcagatggaatatctggacatggtggtaaacgaaactcttcgactgttcccaatcgctatgcgcctcgagagagtgtgtaagaaagacgtcgagattaacggtatgtttatccctaagggcgtggttgtaatgattcctagctacgctctgcaccgcgaccctaagtactggaccgaacccgagaaattcctacctgaacgcttcagtaagaagaataaagacaatatcgacccttatatttataccccatttggatccggccctagaaactgtatcggcatgaggttcgcactgatgaacatgaagctggctctcatcagggtgcttcaaaacttcagcttcaaaccgtgtaaggagacccaaatccctctgaagttgagcctcggtggcctgctgcagccagaaaagcccgtcgttctcaaggtggaatcgcgggatggcaccgtgtccggcgcttag

SEQ ID NO: 219900 - DNA, 1062 bp, synthetic construct
  misc_feature 1..1062: note = Description of Artificial Sequence: Synthetic coding sequence
  source 1..1062: mol_type = other DNA
atggccttaatccccgatctcgctatggaaacatggttactgctggctgtaagcttagtgttgctgtatttagtgtttggcgcatactccatggatgtgattacctctacttctttcggcgtgaatatagatagcctgaataatccccaggacccctttgtcgagaacacgaagaaacttctccgctttgacttccttgatcccttttttttgtctattactgttttcccattccttatcccaatcttagaagttctcaatatctgcgtttttcctcgtgaggtcaccaactttctgcgaaaatccgtaaagagaatgaaggagagcaggctagaggacacccagaaacaccgggtggattttttgcagttgatgatcgattcacaaaactcaaaggagactgagagtcacaaggcactgtccgatctggagctcgtggcccagtccatcattttcatattcgccggttacgaaacaaccagctctgtactgagttttattatgtatgaactggcaacacacccagacgtccagcagaagctgcaggaggagattgatgctgtgctcccaaacaaagcgcctcccacttacgacaccgtgttgcagatggagtatttggatatggtggttaatgaaacgctcagattattcccgatcgctatgcggctggaaagagtgtgcaagaaagacgtggagatcaacgggatgttcattcccaaaggagtagtagtaatgatccccagctacgcgctccacagagatccaaagtactggacagaacctgagaagtttttaccagaaagatttagtaagaagaataaggacaacattgatccctatatatatacaccttttggaagcggcccacggaactgtattgggatgaggtttgcactgatgaacatgaaactcgccctgatacgggtcctgcagaactttagcttcaaaccttgtaaagaaacacagatcccactcaaattatcgttaggagggctgcttcaaccagagaagccagtggtgctgaaagtggaaagtagggacggcactgtaagtggtgcatag

SEQ ID NO: 219901 - DNA, 240 bp, synthetic construct
  misc_feature 1..240: note = Description of Artificial Sequence: Synthetic coding sequence
  source 1..240: mol_type = other DNA
atggtgcctataatcgcgcagtatggagatgtacttgtccgcaacttgcggagggaggccgaaactggaaagcccgttacccttaaagacgtgtttggggcatattccatggacgtcatcactagtacctccttcggggtgaacattgacagtctgaacaacccacaagaccccttcgtcgagaataccaaaaagctgctgagattcgactttctggaccctttttttctcagtatctag

SEQ ID NO: 219902 - DNA, 1068 bp, synthetic construct
  misc_feature 1..1068: note = Description of Artificial Sequence: Synthetic coding sequence
  source 1..1068: mol_type = other DNA
atggctaagcttattgccttaaccttactaggcatgggacttgcgcttttccggaaccatcagtcatcctaccagacacgactgaacgcactaagagaggtacagcctgtggagttgcctaactgcaacctggtcaaggggatagagactggctctgaggacctggagatccttcccaacggtctggcctttattagcagcggacttaaatatccaggaattaagtccttcaatccgaatagtccgggtaaaatcctcctcatggacctgaatgaggaagaccccaccgtgctcgagctcggcattactggtagcaagttcgacgtgagttcgtttaacccacacgggatctcaacgttcacagatgaagataatgccatgtaccttttggtagtgaaccaccccgacgctaaatcaactgtggagctttttaagtttcaggaggaggagaagagcctgttgcacctgaagactatccggcacaagttgctccctaacctgaatgacatagtcgcagttggccctgagcatttttacggcaccaacgatcactacttcctggacccttaccttcagtcttgggagatgtacttgggtttagcatggtcatatgtggtttactacagtcctagtgaggtgcgggttgtcgcagagggtttcgacttcgctaacggaataaatatttcccctgatgggaagtatgtctacatcgccgagctgctggctcacaaaatccatgtgtatgagaagcacgcgaattggaccctgaccccactcaaatctctggattttaatacgttagtggataatatctccgtggatccggagacaggtgacctgtgggtggggtgccaccccaacggcatgaagatttttttttatgactctgagaatccccctgcctctgaggttctgcgaatacagaatatactgaccgaggagccgaaagtcacacaggtgtacgccgaaaatgggaccgtattacagggcagcacagtggcttccgtatataaagggaagctgttaattggcaccgtctttcacaaggcgctttactgtgaactctag

SEQ ID NO: 219903 - DNA, 1263 bp, synthetic construct
  misc_feature 1..1263: note = Description of Artificial Sequence: Synthetic coding sequence
  source 1..1263: mol_type = other DNA
atggaccttattcctaattttgcaatggaaacttgggtgctggtggccaccagcctagtgctcctctacatttacggcacgcactcccacaaattgttcaagaagttaggcatacctggaccaacccctctgccattcctgggcaccatcctcttctatttgcggggactgtggaactttgatagagagtgcaatgagaaatacggagaaatgtggggcctctatgagggccagcagcctatgctagtcattatggatcctgatatgatcaaaacagtcctggtaaaggagtgctatagcgtgtttacaaaccagatgcccttggggccaatgggttttctaaaatctgcactgagctttgccgaggacgaggagtggaagcggatccgcacattactcagccccgcatttacctccgtgaaattcaaagagatggtgccaattatctctcagtgcggcgatatgcttgttcgtagcctcaggcaggaggccgaaaacagcaagagcataaacttgaaagactttttcggcgcttacacaatggatgtgattacagggacattattcggtgttaatctggacagcctgaacaatccccaagaccccttcctgaagaatatgaaaaagttgttgaaattggacttcctcgatccgttcctgcttctgatctccttatttccgttcctgacgcccgtctttgaggcactcaacattggattgtttcctaaagatgtgacacactttctgaagaattctattgaacgaatgaaggagtctaggctgaaggataagcagaagcacagggtcgactttttccaacaaatgatagattcccagaatagcaaggagacaaagagccataaggcgttgtccgaccttgaactcgtagcacagagcattatcatcatattcgcagcctatgacaccacttctactaccttgccctttattatgtacgagctggcaacccatcctgacgtccaacagaaactccaagaggagattgacgcagttctcccgaacaaggcacccgtgacctacgacgctctggtgcagatggagtatctagatatggttgttaatgagactcttcgcctgtttccagtcgtcagcagggtgaccagagtttgtaagaaagacatagaaatcaatggcgttttcattcctaaaggcctcgcagtgatggttcccatctacgctttgcaccacgatcctaagtattggacggagccagagaagttctgccccgaaagaagtcattag

SEQ ID NO: 219904 - DNA, 843 bp, synthetic construct
  misc_feature 1..843: note = Description of Artificial Sequence: Synthetic coding sequence
  source 1..843: mol_type = other DNA
atgaatctggagaccggtaatgggccacaccacttcccgatgtggcgctatgtaggagagaagcctgaggccggatctagggaacaacaagtgcaccaactcgagagatttctgtggggcctgcatcacggctgcaaccattggcatatcatctggagcgaactcggtttttctcagcagagcacgcgatctttgtcagagaagtacgaagaggcttttaagattgggttcttcggatcattgttcaccttaaatatacagtcattggcagtgctcccacgacctgaatgtatggtgcggtcagggctcaccgagaccagcacatcttgggtgcgcgttattttgttacctcagcccccagaggagctcgggcttcagcaccgagttgatttctttcagcagatgatcgactcccagaattcaaaggaaaccaaaagccataaagccctaagcgatctagaattggtggctcagtccattattattattttcgccgcttacgataccacatcgacaaccttgccatttataatgtatgaactcgcaacacatccggatgtacagcagaaactgcaagaggagatcgacgcagtgttgccaaacaaagcgccagtgacttacgatgcactggtgcagatggagtaccttgatatggtcgtgaacgaaaccctacgcctcttcccagtggttagccgagtgacaagggtctgcaaaaaagacatagaaattaacggagtgttcattccaaaagggctggctgttatggtgcctatctacgcactccatcatgatccaaagtactggacagagccagagaaattctgtccagagagatctcactag

SEQ ID NO: 219905 - DNA, 1512 bp, synthetic construct
  misc_feature 1..1512: note = Description of Artificial Sequence: Synthetic coding sequence
  source 1..1512: mol_type = other DNA
atggatcttatcccaaactttgcgatggaaacttgggtcttggtcgctactagcctggttctgctttatatatacggcacccactcacataagctatttaagaagttgggtatccccggaccaacaccactacctttcctcggcacaattctgttctatcttcgcggtttgtggaattttgaccgtgagtgcaatgaaaaatacggagaaatgtgggggctctacgaggggcagcagcccatgctggtgatcatggaccctgacatgataaagacggtcctggttaaggaatgctattccgtatttactaaccagatgccactggggcctatgggcttcctgaagtcagcattgagcttcgcggaggatgaagagtggaagcgaatccgaactctcttgtcacctgcatttaccagcgtaaaattcaaagagatggtgccaattatctcacagtgcggtgatatgctggtccgatccctgcggcaggaagctgaaaacagcaagtctatcaatctcaaggatttttttggcgcttataccatggacgtgattacaggcaccttgtttggcgtgaatctggacagcttgaacaatccacaggacccatttctgaaaaacatgaaaaaacttctaaagctggacttcttagacccgttcctgctgcttatatccttgttcccttttctgactcccgtattcgaagccctcaatatcggcctcttccctaaagatgtcactcatttcttaaagaatagcatcgagcgaatgaaagagtctagactgaaggacaaacaaaaacatcgcgtggactttttccagcagatgatagatagccagaacagcaaggagacaaaatcccataaggctctgagtgatttagagttagtggcccagtcaattatcataatcttcgctgcatatgacactacgtccactactttgcccttcatcatgtatgagcttgccactcacccagacgtccagcaaaaactgcaggaggagatcgacgctgttctccccaacaaagcacctgttacatacgatgcacttgttcagatggagtatctcgacatggtggtcaacgagactctgaggctcttccccgtggtgagtcgggtgaccagagtttgtaagaaggatattgaaattaacggggtgttcatcccaaagggccttgctgtcatggttcctatctacgctcttcatcatgacccgaagtattggactgagccagagaaattctgccctgagcgtttctccaagaagaacaaggacagcatcgatctatatcgctacatacccttcggggcaggccctcggaactgcattggtatgaggtttgcactgaccaatatcaagttggcagtcatccgggcactccaaaatttcagctttaaaccgtgtaaggagacccaaattcccctgaaacttgataatctccctattctgcaacctgagaaacccatcgtgctgaaggtgcacctgcgagacgggattacatccggcccttag

SEQ ID NO: 219906 - DNA, 381 bp, synthetic construct
  misc_feature 1..381: note = Description of Artificial Sequence: Synthetic coding sequence
  source 1..381: mol_type = other DNA
atggatctcatccccaactttgcgatggagacctgggtcttggtggctacctccctcgtattgctgtatatctatggtacacactcacacaagctttttaagaaactgggaattcccggacctaccccactccccttcctagggactattctgttctatttaagaggcctctggaattttgaccgggaatgtaacgagaagttcttatggggactacaccacggctgtaatcactggcacatcatctggtcagaactgggatttagtcagcaatcaactcgttctctgagtgaaaagtacgaggaggccttcaagattggatttttcggctccctgtttaccctcaacatcaccttgtcaatcagctaccccagtttttag

SEQ ID NO: 219907 - DNA, 225 bp, synthetic construct
  misc_feature 1..225: note = Description of Artificial Sequence: Synthetic coding sequence
  source 1..225: mol_type = other DNA
atggacctgatccctaattttgctatggagacctgggtcctcgtggccacgtctcttgtgcttctctacatctatgggacacatagtcacaagctgttcaaaaagttggggatccccggaccaactccacttcctttcctgggtacaatcctgttctatctgcgaggtttatggaactttgatagggagtgcaacgagaaatacggagaaatgtgggggccttag

SEQ ID NO: 219908 - DNA, 435 bp, synthetic construct
  misc_feature 1..435: note = Description of Artificial Sequence: Synthetic coding sequence
  source 1..435: mol_type = other DNA
atgcctaaagtgaagcgctcccggaaagcacccccagatggctgggagttaattgaacctaccctggatgagttagatcagaaaatgagggaggccgagacagagccccacgagggaaagaggaaggtggagtctctgtggccaattttcagaatccaccatcagaaaacccgatatatcttcgatttgttctataagcggaaggctatcagcagggagctatatgagtactgcataaaagaaggatatgctgacaaaaacctcatcgcaaagtggaagaagcagggatatgaaaatctctgctgcttgaggtgcatccaaactagggacacaaacttcggtactaattgcatttgtagggttcctaaaagcaagctggaggtcgggagaattatcgagtgtacacactgcggatgcagaggctgttctggctag

SEQ ID NO: 219909 - DNA, 120 bp, synthetic construct
  misc_feature 1..120: note = Description of Artificial Sequence: Synthetic coding sequence
  source 1..120: mol_type = other DNA
atggatctcatacctaacctcgctgtcgagacctggttgcttctagccgtgtcactcgtgctgctctacttgatgcgggtccccaaaagcgctaaaagccctctgactaagcaaacttag

SEQ ID NO: 219910 - DNA, 1479 bp, synthetic construct
  misc_feature 1..1479: note = Description of Artificial Sequence: Synthetic coding sequence
  source 1..1479: mol_type = other DNA
atgcaactgctgatgctcgaactgttgctgttgttcattgtgtacgggacgcggacccacgggctgttcaaacgcctggggatcccagggcctacacctctccctctgctgggaaacgtcttgagctacagacaaggactctggaaattcgataccgaatgctacaaaaagtacggcaaaatgtgggggacctacgaggggcaactccccgtgttggccatcaccgaccctgacgttatccgcactgtactggtaaaggagtgctatagcgtcttcactaataggcggtccctggggcctgtgggttttatgaagtctgcaataagcctggcagaggatgaagagtggaagaggattcgatcactgctctcccccacgtttacttctgggaagttgaaagagatgttccctataattgctcagtatggggacgtcttggtcaggaacttgagacgcgaggccgagaaggggaagcccgtgaccctgaaagatatctttggcgcatactcaatggatgttattaccggcacctcgtttggggtcaatatagatagccttaataacccccaggatcccttcgtcgaaagtacaaagaagtttctgaagtttggtttcctcgaccctttatttcttagtatcattcttttcccgtttttgaccccggtattcgaagcattaaacgtgtctctgttccccaaagacaccatcaactttctcagcaagagcgtgaatagaatgaagaagagtcgtcttaatgataagcagaagcatcggctggatttcctccagttaatgattgatagccagaattccaaagaaactgagagccacaaggccttaagtgacttggagctggctgcccaaagtatcatattcattttcgcaggttatgagaccacctcatcagtcctgtcatttacgctgtacgagcttgccacgcatcccgacgtccagcagaagttacagaaggagattgatgcagttctgcccaacaaggcaccgccaacctatgatgcagtcgtccagatggaatatctggatatggtggttaacgagaccttgaggttattcccagtggcgatacgactggagcggacgtgcaagaaggatgtggagatcaatggggtttttattcccaagggaagcatggtggttattccaacatacgccttgcatcatgaccccaaatattggactgagccggaggagttccgaccagaacggttctccaagaaaaaggactccatagacccctatatctatactcctttcgggaccggcccaagaaactgcattgggatgcgttttgcacttatgaacatgaaactcgctttgattcgcgtattgcagaacttcagctttaagccctgcaaagagacgcaaattcctctgaagctggatacacaaggcctgcttcagccagaaaaacctatcgttctgaaagtcgattccagggacggcactctttctggggaatag

SEQ ID NO: 219911 - DNA, 1602 bp, synthetic construct
  misc_feature 1..1602: note = Description of Artificial Sequence: Synthetic coding sequence
  source 1..1602: mol_type = other DNA
atggatcttataccgaatctcgccgtggagacgtggttgctcctcgccgtgtcactcattctgttatacttatatggtacgcggacacatgggctgtttaaaaagctgggaattccaggtcccacccccttgccgttcttaggcaacgcgctgtcattccggaagggttactggacatttgacatggagtgctataagaaataccgcaaggtgtgggggatttacgactgccagcaacctatgctagccatcaccgacccagatatgattaaaactgtcttggtgaaggagtgctactcggtcttcaccaaccgtagaccttttgggcctgtggggtttatgaagaacgcaatatccatcgctgaggacgaggagtggaaacggatcagatctttgctgtctcctaccttcacctccggcaaattgaaagaaatggtgcccattattgcacagtacggtgatgtccttgtgaggaatcttcgaagagaagctgagaccgggaagcccgtgaccctgaagcacgttttcggagcatactcaatggatgtcataactagtactagttttggtgtgtccattgactcccttaataacccccaagacccgttcgtagaaaatacaaagaaactccttagatttaacccactggatccctttgtactgtcaataaaagttttcccgttcctaacaccaatcctggaagccttgaatattacagtttttcccagaaaagtgatcagttttctgaccaagtctgtgaaacagattaaagagggaagactcaaggagacacaaaagcacagggtcgactttctgcaacttatgatcgattcccagaattccaaagacagcgagacccacaaagctctctccgacctggagctgatggcacagtctatcatctttatctttgcgggttatgaaacaacttcctcagtgctgtccttcatcatctacgagctggcgacccacccggatgtgcagcagaaggtgcagaaagaaattgataccgttctcccgaataaggcccctcccacatacgatacagtgctccagctggagtacttggacatggtcgtgaatgagacactgcgcctctttccagtcgccatgcggctggaacgggtttgtaagaaggatgtggaaattaatggcatgtttatccctaagggggtggtggtgatgatcccttcctatgtgctgcatcatgaccccaagtattggcgagaacccgaaaaatttctgcccgaaagattttcgaagaagaacaaggacaatatcgatccttacatctatactccattcggcagtggtcctagaaattgcattggtatgcggtttgcgctggtgaatatgaaactggcactggtccgtgtgctgcagaactttagttttaaaccttgcaaagaaacccagatccccctgaagctaagattcgggggtttgctacttacagaaaaaccgatcgtacttaaggccgagtctcgggacgagacctttgtagatatggaaccgatccacatggattttttgcggtctcttgcctttcaggggcctcacctttgtttcttctgggagctcctgtgcccaaccatcaggtag

SEQ ID NO: 219912 - DNA, 1512 bp, synthetic construct
  misc_feature 1..1512: note = Description of Artificial Sequence: Synthetic coding sequence
  source 1..1512: mol_type = other DNA
atggaccttattcccaatctggccgtcgaaacctggctgctgttagccgtgagcctcattttgttgtatctctatggcaccagaacccacgggctgtttaaaaagctgggcatcccaggccctactcccctgccctttctgggtaacgctctgtcctttcgtaagggttactggacttttgacatggaatgttataaaaagtaccggaaggtgtggggcatttatgactgtcagcagcctatgttggcaattaccgacccagatatgatcaaaacagtgctggttaaggagtgctactccgtcttcactaaccggcgtccttttggcccagttggatttatgaaaaacgcaatatctattgcagaggatgaagaatggaagcggatcaggagtctgctgtcccctactttcacttctggcaagctgaaagagatggtgccaatcatcgcacagtatggagacgtcctggtaaggaacctgcggcgtgaggccgagacaggcaaacctgttaccttaaaacatgtgttcggtgcttacagtatggacgtcattacgtctacctcatttggtgtgtctatcgactctctgaacaatccccaggatccttttgtggaaaacacaaaaaaactgttgagattcaacccattagacccatttgtgttgtctatcaaggtgttccctttccttaccccgattcttgaggccctgaatataaccgtgttcccaaggaaagtgatctcatttctcaccaaatccgtaaagcagatcaaagagggcagactgaaggagacccagaaacatcgggtggactttctgcagctcatgattgactcgcagaactctaaggattcagagactcacaaggcactgtctgatctggaacttatggcccagtccataattttcatcttcgcgggttacgaaaccacctcctctgtgctgtctttcattatctacgagctggcaactcaccctgatgtgcagcaaaaggtgcagaaagagatcgacaccgtgctaccaaacaaggcacctccaacctacgacaccgtcctccagctggaatacctagatatggtggttaacgaaaccttgaggttatttccggttgccatgaggctggagagagtttgcaagaaagacgtcgagatcaacgggatgtttattcccaagggagtggtggtgatgatccccagctacgttcttcaccatgatcccaaatactggcgggagcctgagaaatttttgcccgaacggttcagcaagaaaaacaaggacaacattgatccatacatatatacccctttcggatccggccctcgcaactgcatcgggatgcggtttgcacttgtgaacatgaagcttgcactggtgcgcgttctgcagaatttttctttcaaaccttgcaaggaaactcagatccctctgaaattgcgatttggtggtctgctactgactgagaagcctatcgtcctgaaagctgagagccgagatgaaaccgttagtggggcatag

SEQ ID NO: 219913 - DNA, 1410 bp, synthetic construct
  misc_feature 1..1410: note = Description of Artificial Sequence: Synthetic coding sequence
  source 1..1410: mol_type = other DNA
atggaacttatctccccaaccgttattatcatcttgggctgcctcgccctgtttctgcttctccagcgaaagaacctccgtcgccctccgtgcataaagggttggattccttggattggcgttggattcgaattcggcaaagcccctttggagttcattgaaaaggccagaataaagtacggccctatctttacagtatttgcaatgggaaacaggatgaccttcgtgacagaagaagaaggcattaacgtttttttaaagagtaagaaggttgatttcgagctggcagtgcagaatattgtgtaccggaccgcaagcattccaaaaaatgtgttcctggccctgcatgagaaattgtatatcatgctaaagggcaaaatggggaccgtgaatctgcaccagttcaccggccagctgactgaggagctacatgaacagctcgaaaatctgggcacccatgggacaatggacctcaataatctcgtgaggcacctgctgtatcctgtcacagtgaatatgctgttcaataagtcactgttcagcaccaacaaaaagaaaatcaaggaattccatcaatacttccaggtgtacgatgaggattttgagtatggcagccagcttccggaatgtcttctgcggaactggagcaaatccaagaagtggttcctggaacttttcgagaagaacattccagatatcaaggcgtgtaagagcgcaaaagataattctatgaccttgctgcaagccaccctggacattgtggaaacagagacttcaaaagagaatagccctaactacggtctgttgctgctctgggcatccctctccaatgcagtgccggtcgcgttttggacgcttgcgtatgttcttagtcatcctgacattcataaagctatcatggagggtatctcttctgtgttcggaaaggcgggtaaagataagatcaaggtgagtgaggacgatctagaaaatctgcttctgatcaaatggtgcgtgcttgagactatcaggctaaaagctcccggagtgatcactaggaaggtcgtgaagccagtagagatcttgaattacattatcccatcgggagatttacttatgctttcccctttctggttgcatcggaatcccaaatacttccctgagcccgaactgttcaagccggagagatggaagaaggctaacctcgaaaagcatagcttcctcgactgctttatggcttttgggtcaggaaaattccagtgcccggcacggtggttcgctctgctggaggttcagatgtgtatcatcctgatactgtataagtatgactgtagtctgctggatcccctccccaagcagtcctatttgcatctagttggggtgccccagccagaaggacagtgcaggatcgaatacaagcagcgcatttag

SEQ ID NO: 219914 - DNA, 1560 bp, synthetic construct
  misc_feature 1..1560: note = Description of Artificial Sequence: Synthetic coding sequence
  source 1..1560: mol_type = other DNA
atgagcgtgagtgtgctctccccgtcccgactgcttggggatgtctcagggatcttgcaagccgctagcctcttaattcttttactgctgctgattaaagcagtccagttatacctgcaccggcagtggctcctaaaagccctacaacagttcccatgccccccttctcattggctcttcggccatatccaggaactgcagcaggaccaggaactgcaaaggatccagaagtgggtcgagactttcccatccgcgtgcccccattggctttggggcggaaaagtgagagtgcagctctacgatccagattacatgaaggtcatcctcggcagatccgatcctaagtcacacgggtcataccgttttctcgccccttggattggttatggccttctgctgctgaacggccagacatggtttcaacacagaagaatgctgactccagccttccattacgatatccttaaaccgtacgtgggcctgatggcggatagtgtgagagtgatgctggataagtgggaagaactgttgggccaagattcaccccttgaagtgtttcagcacgtgtcacttatgaccctggacacaataatgaagtgtgcattctctcaccaggggagcatccaggtcgaccggaacagtcagagttatatacaagcaatcagtgatctgaacaaccttgtattttctagggttcgcaatgccttccatcaaaatgacactatttattccctcaccagcgctggcagatggacccacagggcatgccagctggcgcaccaacataccgaccaagtaatacagttgcggaaggcgcaattacagaaggagggcgaactcgaaaaaatcaaacgtaaacggcacttggactttctggacatattgctactggctaagatggagaatggcagcattttatcagataaagatctgcgagcggaggtggatacattcatgtttgaaggtcatgataccacagcctcaggcatcagctggattctgtacgccctcgctacccaccccaagcatcaagaaagatgccgagaagagatccactctctactcggcgacggtgcttctatcacttggaaccatctggaccagatgccatacaccacgatgtgcatcaaagaagcgctgaggctttacccacctgtgccaggtatcggacgcgagttaagcaccccagtcacttttcccgatgggaggagtctacctaagggcataatggtgctgctcagtatctacgggctgcatcataaccctaaagtttggccaaaccctgaagtctttgatccattccggttcgcaccaggcagtgctcaacattcccacgcctttttgccgtttagcgggggaagccgaaactgtatcggtaagcagtttgccatgaacgagctcaaagtggccaccgcgctgacccttttaagatttgagttactccctgatcccaccaggatacctatacccatcgcccgattggtgttaaaatccaaaaatggaatccatcttcgcctgcggaggcttccaaatccttgtgaggacaaggatcagctttag

SEQ ID NO: 219915 - DNA, 1563 bp, synthetic construct
  misc_feature 1..1563: note = Description of Artificial Sequence: Synthetic coding sequence
  source 1..1563: mol_type = other DNA
atgtccgtctctgtgctcagccctagcagactgctgggtgatgtctcagggatcttgcaggctgcttccctgctgattcttctgctgttactgattaaagcagtgcagctctacttgcacaggcaatggctgctgaaggccttgcagcagttcccctgtccgccttcccattggctgttcgggcacattcaggaactccagcaggaccaggagttgcagaggattcagaagtgggtggagaccttcccgtctgcctgcccacactggttgtggggaggaaaagtgcgggtgcagttgtatgaccctgactacatgaaagttatactaggtcgctcagaccccaaaagccacgggtcctaccgcttcctggccccatggattggatacgggctcctactgttgaatgggcagacctggtttcagcaccgcagaatgttgacccctgcttttcattacgatattctcaagccctatgtggggttgatggcggatagtgttcgcgtcatgctcgataaatgggaggaactgctagggcaggactcacctcttgaggtgttccagcatgtctccttgatgaccctggacacaattatgaagtgcgctttctctcatcaggggtcgatccaggtcgacagaaacagccaatcatatatccaagccatctctgacctcaacaatctggtgttctcccgtgtacggaatgcctttcaccaaaatgatacgatttattctctgacctccgctgggagatggactcaccgcgcatgccagctggcgcatcagcacacaggggatcaggtcatccaactgcgaaaagcgcagcttcaaaaagaaggtgaactggagaagatcaagcgcaaaagacaccttgattttctagacattctgctgcttgcaaagatggaaaatggtagcatactgagcgataaggacttacgcgcagaggtggatactttcatgtttgagggccacgatacaacagcttccgggatttcttggatactatacgcccttgctacccaccccaagcaccaggaacgctgccgcgaggagatccacagcctgttaggtgacggggcttccatcacatggaaccatctggaccagatgccctacactaccatgtgcatcaaagaagctttacggttgtatccccctgtgcccggaatcggacgcgagcttagcacacccgttaccttccccgatggacgttccctcccgaaaggcattatggtgctgctgagcatctacggtctgcaccacaaccccaaggtctggcctaaccctgaggtatttgaccccttccgcttcgcaccagggtctgcacagcatagccatgcttttctcccattctccgggggatcccgcaactgtatcggcaaacagttcgccatgaatgaactgaaagtggctaccgcactcactttgctccgcttcgagctactcccagacccaactcggattcctattcccattgccaggctcgtactgaagagcaaaaatggcattcatttacgactccgcagactgcctaacccttgcgaggacaaagaccagctgtag

SEQ ID NO: 219916 - DNA, 1368 bp, synthetic construct
  misc_feature 1..1368: note = Description of Artificial Sequence: Synthetic coding sequence
  source 1..1368: mol_type = other DNA
atgtcagtgtcagtcctgtccccctctagactcttgggcgacgtttctgggattttgcaagccgcttcactgctgatactcctgctgctgctgatcaaggcagttcagttgtacctgcacaggcagtggctgctgaaggcgctgcagcagttcccatgcccccctagtcactggctttttggacacattcaggaacttcagcaagaccaggagttgcagcgtattcagaagtgggtggagacttttccgtctgcatgcccacattggctctggggcggtaaggtacgggttcagttgtatgaccctgactatatgaaggtgatattgggaaggagtgatcccaagtcacacgggtcctaccggttcctcgccccatggatcggatatgggctgttgctgcttaacgggcagacatggttccaacacaggaggatgctgacccctgcattccactacgatatcttgaagccttacgtgggactgatggccgactcggtccgagttatgttggacaagtgggaggagctcctcgggcaggattcgcctctggaggtcttccaacatgtgtcacttatgactttggataccatcatgaagtgtgcttttagccaccagggcagcattcaagtcgaccggaactctcagagctatatccaagcaatttccgaccttaacaatcttgtgttttctcgagtccgcaatgcattccaccagaacgacactatctattctttaaccagtgccggacgatggacccatcgcgcttgccagctggctcatcaacataccgaccaagtcattcagcttagaaaggcacagctacagaaggagggcgaacttgagaagattaagcggaagagacatttggatttcctggatattctgcttcttgcaaagatggaaaacggctctatactgtctgataaggacttgcgggctgaggtggatacattcatgttcgaggggcatgatacaactgcgtccggaattagctggattttgtacgccctcgccactcacccaaagcatcaggaacggtgtagagaagaaatccattcgcttctgggggatggggctagtattacctggaaccatctggatcagatgccttacaccacaatgtgcattaaagaagctttgcgcctctacccaccagtgccaggtataggcagagaactgtccactccagtgaccttccctgacggccgttccctgcctaagggcataatggtcctgttatcaatctacggcctccatcataaccccaaagtgtggcctaaccccgaggtgttcgacccgttcagatttgcaccaggaagcgcccaacattcccacgcctttctccctttttccggcggaagtcggtag

SEQ ID NO: 219917 - DNA, 474 bp, synthetic construct
  misc_feature 1..474: note = Description of Artificial Sequence: Synthetic coding sequence
  source 1..474: mol_type = other DNA
atgaaggtcattcttggcaggtccgaccccaaaagtcacggctcctaccgatttctagccccatggattggctatggacttcttttgctaaatggccagacttggttccaacatagaaggatgcttactcctgccttccactacgacattctaaagccctacgtaggactcatggctgatagcgtccgcgttatgttggataaatgggaggagctcctgggacaagacagtcctttggaagtatttcagcacgttagcctcatgacgctggacactattatgaagtgcgcatttagccatcagggctcgatacaggtcgacaggcccagcgacccgacagaagaggggtccacgactgagggcggtggggctggcgaagatcaggaggaagaagcatttggattttccgggtacccacctctgggtcagaatggtgagtgggagcatttggttaggcaaggacctccttgttag

SEQ ID NO: 219918 - DNA, 1575 bp, synthetic construct
  misc_feature 1..1575: note = Description of Artificial Sequence: Synthetic coding sequence
  source 1..1575: mol_type = other DNA
atgccacagctctcgttgtcctggctcggtctcggacctgtggctgcttcgccctggctgctgctcttactcgtggggggttcctggctcctcgctcgtgtccttgcctggacctatacgttctacgacaactgcagaaggctccagtgttttccccagccccctaaacaaaactggttttgggggcatcaaggtctggtcacacctacggaggaaggtatgaaaactcttacacagctcgttactacataccctcagggcttcaagctctggctcggtccaacctttccccttttaatcctgtgtcacccagacattatccgcccaatcacctcagctagtgccgctgtggctcccaaagatatgatattctacgggtttcttaagccctggctgggagatggcctgttgctaagcggcggagataaatggtctcgtcatcggagaatgctcacccccgcatttcactttaatatcctgaaaccctatatgaagatttttaataaatccgttaatatcatgcacgacaagtggcagaggctcgcctcagaggggtccgcccgtctcgatatgttcgaacatattagtctgatgaccctcgatagcctgcagaagtgcgtgttctctttcgagtcaaactgtcaggaaaagccctccgaatatatcgccgcaattctggagctgagcgcgtttgtggaaaaaaggaaccaacagattctactccacacggattttctctattatttgacacctgatggtcaacgattccggagggcttgccacctcgtccacgactttaccgatgctgtgatacaggagagacggtgcacgctgccaacccagggcattgatgatttccttaagaataaggccaagtcaaagactctggactttatagatgtgctgctgctgagcaaagatgaagatgggaaggagttatccgacgaggatatcagggccgaagccgataccttcatgttcgagggacacgacaccacggcttctggtttgtcgtgggtcctttaccaccttgccaaacaccctgagtaccaggaacaatgtcgtcaggaggttcaggagctcctgaaggacagggagcccatcgagattgagtgggacgacttggcccagctgcctttcctcacgatgtgtattaaggagagtctcaggctccacccgccagtacccgtaatctctagatgttgcacacaggatttcgttttgcccgacgggagggtgattcccaaagggattgtctgcctcatcaacataatcggtatccactataatccaactgtctggcccgacccggaggtatatgatccttttcgctttgatcaggaaaatattaaggaacgctccccgctcgcattcatacccttctcagcgggtccacgaaattgcattggtcaggcctttgctatggccgaaatgaaagtcgtgctggccctaaccctgttacacttccggatcctgcctacgcacactgagccaagaaggaagccagagcttatcctcagagccgaaggcggactgtggctccgagtggagccgctgggggcaaactcccagtag

SEQ ID NO: 219919 - DNA, 1365 bp, synthetic construct
  misc_feature 1..1365: note = Description of Artificial Sequence: Synthetic coding sequence
  source 1..1365: mol_type = other DNA
atgccacagcttagtttgagctggttagggctgggcccagtggccgctagcccatggctccttctcctgctggtaggaggctcatggctactggcccgagtgctagcatggacctatacattctatgacaactgcaggaggctgcagtgcttcccgcagccgcctaagcagaattggttctggggccatcagggtctagtgactcctacggaggaggggatgaagacactaacacagctggttactacctacccccaagggtttaagttgtggctgggaccaacctttcccctgctgatcctttgccatccagacattatccgtcccatcacgtcggcctccgctgccgtggccccaaaagacatgatcttttacggtttcctgaagccatggctgggagacgggctgctgctgagcggcggagacaagtggtctaggcatagacgcatgctcacccccgcatttcatttcaatatcctgaaaccttacatgaagatattcaataagtctgtcaatatcatgcacgacaaatggcagaggctggcttctgaaggatcagctcgattggatatgttcgagcacatctctctgatgaccttggattctcttcagaaatgtgtgttctcctttgaaagcaattgtcaagaaaagccatcagaatatatcgccgcaatcctggagctgtcggcctttgtggagaagcgcaatcagcagattctcctgcatacggattttctgtactatttgactccggacgggcagaggtttaggagagcatgtcacctcgtgcatgacttcaccgacgctgtgatccaagagaggcgctgcactctgcccacccaggggatagacgatttcctaaagaataaagcaaagtccaagaccttggactttattgatgtgttgttgttgagcaaagatgaggatggaaaggaactctccgacgaagacatccgcgctgaagctgatacattcatgttcgagggccatgataccacagcctctggtcttagctgggtattataccacctagccaagcaccccgagtatcaggagcaatgtcggcaagaggtccaggagctgctgaaagaccgtgaaccgatagagatagagtgggacgatctcgcccagttgccctttcttacaatgtgcattaaggaatcgttacgattgcacccgcctgtgcccgtgatcagccgttgctgcactcaggatttcgtcctcccggacgggagagttataccgaaaggattaaggccacttccattccgccctcgtgagcatcagggggaagtgacgtccggtttctattcactgctgggcagagcccagaagctccacagagccggagtgcgacacggatag

SEQ ID NO: 219920 - DNA, 1575 bp, synthetic construct
  misc_feature 1..1575: note = Description of Artificial Sequence: Synthetic coding sequence
  source 1..1575: mol_type = other DNA
atgccgcagctcagtctttcctggctgggtctgggcccagtggccgcatcaccatggttgctgctgctactggtggggggttcctggctattggctagagtgcttgcctggacttatacattttatgacaattgcaggagacttcagtgtttccctcaacctcctaaacagaactggttctggggtcatcagggcctggtgaccccaacagaagagggaatgaaaacactcacacagctcgtgaccacttatccacagggctttaagctgtggctaggccctacttttccgctgctgatcctttgtcatccagacatcatccgacccatcaccagcgcctctgccgcagtcgctcccaaggatatgattttctatggtttcctaaaaccctggctaggagatggattactcttgagcggaggcgacaaatggtcacggcatagacgtatgctgactccagctttccatttcaatattttgaaaccctacatgaaaatattcaacaaatcggtgaacattatgcatgataagtggcagcgcctcgcatcagagggatcggctaggctggacatgtttgagcacatttcgctgatgaccctcgatagtctccagaaatgcgtcttcagttttgagagcaactgccaggagaagccttccgagtatatcgccgcaatccttgagttgtcagcatttgtggagaagagaaaccagcagattctactacatactgattttctgtattacttaactccggatgggcagaggtttagacgggcttgtcacttggttcacgacttcacagacgccgtcatccaggagaggcgctgtaccttgcctacacagggaattgacgatttcctgaagaataaagcaaagagcaagacactggatttcattgacgttcttctcctcagcaaggacgaggatggcaaggagttatctgacgaggatatccgggcagaggccgacacattcatgttcgaagggcatgatacaacagcatctggcctgtcttgggttctgtatcatttagccaagcaccccgagtaccaggagcaatgtagacaggaggttcaggagctgcttaaagaccgcgaacctattgagattgaatgggacgatctggctcagcttcccttccttacaatgtgcatcaaggagtcacttcgactgcatccacccgtgccggtcatatccagatgttgcactcaggacttcgtcctgcccgatgggagagttatccccaaagggatcgtgtgtctgattaatattatcggtatccactacaacccaacagtttggccagaccctgaggtgtacgacccctttagatttgatcaggagaatataaaggagagatcccccttggcctttatcccttttagcgccggacccagaaattgtatcggccaggcgtttgcaatggcagagatgaaagttgtgcttgctctgaccttattacatttcaggatactccccacgcataccgagccacggcgtaagccagaattgatactgcgagccgagggcggtctgtggttaagggtagagcccctgggggctaactcccagtag

SEQ ID NO: 219921 - DNA, 1575 bp, synthetic construct
  misc_feature 1..1575: note = Description of Artificial Sequence: Synthetic coding sequence
  source 1..1575: mol_type = other DNA
atgagtctgctatcgcttccttggctcggccttcgccctgtcgctacttctccgtggctcctactgctgctcgttgtcggctcctggctcttggctagaatattggcttggacatacgctttttacaataactgccggaggttgcagtgttttccccaaccgccaaaacggaactggttttgggggcacctcggactgatcactcctacggaagaaggcctgaaaaacagcacgcagatgagcgccacctactcacaggggttcaccatctggctgggcccaatcattcccttcattgtcctttgccaccccgacacaattaggtctatcaccaacgctagtgcagcgatcgcccctaaagataacctcttcattcgatttctaaagccgtggcttggagagggaatcctcctctcaggtggggataaatggtctcgacaccgaagaatgctgactccagcattccatttcaatatactcaagtcatacatcaccatctttaataaatctgctaacattatgctggacaaatggcaacacctcgccagtgaaggctcctcttgtttggatatgtttgagcacatttctctgatgacactggattcgctgcagaagtgcatattctcgttcgactcccactgccaggagcgcccttccgaatatattgccaccattttagagctttcggcactggtggagaagcgcagtcaacacattttgcaacatatggacttcctgtactatttaagtcatgatgggaggcggtttcatagggcgtgcaggttggtccacgactttacagacgcggtgatccgggagcgacggaggaccctcccgacacagggtattgacgacttttttaaggacaaggctaaaagcaaaactctggattttatcgacgtgttgctcctctctaaggacgaggacggtaaggctctttctgacgaagatatccgcgcagaggctgacacattcatgttcggagggcatgatacaacagcgtccggcctgtcatgggtgctgtacaacctcgcccgacacccagaataccaggagaggtgtagacaagaagtccaggaactgctcaaggatagggatcctaaggaaattgaatgggacgacctcgcacaattgcctttcttgacaatgtgtgtgaaggagtcactccgcctgcaccctccagcccctttcataagcaggtgttgcactcaggacatcgtgttgccagatggcagggtcatcccaaagggcatcacttgtcttattgacattatcggagtccaccacaacccaacagtgtggcccgaccctgaagtctacgatcccttcagattcgatccagagaatagcaaggggcgaagcccactcgcctttatcccatttagtgcaggcccacggaactgcatcgggcaggccttcgcaatggccgagatgaaggtcgtgttagcccttatgctgctgcattttcgcttcctccccgaccacaccgaacccagacgaaagttggaattaatcatgcgcgcagaaggcggtctgtggttgagggttgaaccactgaacgtcagcctgcagtag

SEQ ID NO: 219922 - DNA, 1575 bp, synthetic construct
  misc_feature 1..1575: note = Description of Artificial Sequence: Synthetic coding sequence
  source 1..1575: mol_type = other DNA
atgagtttgctttcactgccttggctggggcttaggcctgtcgccacttccccatggcttttgttgctgctggtcgtggggagctggttgctcgctcgcattctggcatggacatacgccttctacaacaattgccgcaggctgcagtgttttcctcagccgcctaaacggaactggttctggggccatctgggcctgatcacacctaccgaggaggggctgaagaattcaactcagatgagtgctacatatagccagggttttactatctggctaggtcccattattccgtttattgtgctctgccatcccgacacgatccgaagcataaccaacgcgagtgctgccatcgcaccgaaagataacctctttattcggttcctcaaaccatggttgggggaaggcatactgttaagcgggggagacaagtggagtcgtcatcggaggatgcttactcctgcatttcatttcaatatactgaagtcatacataacaatatttaacaagagcgctaacattatgctcgacaaatggcagcacctcgcgtctgagggctcatcttgcctcgacatgttcgagcacatctcgcttatgactctggacagcctgcagaaatgtattttttcttttgactctcattgccaggaaaggcccagtgaatacatagcaactatccttgaactctcggcacttgtggagaagcggtcacaacacatactgcagcacatggactttttgtactaccttagtcacgacggcagaaggtttcaccgcgcatgtaggctggtccacgactttacagacgccgttattcgcgagcggagacgcaccctgccaactcagggtattgatgacttcttcaaggataaagcgaagtcaaaaaccctggactttatcgatgtcctcctgctgtccaaggacgaggacggcaaggcgctcagcgatgaggatatcagggccgaggccgataccttcatgtttggcggacacgataccacagcttccggcctgagctgggtgctctataatctggcacggcaccccgaatatcaggaacgttgcaggcaggaagttcaagagctgctgaaggatagggaccccaaggagatcgagtgggacgacttggcgcaacttcccttcttgactatgtgtgtgaaagagtcattaagactgcaccccccagctcctttcattagccgctgttgtactcaggacattgtcctacctgacggacgagtgattcccaaggggatcacctgcctgatagatataataggcgtccaccataatcccactgtgtggccagacccagaggtgtacgatccctttagatttgaccctgaaaacagtaagggacgctctccgttagccttcatcccattctcggcgggtcctcgtaactgtatcggccaggcctttgcaatggctgagatgaaggtagtgcttgccctgatgttactgcacttccgctttctgcccgaccacaccgaacccaggcgcaaactggagctgataatgcgagcagagggcggtctgtggcttcgcgtggagcctcttaatgtttccctgcagtag

SEQ ID NO: 219923 - DNA, 1596 bp, synthetic construct
  misc_feature 1..1596: note = Description of Artificial Sequence: Synthetic coding sequence
  source 1..1596: mol_type = other DNA
atgctgcccatcacagacagactgctccacttacttggcttagaaaaaaccgcctttcggatttacgcggtatctactctgctcctgtttctcctgttctttcttttccggctgcttttgcggttcttgagactttgtcggtctttctatatcacatgcaggcgtttgcgatgctttccccagccacctaggaggaactggctcctgggccatttggggatgtatctgcctaatgaggctggcttacaagacgagaagaaagttctcgataatatgcatcatgtattgctggtgtggatggggccagtcctgccactcctggtgctggttcaccctgattacataaagcccctgctgggggcttccgccgctatcgcccctaaggacgatctgttttacggttttctgaagccctggcttggggacggactgttattgtccaaaggggacaaatggagccggcacaggcggctcctgacaccggctttccatttcgacattctgaagccttacatgaagatcttcaaccagtctgccgatataatgcatgccaagtggcggcacctggccgagggtagcgctgtgtccctggacatgttcgagcacattagcctcatgacccttgactcactccaaaaatgtgtgttctcctacaacagcaactgccaggagaagatgtccgattacatctctgctatcatagaactcagcgctctgagcgttcgacgacaatatagactgcaccactaccttgattttatctactatcgcagtgccgatggacgtagattccgacaagcttgtgacatggtgcatcattttacgactgaggtgatacaggagagacggagggccctcaggcagcagggcgcagaggcctggctgaaggccaaacagggaaagactctcgacttcatagatgtgctcctgctcgcacgagacgaggacggcaaggaactctccgacgaagacatccgagccgaggccgatacatttatgtttgaggggcacgacaccacttcctccggaatttcctggatgctgtttaaccttgccaagtatcccgaataccaagagaagtgtagggaggaaattcaggaggtcatgaaaggtagagagctcgaagagcttgaatgggatgatctcacccagctcccgtttaccaccatgtgtatcaaggaatccctgcggcaatatccccctgtgacactcgtgtccagacagtgcactgaagacattaaactgccagacggaaggataattccaaagggaatcatctgcctcgtctcgatatatggcacccaccacaatccgaccgtgtggcctgattcaaaggtgtataacccttaccggttcgatccggataacccgcagcaaagatccccacttgcctatgtgccctttagtgccggtccaagaaattgcatcggccagagcttcgctatggcagaactgagagtggtggttgccttgaccctcctgagattccgcctgagtgttgatagaacaaggaaggtccggagaaaaccagagctgattctgagaactgaaaatggcttgtggctgaaagtggaacccttgccccctcgggcttag

SEQ ID NO: 219924 - DNA, 1782 bp, synthetic construct
  misc_feature 1..1782: note = Description of Artificial Sequence: Synthetic coding sequence
  source 1..1782: mol_type = other DNA
atggcgccaagtggattgaaagcagtcgtgggagagaaaatcctgtccggcgtcatccggtccgtcaagaaagatggcgagtggaaggtgctgataatggatcacccttctatgcgtattctgtcctcttgctgcaagatgagcgatattctggccgaaggcattacaatcgtggaggacatcaataaacgcagggagccaattcccagcctggaagccatctacctcctgtctccaacggaaaagtcagtgcaggctctgatcaaagacttccaaggcactcctacctttacctacaaggccgcacatattttctttaccgacacttgcccagagccgttattctccgagctgggacggagcagactagccaaggttgtcaagacactgaaggagatccatcttgcattccttccctacgaggcacaggtattcagcctggatgctccccactctacctataatctctattgtccatttcgggctgaagaaaggacccgacagttggaggtactggcccagcagatcgcgaccttgtgcgcaacactgcaggagtacccagcaataaggtacagaaagggccctgaggacacagcacaactggcgcacgccgtgcttgctaaactgaacgcctttaaagccgatactcccagcctgggggagggtccagagaaaactagatcccagcttctgatcatggatagagctgctgacccggtctcaccactcttgcacgagttaaccttccaagcaatggcctatgacctgctggacatcgaacaggatacttatagatacgaaactacaggcctgtcagaggccagggaaaaggctgttttgctggacgaggatgatgatctttgggttgagctgaggcacatgcacattgctgacgtttcgaagaaagtcactgaactgctgcgaactttctgcgagagcaagcgtttaacgactgacaaagctaacattaaggacttatctcagatattgaagaaaatgccacagtatcagaaagagttgaataagtatagcacccatctgcaccttgcagacgactgtatgaaacatttcaaaggcagcgtggaaaaactgtgttcggttgaacaggatctggctatgggttcggatgctgagggcgagaaaatcaaggattccatgaagttgatcgtaccagtgctcctggacgctgctgtgcccgcatatgataaaattagggtgctgctcctgtatatactgctccggaatggtgtcagcgaagagaacctggcaaagctaatccagcacgcaaacgtccaggcacactcatccttaatacggaaccttgagcaactgggtggcacagtcactaatcctggcggatccggtacttctagtagactcgagcctcgagaacggatggagccgacctaccagttgtctagatggacaccagtgattaaagatgtgatggaagacgctgtggaagacagactggaccgaaatctgtggcctttcgtgtctgacccagcccctaccgcttcaagccaagccgcagtcagcgctagatttggacactggcacaaaaataaggccggaattgaggccagagctgggcctagactgattgtgtacgtaatggggggagttgcgatgtccgaaatgcgagctgcatacgaggtgacccgcgcaaccgagggtaagtgggaagtgctcattggcagtagccacatcctgacacccacacgctttctggatgacctgaaggcattagacaaaaagttggaggatattgctctgccttag

SEQ ID NO: 219925 - DNA, 1344 bp, synthetic construct
  misc_feature 1..1344: note = Description of Artificial Sequence: Synthetic coding sequence
  source 1..1344: mol_type = other DNA
atgagagttctgactcaattggtcgcgacctatccacagggctttaaggtatggatggggccaatctttcccgtgatccgcttttgtcatccgaacattattcgcagcgtcattaatgcctccgccgcaatagttcctaaggacaaagttttttacagcttcctgaagccttggctcggagacggactcctgctttccgctggagaaaaatggagccgacacagacgaatgctgacccccgcatttcacttcaacattctgaaaccatatatgaagattttcaatgagagtgtcaatatcatgcatgccaagtggcaactgctggcgagtgaggggtctgcacgtctggacatgtttgaacacatttctctcatgactctggatagcctacaaaagtgcgtctttagtttcgacagccactgccaggaaaaaccctccgaatacatagcagcaatcctggagctatccgccctggtaaccaagcggcatcagcagatacttctctacatcgatttcctctattaccttacccccgacgggcagaggtttcggcgagcatgtcggttggtgcacgattttaccgacgccgtaatccaggagcgacgccgaacactgccaagtcagggagtggacgactttctgcaggctaaagccaaaagtaagacgctggacttcatcgatgtattgcttttgagcaaggacgaagacgggaaaaagttgtcagatgaagacattcgcgcagaggctgacacatttatgttcgaaggtcacgatactactgcctccggtctctcttgggttctgtatcatctcgccaagcatcctgagtatcaggaaagatgcagacaggaggtgcaggagctcttaaaagatagggaacctaaagagatagaatgggacgacctggcacagctgccattcctgacgatgtgcatcaaagaaagtctcaggctgcatccaccagtgccagccgtatccagatgttgtactcaggatatcgtccttccagatggcagggtgattcctaaaggtatcatctgtttgattagcgtgtttggtacgcaccacaatcccgcagtgtggcctgatcctgaagtatacgatcctttccggttcgacccaaaaaacatcaaggagaggtctccactcgcgtttattcccttttccgcgggacctaggaattgcattgggcaggctttcgctatggccgagatgaaggtggttttgggactgacccttctccgcttccgtgtgctcccagatcatactgaaccacgaagaaaacccgaattggtgctgagagccgaaggaggcctttggctgagggtggaaccactatcttag

SEQ ID NO: 219926 - DNA, 999 bp, synthetic construct
  misc_feature 1..999: note = Description of Artificial Sequence: Synthetic coding sequence
  source 1..999: mol_type = other DNA
atgccatcgattaccactgcagcagcctctggggtgagtcgctcccccggtaaccgcacgggctcctgggtaacctgggcgtggaagccatccgaatacattaccgcaatcatggaactgagcgctctggtcgtcaagcggaataatcagtttttcagatacaaggacttcctttactttctaacaccctgtggtagacggttccatagggcttgcagattggttcatgacttcaccgacgccgtaatacaggaacgccgacgaacacttacatcgcagggagtggacgactttcttcaagcaaaggccaagtctaagactctcgacttcattgatgttctgctcctgtccgaggataaaaatgggaaggaactatctgatgaggacattcgcgctgaagcagacacattcatgttcgggggtcacgatactacggcttccgggctgagttgggtactgtataatttggcaagacatcccgaataccaggagcgttgcaggcaggaggtgcaggagttgctgaaagatcgggagcccaaagaaatcgagtgggacgatctggcacagttgcctttcctgacaatgtgcctgaaagagtcactgcgcctccaccctccgattccaaccttcgccagagggtgcacgcaggatgtcgtgttacctgactcacgcgttattccaaagggcaatgtctgtaacatcaatattttcgccattcaccacaatccctcagtgtggccagatccagaggtgtacgacccctttcgctttgaccccgagaacgcacagaagaggtctcccatggcattcattccgttctcagcaggacctcggaactgtattggccagaagttcgcgatggctgaaatgaaggtagtcttggcactcacgctgctgcgctttcgtatcctccccgatcaccgtgaacctagaagaactcccgagatcgtgcttagagcggaggacggtctttggttacgtgtcgagccgttgggctag

SEQ ID NO: 219927 - DNA, 1560 bp, synthetic construct
  misc_feature 1..1560: note = Description of Artificial Sequence: Synthetic coding sequence
  source 1..1560: mol_type = other DNA
atgtccttactctccctgtcctggttaggtctcaggcccgttgccgcttcgccttggctcctgctgttggtcgtgggtgcttcctggctcctcgcacggattctggcctggacatatgcattctatcataacggtcggagactccgttgcttccctcagcctagaaagcagaattggtttctggggcacctcggactagtcactccaacagaggaggggctcagagtgctgacacagctcgtcgcgacttatccccaaggcttcgtccgttggctgggcccaataacccctattatcaacctgtgtcacccggatatcgtgcgcagtgtcatcaatacgtcagacgcgattaccgataaagacatcgtattttataagacacttaagccatggcttggcgacgggttactgttgtccgtgggagataagtggaggcaccacaggaggctgacgccagcatttcacttcaatatccttaaaccatatatcaagatattttctaaaagtgccaacatcatgcatgctaagtggcagagactggccatggagggctcaacttgcctcgatgtgttcgagcacataagcctcatgacactggactctctacagaagtgcatcttttccttcgacagcaattgtcaggaaaaaccaagcgagtacatcacagctatcatggagttgtcagccctggtcgtgaagcggaacaaccagttcttcagatataaagactttctttatttcctcactccctgcgggaggcggttccaccgagcatgcaggttggttcatgactttacggatgccgtcatccaagagcgacgcagaaccctgacgtcgcagggggtcgacgattttctccaagccaaggcgaaaagcaaaactctggattttattgacgtcctcctgctttccgaagacaaaaacggcaaggaattatctgacgaagacattcgggcagaagctgacacatttatgttcggaggccatgacacgaccgcgtcaggtctaagctgggtgttgtacaatctagccaggcacccagaataccaggagagatgtaggcaggaagttcaagagctcttgaaggatcgagagcctaaagagatcgaatgggacgatcttgctcagttgccttttttgactatgtgtcttaaggagagcttgcggcttcacccccctatcccaaccttcgcaagggggtgcactcaggacgtagtgctgcccgacagccgagttatccctaagggcaatgtgtgcaacattaacatcttcgctatacatcataaccctagcgtatggcctgatcctgaggtgtatgacccattccgatttgacccagaaaatgcacagaagcggtccccaatggcctttatacccttcagcgccggacccaggaactgtataggacagaagttcgctatggctgagatgaaagtggtgcttgcactcacactgttacggttccgcatccttccagatcaccgagaacctaggaggactcccgagattgtgctcagagccgaggatggtctgtggctgcgggtggaaccgctgggatag

SEQ ID NO: 219928 - DNA, 804 bp, synthetic construct
  misc_feature 1..804: note = Description of Artificial Sequence: Synthetic coding sequence
  source 1..804: mol_type = other DNA
acgcccgcatttcatttcaacatcctgaagccttacatcaagatctttagcaagtcagcaaatatcatgcacgccaaatggcagcggttggcaatggaaggtagcacctgtctggatgtctttgagcacatttctctgatgaccctggattctctgcagaagtgtattttcagcttcgattccaactgtcaggaaaagccttccgaatacatcaccgctatcatggagctgtccgctttagtcgtaaaaaggaataatcagttctttagatacaaagattttctgtacttcctcactccttgcggacgcaggttccacagggcttgccggcttgtgcatgactttaccgatgccgttatacaggaacgacggagaacattgacgtctcaaggggtggatgacttcctgcaggctaaggccaagtccaagaccctggacttcatcgatgtactcctactgtctgaggacaagaatgggaaggagctgagtgatgaagatattcgcgctgaagcggatacgttcatgttcggaggccatgacacgacagcctctggacttagctgggtactatacaatctcgcgagacaccccgagtaccaagaaaggtgcaggcaggaggttcaggagctgctcaaggacagggaaccaaaagaaattgagtgggacgacctggcccagttgcctttcctgacaatgtgtcttaaggaaagcctcaggctgcaccctcccattccgacatttgcccgtggctgcactcaagacgttgttctgcctgactctagagtgattcctaaaggcctctag

SEQ ID NO: 219929 - DNA, 1512 bp, synthetic construct
  misc_feature 1..1512: note = Description of Artificial Sequence: Synthetic coding sequence
  source 1..1512: mol_type = other DNA
atggcaggactctggctaggccttgtttggcagaagctcctcctgtggggcgctgcctctgcacttagtctggcaggcgcttctttggtgctaagcctcctacagcgcgttgcttcatatgccctgctgatgaaaccagatggccgagagttcttccaacagatcatagaatatacagaggagtacaggcacatgcctttgcttaagctgtgggtgggcccagtacctatggtggccttatacaacgcggaaaatgtggaggtcatcctcactagctctaagcagatcgacaagagttctatgtacaagttcttggagccgtggttgggactcggactgctcacatctaccgggaacaagtggaggtcaaggcgtaagatgctaacaccaaccttccacttcaccatcctagaggattttctggatatcatgaatgagcaggcgaacatcttagttaaaaaactggagaagcatatcaaccaagaggcatttaactgcttcttttacataacactttgtgcactcgacatcatctgtgaaactgccatgggtaaaaacatcggtgcccagtcaaatgacgacagtgagtacgtacgcgctgtgtaccgtatgtccgaaatgatctttcgccgaattaaaatgccatggttgtggcttgacttgtggtatctcatgttcaaggaggggtgggaacataaaaagtctctccagatcttgcacacttttacaaactcagttatcgccgagagggctaatgagatgaacgccaacgaggattgtagaggagacggaagggggtccgcccctagcaagaataagcggagggcatttctcgacttgttgctgagcgtgactgatgatgaagggaaccggctctctcacgaggatatccgggaagaagtggacacttttatgttcgagggccacgatacaaccgcggctgccattaactggtcactttaccttctcggcagcaatcccgaggtgcagaaaaaggtggaccacgaactggatgacgtcttcggcaagtccgataggcccgctaccgtcgaggatctcaagaagcttcggtaccttgagtgtgtcataaaagagaccctcaggctgtttccatccgtgcctctctttgctcgaagcgtgagcgaggactgcgaggtcgcagggtatcgggtgttgaaggggaccgaggccgttatcatcccgtacgccctgcacagagacccaagatacttccctaaccctgaagagttccagcccgagcgcttttttccagagaatgcccagggcaggcacccatacgcctacgtcccatttagtgccggaccccgtaactgcatcggccagaaattcgccgtgatggaggagaaaacgatcctctcctgcattctcagacatttctggatcgagagtaaccaaaaacgcgaagagttggggctggagggccaactcatactgcgaccgtccaatggtatctggatcaagctgaaaaggagaaacgccgacgagcggtag

SEQ ID NO: 219930 - DNA, 1578 bp, synthetic construct
  misc_feature 1..1578: note = Description of Artificial Sequence: Synthetic coding sequence
  source 1..1578: mol_type = other DNA
atggctggactctggctgggcctggtttggcaaaagctgctgctgtggggtgccgcttccgcattgtcactggccggtgcctcgctggtcctctctctgctgcagcgcgtggcaagttacgcaaggaaatggcagcagatgcggcctataccaacggtggccagggcttacccccttgttggacatgccttactcatgaagccagacggccgtgagttttttcagcagattattgagtacacagaggaatatcggcacatgcccctcttaaagttatgggtcgggccagtccccatggtggctctgtacaatgctgaaaacgtggaagtgatcctgacatccagcaaacagattgataagtcatctatgtataagttcctggaaccttggctggggttaggacttctgacttctacaggcaacaagtggcgttcacggagaaagatgctgacccccacttttcactttacaatcctcgaggattttcttgatattatgaacgaacaggcaaacattctggtgaaaaagctcgagaagcatatcaaccaggaggctttcaattgctttttctacatcacactgtgtgccttagatattatttgcgagacggcgatggggaagaatatcggggcacagtccaacgatgacagcgaatatgtgcgggctgtctaccggatgtctgagatgatttttaggagaattaagatgccttggctgtggctcgacctgtggtatctaatgttcaaggaaggctgggagcacaagaagtctctgcaaattctgcacacattcacaaactccgtcattgccgagcgagcaaacgagatgaacgctaatgaggattgcaggggcgatggcaggggcagcgcgccatcaaagaacaagcggagggccttcctcgatctgctgttatcggttaccgacgacgagggaaaccgcctatctcacgaagatataagagaggaagtggacaccttcatgttcgaaggccacgacacgaccgctgccgctatcaattggagtctttatttgctcgggagtaaccccgaggtgcaaaagaaggtggatcatgaattagatgacgtctttggtaagagcgatcggcctgccacagtagaagaccttaaaaagttaaggtatctggaatgtgtgatcaaagaaaccctgcggctttttccctccgtccccctgtttgcacgatctgtttccgaggactgcgaagtagcgggataccgtgttctgaaagggaccgaagcagtaattatcccttacgcattacatagggatccccgatacttccctaatccagaggaatttcagcccgagagattctttccagagaacgctcaagggaggcatccatacgcctacgttccattctctgcaggtcccagaaactgcattggccaaaaattcgcagtaatggaagagaagacaatcctctcttgcatactgcgccatttttggatagagagcaaccaaaagcgggaggagcttggtctggaaggacaattgatcctaaggccgtctaatgggatctggatcaaactgaaaaggcggaatgcggatgaacgttag

SEQ ID NO: 219931 - DNA, 1503 bp, synthetic construct
  misc_feature 1..1503: note = Description of Artificial Sequence: Synthetic coding sequence
  source 1..1503: mol_type = other DNA
atgtcaccgggtctcctgctcctggggagtgcagtcctcctggcctttgggctgtgttgcacctttgtccacagagctcgaagtagatacgaacatatccccggtccacctcggccatcatttctcctgggccacttaccttgtttctggaagaaggacgaagtgggtggaagagtgctgcaggacgtttttttggactgggctaaaaaatacggacctgtggttcgcgtgaacgtattccacaaaacatcagtgatcgttacatcacccgagtccgttaaaaaattccttatgtcaacaaaatacaacaaggactcaaaaatgtatagggcactgcagaccgtcttcggggagcgcctcttcggtcagggactggtttccgaatgcaactacgagcggtggcacaagcaacggcgagtgatcgatctggcattctcaaggtcaagcctcgtttcactgatggagaccttcaatgagaaagctgagcagctcgtggagattttggaggccaaggctgacggccaaactcctgtgtctatgcaggacatgcttacatataccgcaatggatatcttagcgaaggctgcctttgggatggaaacttctatgttgcttggagcccaaaagcctttaagtcaggcagtgaagctcatgttagagggcattaccgcgtccagaaataccttggcaaagtttcttcctggcaaaagaaagcaacttcgcgaggtacgagaatctattcggttcctcaggcaggtggggagagattgggtacagcgccgtcgagaagccctaaagcggggagaagaggttccggcagacatcttgactcagatcctcaaggcagaggagggggctcaggacgatgaaggattgctcgataatttcgtgaccttctttatagcgggtcacgagacttccgccaaccacctggcctttactgtcatggagctgtcccgccaaccagaaatcgttgcccgactccaggctgaggttgatgaggtcattggtagcaagcggtacttagattttgaagacctcgggaggctacagtacctgtctcaggtgctgaaggaatcactgcgattgtaccccccagcgtggggaacctttaggctcttggaagaagagacactcatcgacggggtcagagtaccagggaatactcccctgctgttctccacatacgtgatgggccgaatggatacctattttgaagaccccctcacttttaacccagatagatttgggccaggcgcacccaagccaaggttcacatattttccattctcactgggccaccgctcttgtattggccagcagttcgcccaaatggaagtcaaggtcgtcatggccaagctattgcagagactggaattccgtctggtaccaggacaacggttcggcctacaagagcaggcaacactcaagcccttggatcctgtgctatgcaccctccgtccccgaggctggcagcccgcaccaccaccaccaccatgttag

SEQ ID NO: 219932 - DNA, 1212 bp, synthetic construct
  misc_feature 1..1212: note = Description of Artificial Sequence: Synthetic coding sequence
  source 1..1212: mol_type = other DNA
atgtccacaaagtacaacaaagatagcaaaatgtatcgagctctgcagacggtgttcggggaacggttgtttggccagggcctggtaagcgagtgcaactacgaacgctggcataaacagcgtcgggtgatcgacttggcctttagtcggagttctctagtgagcctaatggaaacattcaatgaaaaggcggaacaactcgtcgaaatcctcgaagccaaagctgacggtcagacacccgtcagcatgcaggatatgttgacatatactgcaatggatattctcgctaaagcagcattcggcatggaaacaagcatgctgctgggcgcacagaaacccctctcccaggcggttaagttgatgctggaaggtatcacagcatctcggaacacactcgcgaaattcctgccaggtaagaggaaacaactccgagaggtccgcgagagcatccgcttcctgcggcaagtggggcgtgactgggttcaaaggagacgtgaagcattgaagcgcggagaggaggtccctgcagatattctaactcagatcctcaaggccgaggagggtgctcaggacgatgaggggcttctggataattttgtgacattctttattgccggacacgaaacatccgccaaccacctggcattcacagttatggagctctcgaggcaacccgagatcgtggcgagattgcaggctgaggtggacgaagtgattggttccaagcggtacctggatttcgaggacctcgggagactgcaatacctgagtcaggttctgaaggagagcctgagactgtatcccccagcatggggcacgttcaggctactagaggaggaaacactgatcgatggggtgcgcgtgccgggtaacacaccactgcttttctctacttacgtgatgggaagaatggacacgtactttgaggatccactgactttcaacccagaccggttcgggccaggggctcctaagcctcggttcacctactttccgttttcgctgggtcacaggtcatgtattggacaacagtttgcacagatggaggtgaaagtcgttatggccaaactcttacaaagactggaattccgtctagtgcccggacagagatttgggctccaggagcaggccaccttaaaacctctcgatcccgtgctgtgtacactgcggcctcgtggttggcagccagctccccctcctccaccttgttag

SEQ ID NO: 219933 - DNA, 1530 bp, synthetic construct
  misc_feature 1..1530: note = Description of Artificial Sequence: Synthetic coding sequence
  source 1..1530: mol_type = other DNA
atggccgctgccgctggaatgctcctgctcgggttactgcaggccggaggctccgtgctggggcaggcaatggaaaaagttaccgggggaaacctactgagtatgttgctgatcgcatgcgccttcaccctgtcactcgtttacttgattcggttggccgcaggacacttggtacagctgccagccggagttaaatctccaccctatattttctcccctattccatttttaggccatgcaattgcctttgggaagtcccccattgagtttttggaaaatgcctacgagaaatatggaccagtgttttcctttactatggtaggtaaaacctttacgtatctattggggagtgatgcggcagccctcctattcaatagtaagaatgaggatctgaatgcagaggacgtgtacagtagactgacgacccccgtctttggtaagggggtggcctacgacgttcccaaccctgtgttcctcgagcaaaagaagatgctgaaatctggccttaatattgctcattttaaacagcatgtgagcataatcgaaaaggaaacaaaggagtattttgagtcctggggggaatcaggagagaaaaacgtatttgaggcgcttagcgagctaatcatactaaccgctagccattgcctccatgggaaggagatccggagccagctcaatgagaaggttgcccagctgtatgccgacctggatggaggattctctcacgctgcgtggttgctgcctggatggctccctctaccaagtttccgtagacgcgaccgggcacacagggagatcaaggatattttctacaaagcaatacagaaacggagacagtcccaagagaaaatcgatgatattctgcagaccctgcttgacgctacatacaaagatgggcgaccacttacagatgacgaggtagccggtatgctgatcggcttactacttgcgggtcagcataccagcagtacaacaagtgcttggatggggttcttcctggccagagataagactctgcagaaaaagtgctatctggaacaaaagacagtttgcggggaaaacctgccccctctgacctacgaccagctcaaggacttaaacctgctggataggtgtattaaagaaaccctgcgcctacgtcctccaataatgataatgatgaggatggccagaaccccccagacagtagccggatacacaattccaccaggtcaccaggtgtgtgttagtccgactgtcaaccagagactgaaagactcttgggtcgaaagactggactttaatccagatagataccttcaggacaatccagctagcggcgaaaagttcgcttatgtgccttttggagcgggaaggcaccggtgtattggcgaaaatttcgcttatgtgcagatcaagacaatctggtctaccatgctccgactgtatgagtttgatctcatcgacggttacttccctactgtcaactataccacgatgattcatacacccgagaaccccgtcattcggtataagcggcgaagtaagtag

SEQ ID NO: 219934 - DNA, 1215 bp, synthetic construct
  misc_feature 1..1215: note = Description of Artificial Sequence: Synthetic coding sequence
  source 1..1215: mol_type = other DNA
atggtggggaaaacgttcacttatctgcttggtagcgatgctgcagcccttcttttcaattccaagaacgaagacttgaacgcagaggacgtttatagccggttgaccacacctgtttttggcaagggagtggcctacgatgtccctaatcccgtgttccttgaacagaagaagatgcttaagtccggccttaacattgctcatttcaagcaacacgtttcgataatcgaaaaagagaccaaggagtatttcgagtcctggggggagagtggggaaaaaaacgtttttgaagctctgagcgagctcattatcctcacagcctcccactgcctacacgggaaggagatacgaagtcagctaaatgaaaaggtggcccagctgtatgctgatttggatgggggattttcacacgcagcctggctactgcccggttggctcccactgcctagctttcggaggcgtgatcgagcacaccgtgaaatcaaggacattttctacaaggccatccagaagagacggcagagccaggaaaagatcgatgacattttgcagactctgctggacgccacctataaagatggaaggcccctcacagacgatgaagtcgccggaatgctgattgggctgctcctcgcaggacagcacactagctcaaccacttctgcttggatgggattctttttggcccgagacaagaccctgcagaagaagtgctatttagagcaaaagacagtgtgcggggagaacctgccgccattgacctatgaccagctcaaggatttaaacctactagataggtgtattaaagaaacactccggctgaggccccctataatgatcatgatgaggatggccaggacaccgcagaccgtggccggatacactattccgcctgggcaccaagtgtgtgtgtcccctaccgtgaatcagcggctgaaggactcttgggtagagaggttggacttcaaccctgacaggtacctgcaggataaccccgcttccggcgagaagttcgcctacgtccctttcggcgcaggcaggcacaggtgcatcggggagaactttgcctacgtgcagattaagactatctggagtaccatgctacgtctatacgaattcgacctgattgacgggtacttccctacagtgaattataccactatgattcacacacctgagaaccccgtaataaggtataagaggaggtcaaaatag

SEQ ID NO: 219935 - DNA, 1350 bp, synthetic construct
  misc_feature 1..1350: note = Description of Artificial Sequence: Synthetic coding sequence
  source 1..1350: mol_type = other DNA
atgaagcatgagaaaagcccaccatatattttttcccctatcccttttctgggccacgctatcgccttcggcaagagtcctattgagttcctcgagaacgcttacgagaagtacggaccagtgttctcctttactatggttgggaagaccttcacatatttgctgggttccgacgcagcagcacttctgtttaattcaaaaaacgaggatcttaacgctgaagacgtctattctcgcctcactactcccgtgttcgggaagggagtggcctacgatgtacccaaccctgtgtttctcgagcaaaaaaaaatgctcaaaagtggtctgaacattgcccacttcaaacagcacgtttcaatcattgagaaagaaactaaggagtactttgaaagttggggcgagagtggtgagaagaatgtgtttgaagcgctcagcgaactaatcattcttactgcctcgcattgcttgcacggcaaggaaatcaggagccagctcaacgagaaagttgcccagctctacgcagatctcgatggagggttcagtcatgccgcatggctcttgcctggttggctcccactcccaagcttccgcaggcgcgatagagcccaccgggagatcaaggacatcttctataaggccattcagaagcgacgccagtctcaggaaaagatagacgatatccttcaaactcttttggatgccacgtataaggacgggagacctctgacagacgatgaagtggccggaatgttaatcggactacttctggccggtcagcacacatccagtactacttccgcttggatgggtttttttctggctcgagacaagaccctgcagaagaagtgctacctcgagcagaaaaccgtgtgtggcgagaacctccctcctctgacctatgatcagctgaaggacttaaacctgctggaccgatgcattaaggagacgttgaggcttcgtccccctatcatgatcatgatgcggatggctaggactccccagactgtggccggatatactatcccaccagggcaccaagtgtgtgtctctcccaccgtgaatcagcgtctgaaggactcgtgggtcgagcgcctggattttaatcccgatcggtatctccaagacaatccagcttcaggggagaagtttgcatacgtaccatttggcgctgggaggcacaggtgcatcggagagaatttcgcctacgtccaaattaagacaatttggagtaccatgttaaggttgtatgagttcgacttgatcgacggctatttcccaaccgtcaattacactacaatgattcacacccccgagaacccagtgatacgttacaagagacgctccaagtag

SEQ ID NO: 219936 - DNA, 1515 bp, synthetic construct
  misc_feature 1..1515: note = Description of Artificial Sequence: Synthetic coding sequence
  source 1..1515: mol_type = other DNA
atgatgaccaccagcctgatatgggggatagccattgccgcatgctgctgcctctggctgatcctcggaatccgacgccgtcagacgggcgaaccacctctggaaaacggtctcatcccttatctgggctgcgcacttcagttcggagcgaatccattggagtttctgcgtgccaatcagaggaaacatgggcacgtgttcacctgcaagttgatgggtaagtacgttcattttatcaccaatccactctcttatcacaaagtcctgtgtcatggcaagtacttcgactggaagaagtttcatttcgctacttcggcgaaggctttcggtcaccggagtatcgaccccatggacggaaatacgactgagaatattaacgacacatttataaaaacgctccagggacacgcactcaattctttaaccgagagcatgatggagaaccttcaacgcattatgcgcccacctgtctccagtaactccaaaaccgctgcttgggtgacagagggcatgtattcattttgctatcgggtgatgttcgaggcgggatacttgacaatcttcggcagggatctgactcggagagacactcagaaggcacatatactcaataacctagataacttcaaacagttcgacaaagttttcccagcgctggtcgcgggactgcccatccacatgtttcgcactgcgcacaatgccagagaaaaattggccgaaagcctgcgacatgagaatctgcagaagagagaatcaatcagtgagttgatctcactcaggatgttcctgaatgatacactgagtactttcgatgacctggagaaagccaagacgcatcttgtcgttctgtgggcctcacaggctaatacaatccccgcaactttttggagtctctttcagatgatcaggaaccctgaggccatgaaggcagccaccgaggaagttaaaagaactcttgaaaatgctggccaaaaagtgtccctggaggggaaccccatttgtctttcccaagccgagcttaatgacttgccagtcttggatagcatcattaaggagtcattacggctgtcgtccgcgagtctcaatattagaacagccaaggaggatttcaccctgcatttggaagacggctcatataatatcaggaaggatgatattattgccctgtatccacagcttatgcacctcgacccagaaatttaccccgaccctctgacattcaaatacgaccggtatcttgacgagaacggtaagactaagaccactttctattgcaatggcctcaaactcaaatattattatatgccgttcggatctggcgctaccatctgccccggacggttatttgccatccatgagatcaagcaattcctgatccttatgctctcctacttcgaattggagctaatagaaggtcaggcgaagtgcccccctctggaccagagcagagctggtctgggaatacttcccccattgaacgatatcgagtttaagtacaaattcaaacacttatag

SEQ ID NO: 219937 - DNA, 1521 bp, synthetic construct
  misc_feature 1..1521: note = Description of Artificial Sequence: Synthetic coding sequence
  source 1..1521: mol_type = other DNA
atggctggcgaggtttccgcagccacgggtaggttcagcttggaaaggctgggcttaccaggtcttgccctggcagcagcactcctcctcctggccctctgcttattagtgcgcagaactcgacgaccaggagagcctcccctcatcaagggatggctgccatatctcggagtggtcttgaatcttaggaaggatcctctgagattcatgaaaacactgcagaaacagcacggtgacacgtttaccgtgctcctgggcggaaaatacattaccttcatcttggatcccttccagtatcagctggtgatcaaaaaccacaagcaactaagcttccgcgtgttcagcaataagctgttggaaaaggctttctccatttcccaacttcagaaaaatcacgacatgaatgacgagctgcatttgtgctaccagttcctgcaaggtaagtccctggacatcttattggagagcatgatgcagaacctgaaacaagttttcgaaccccagctgctgaagaccaccagctgggacacagctgaactgtatccattctgctccagtattattttcgagattacattcacgaccatttacggaaaagttattgtatgcgataataataagtttatttcggagcttcgcgacgatttccttaaatttgacgacaagttcgcgtacctggtcagcaacattcctatagaacttttggggaacgtgaaaagtattagagagaagatcatcaagtgtttttcaagcgagaagctggcgaaaatgcagggctggagcgaggtgttccagagccgccaagatgttttggagaaatactacgtacacgaagacttggaaattggtgcgcaccacctgggctttttgtgggcgtctgttgcaaacactatacccaccatgttctgggccatgtattatctcctacgtcatcccgaggctatggccgctgtacgcgacgaaatagataggctcttgcaaagcactgggcaaaaaaaaggaagtggtttccctattcacctaacaagagagcagctcgactccctaatttgcctggagagcagcatctttgaggcacttaggctgtcttcatacagcaccacgatccgctttgtcgaggaagatctcacattatcatctgagacaggggactactgcgtcagaaagggcgatttggtcgccatcttcccccctgtgttgcacggggaccctgaaatctttgaggcacccgaagagttcagatacgatcggtttattgaagatggcaaaaagaaaactactttctttaagagagggaaaaaactgaaatgctacctgatgccattcggaaccggcacatctaaatgtcctgggcgattcttcgcactcatggaaattaaacagctgctggtgattctgttgacatattttgacctcgagattattgacgacaagcctataggtctgaattattccaggttactctttgggatacaatatcctgattccgatgtcctcttccggtacaaggtcaaatcatag

SEQ ID NO: 219938 - DNA, 1506 bp, synthetic construct
  misc_feature 1..1506: note = Description of Artificial Sequence: Synthetic coding sequence
  source 1..1506: mol_type = other DNA
atggtgctgtggggcccagtcctcggggctctgcttgtggtcattgccggttatctttgtctccccggaatgttaaggcagcggagaccatgggagccacctcttgacaagggaacggtgccctggctgggccacgctatggcttttaggaagaatatgtttgaattccttaagaggatgagaacaaaacacggggacgtgtttaccgtacagctgggcggacagtacttcactttcgtaatggacccattgtctttcggatccatcctgaaggacacccaaagaaaacttgattttggccaatacgccaagaaacttgtgctgaaggttttcgggtaccgaagtgtacaaggagaccatgagatgatccactccgcgtccaccaaacatttgcggggtgatggacttaaggatctgaacgagaccatgctggatagcctctcattcgtcatgctgacgagtaaaggatggtccttggacgcctcttgttggcacgaggacagtctgttccgcttctgttactatattttattcacggctgggtatctgagcctttttgggtacaccaaagacaaggagcaagacctgctgcaggccggtgagcttttcatggagttccgcaaatttgatcttctgtttcccaggtttgtgtactctctcctctggccacgcgaatggctcgaggtgggaaggttacagaggctgtttcacaagatgctttccgtctcacatagccaggaaaaagaaggaatttcaaactggctaggaaatatgctccaatttctgcgggaacagggtgtaccgagcgccatgcaagacaagttcaattttatgatgctgtgggcctctcaaggaaacacgggaccaacctcattttgggcactgctgtacctgctcaagcacccagaagcaatcagggcggtaagggaggaagctacccaggtattgggggaagccagactggaaaccaagcagtccttcgccttcaaattgggcgcactgcaacatacaccggtgctcgatagtgtagtagaggagaccctgcgcttgagagctgccccaacactccttcgactggtccatgaagactacaccttgaagatgtctagtggtcaggagtatctgtttcggcacggggacattctggcactgtttccatatctgtcggtgcatatggatcccgacatccaccccgaacctaccgtgtttaagtatgatcgttttctgaaccccaacgggtctcggaaggtcgatttctttaagaccggcaagaagatccaccactataccatgccatggggcagcggagtgagcatttgccccggtcgcttttttgccttatcggaagtgaagctttttattcttctgatggtcacacactttgatttagaattggtcgacccagacactcccttaccacatgtcgatcctcagaggtggggctttggtactatgcagccctcccacgatgtgaggtttcggtacaggctccaccccacagaatag

SEQ ID NO: 219939 - DNA, 573 bp, synthetic construct
  misc_feature 1..573: note = Description of Artificial Sequence: Synthetic coding sequence
  source 1..573: mol_type = other DNA
atggaaaaggtccccggagaaatggaaatcgaaagacgagaaagatctgaagagctgtcagaggcagagcgcaaggcagtccaggccatgtgggcgagactttacgcaaactgtgaggatgtcggtgtcgctatcctggtgcggtttttcgttaattttccgtcggccaagcagtacttttcacagttcaagcacatggaggaccctctggaaatggaacgttcgccacagctccgtaagcacgcctgtagggtgatgggggctttgaacaccgttgtcgagaatctgcacgatcccgataaggtgtcttccgttctggccctagtgggaaaggcccacgcgctgaaacacaaagtggagcctgtgtattttaaaattctgtctggtgtgattctcgaagtggttgctgaggagtttgccagcgactttccaccggagacgcagcgcgcatgggccaagctgcgcggattgatttactcccacgtaaccgccgcatataaggaggtgggatgggtgcagcaggtaccaaacgccaccaccccccctgccaccctgccctcaagcgggccatag

SEQ ID NO: 219940 - DNA, 1194 bp, synthetic construct
  misc_feature 1..1194: note = Description of Artificial Sequence: Synthetic coding sequence
  source 1..1194: mol_type = other DNA
atggaggaggatgactcctatgtgccatctgatctgacagctgaggagcggcaggagttggaaaatattagacgccgtaaacaggagctgctggccgatattcagcggctgaaggatgaaattgccgaagtggcgaacgagattgaaaacctgggttcaactgaagaacgcaaaaacatgcagcggaataagcaggtcgcaatgggcagaaaaaagttcaatatggaccctaagaagggtatacagtttctgatcgagaatgacctactcaagaatacgtgcgaggacatcgcccagtttctgtacaagggggaagggttaaacaaaacagcgatcggggactatctcggggagagggatgaattcaatatccaggtgctccacgcattcgtggagcttcatgagttcaccgatctgaatctcgtccaggctctcaggcagtttctgtggagctttcgcctaccgggagaagcacagaagattgatagaatgatggaagcatttgcacagcgttactgccagtgcaacaatggcgttttccagagcaccgatacttgttacgttctttcatttgcgatcataatgctcaacacatcgctccacaatcccaatgtgaaggataagcctaccgttgaacggttcatagctatgaatcgtgggatcaacgacgggggtgatctccccgaagaactgctaaggaatctgtacgagtcaatcaagaacgagccctttaaaattccggaagacgacgggaatgatctgacacacaccttcttcaaccctgacagggaaggttggctgttgaaacttgggggaagagtgaaaacgtggaagcgtaggtggtttatccttacggacaactgcctctactactttgaatacaccacagacaaagaacccagaggtattatacctttggagaatctttcaattcgcgaggtggaggattccaagaagcctaattgcttcgaactgtatatccctgataataaagatcaggttattaaagcctgcaagacagaggcagatggaagagtcgtggaggggaaccacacagtatatagaattagcgctccaacacccgaggaaaaagaagagtggattaagtgcatcaaagccgcaattagtcgggatcctttttacgagatgctggcagcccgtaagaaaaaggtttcctcaaccaaaagacactag

SEQ ID NO: 219941 - DNA, 1197 bp, synthetic construct
  misc_feature 1..1197: note = Description of Artificial Sequence: Synthetic coding sequence
  source 1..1197: mol_type = other DNA
atggaagaggacgattcatacgtgccctcggatctgactgctgaggagaggcaggaactggaaaacattcgacggagaaagcaagaattgctggcagatattcagcgccttaaagatgaaatcgccgaggttgccaatgagatcgaaaacctggggtcgacagaagagaggaagaatatgcaaaggaacaagcaagtcgctatgggacgcaaaaagtttaacatggatcccaaaaagggcatccagttcctaatcgagaatgacctgctcaaaaacacctgcgaggacattgcgcagtttctctacaagggtgagggtttgaataagaccgcaatcggtgactacctgggagaaagagacgaatttaatattcaggtgcttcatgccttcgtggagctgcacgaattcacggatctgaacctggtgcaggccctgagacaatttctgtggtccttcaggttacccggtgaggcgcagaagattgacaggatgatggaggctttcgctcagcgttactgccagtgtaacaacggagtcttccaatctacagatacatgctatgtactgtcttttgccatcatcatgctcaatacatccttacataaccccaatgttaaagacaaaccaaccgtggagaggttcatcgcaatgaaccggggaattaacgacgggggagacctacctgaggaactcctcaggaacttatatgaaagcattaagaacgagcctttcaagatccccgaggacgacggtaatgacctcactcatacatttttcaaccctgatcgtgagggctggttgctgaagctgggcggtggtcgtgtgaagacatggaagagaaggtggttcatccttacagataactgtctttattactttgagtatacgactgacaaggaacctcgtggcattattcccctggagaacctgagtataagggaggtggaggattctaagaagccgaactgctttgaactgtatattccagacaataaagatcaagtgatcaaagcctgcaaaaccgaggctgatggtcgcgtcgtcgagggtaaccacaccgtatatcggatctctgccccaacacccgaagagaaggaagaatggatcaaatgcatcaaggctgccattagcagagatccattttatgagatgttggcagcaagaaaaaaaaaggtgagtagtacgaaacgccactag

SEQ ID NO: 219942 - DNA, 657 bp, synthetic construct
  misc_feature 1..657: note = Description of Artificial Sequence: Synthetic coding sequence
  source 1..657: mol_type = other DNA
atgatggaggcatttgctcagagatactgtcagtgcaataatggtgtgtttcagtccacagacacttgctatgtcctctcctttgccatcatcatgttgaataccagtctccataatccaaacgtcaaggataaacccaccgtcgagagatttatcgctatgaatcggggaatcaatgacggtggagacctgcctgaagaactcttacgtaacctctacgaaagcattaaaaatgaaccttttaaaataccagaagacgatggaaacgacctgacccacaccttctttaatccggatagggaaggatggctgctgaaattggctggtggtcgcgtgaaaacatggaaacgacgatggttcattcttacagataactgcttatactattttgagtatacaactgataaagaacccaggggaatcatccccttagaaaatctgtccatccgagaggttgaagactcaaagaaacccaactgtttcgaactttacattcctgataataaggaccaagttattaaagcctgcaaaacagaggcggacggtcgagtagtcgagggtaaccacactgtataccggatcagtgcgccaacccctgaggagaaggaggagtggattaaatgtataaagttccaggtgtctccgggagaaccctag

SEQ ID NO: 219943 - DNA, 1197 bp, synthetic construct
  misc_feature 1..1197: note = Description of Artificial Sequence: Synthetic coding sequence
  source 1..1197: mol_type = other DNA
atggaagaagacgactcctacgttccatcagatcttacggctgaagagcgccaggaactcgagaacatccggcgacgcaaacaggagctcctggcagatattcagagattgaaggacgagattgccgaggttgcaaatgaaatcgaaaacctgggctcaacggaagaacgcaaaaacatgcaaagaaacaagcaggttgcaatgggacggaagaaatttaatatggatccaaagaagggcatccagtttttgatcgaaaatgatctgctgaagaatacatgcgaagacatcgcccaatttctgtacaagggcgaaggcctcaataagaccgccattggggattacctaggcgaaagagacgagttcaacatccaggtcttacatgcttttgttgaactccacgaatttaccgacctcaacctagtgcaggccttgagacagtttttgtggagtttccgattgccgggagaagcgcagaaaatcgacagaatgatggaagccttcgcccaacgctactgtcagtgtaataacggggtttttcaaagcaccgacacctgttacgttctttcatttgccatcattatgctgaacacctccctgcataaccccaacgtcaaggacaagccgacggtggagcgtttcattgctatgaaccggggaatcaacgacggcggtgatttgcccgaagagttgttacgaaacctgtatgaatcaataaaaaacgaaccgttcaaaattccggaggatgacggtaacgacctgacccacactttcttcaatcccgaccgagagggttggctgctcaaactgggaggcggacgggtcaagacctggaaacgtaggtggtttattttgaccgacaattgtctctattactttgagtatacaacagacaaagaaccccgaggcattatacctctggagaatctctccatacgcgaagtcgaggattctaaaaagcctaattgtttcgagctttatatccccgataacaaggatcaggtaatcaaggcatgtaaaacagaggcagacggcagggtggtggaaggcaaccacaccgtctacaggatctccgcgcctacccccgaagaaaaagaggagtggatcaagtgcattaaagccgcaatttcacgcgatcccttctacgagatgctggctgccagaaagaagaaagtatccagcacaaagaggcactag

SEQ ID NO: 219944 - DNA, 1020 bp, synthetic construct
  misc_feature 1..1020: note = Description of Artificial Sequence: Synthetic coding sequence
  source 1..1020: mol_type = other DNA
atgcagcgtaataagcaggtggccatgggaaggaaaaaatttaatatggacccaaaaaaaggaattcaatttcttatagagaacgatctgctgaagaacacctgtgaagatatcgctcaatttctttataagggagagggcctgaacaaaaccgccattggcgactacctcggcgagcgtgatgaattcaatatacaggtcttgcacgcctttgtggagcttcacgagttcacagatttgaatctagttcaagcgttaaggcagttcctgtggagcttccgcctgccgggagaagcccaaaaaatcgataggatgatggaagcattcgctcaacgctattgtcaatgcaacaacggagtgtttcaaagtacagacacctgttatgtcctgtcattcgctatcattatgctgaacacctccctgcataatcctaacgtgaaagataagcctaccgtcgaaagatttattgcgatgaatcgcggaatcaatgatggcggagatctaccagaggagctgctgagaaatctctacgagtccatcaaaaacgaaccatttaaaattccagaagatgatggtaacgaccttactcatacctttttcaaccctgaccgcgaggggtggctcctgaaacttggcggaggcagggtaaaaacatggaagcgtaggtggtttatcctcaccgacaactgcttgtactacttcgagtatacaactgataaggagccaaggggcatcattcccctggagaatctgagtatcagagaggtcgaggacagcaaaaaaccaaattgttttgagttatacattcccgataataaggaccaagtcattaaggcatgtaaaaccgaagccgacggcagagttgtggaggggaaccataccgtatataggatcagcgctcctacaccagaagagaaggaggagtggatcaaatgcatcaaggccgctattagcagggacccattctacgagatgctcgccgctagaaagaaaaaggtgagctctaccaaacgccattag

SEQ ID NO: 219945 - DNA, 1020 bp, synthetic construct
  misc_feature 1..1020: note = Description of Artificial Sequence: Synthetic coding sequence
  source 1..1020: mol_type = other DNA
atgcagcgaaacaagcaggtggccatgggtaggaagaagttcaatatggaccctaaaaagggcattcagttcttgatcgaaaacgatttactgaagaacacctgcgaagacatcgctcagtttctatacaaaggcgaaggactgaataagactgcaatcggagactatctgggggagagggatgaatttaatatccaggtcctgcatgcttttgtcgaattacatgagttcaccgacctcaacttggtccaggctctgcggcaatttttatggtcattccggctgccgggtgaggcgcagaaaatcgaccgcatgatggaggcctttgctcaacgctattgtcagtgcaataacggcgtcttccagtctactgacacttgctacgtgttatcctttgccattataatgcttaatacaagccttcataacccaaacgtcaaagataagccaacggtagagagattcatagccatgaacaggggaatcaatgatggaggcgacctccctgaggagctgcttcgtaacctgtacgagagcattaaaaatgaaccatttaagattccagaggacgatggtaacgatctgacacataccttttttaacccagaccgggagggatggcttttgaaactgggcggtgggagagtgaaaacatggaaaagaaggtggtttatcctgacggacaactgcctctattatttcgaatacactaccgacaaggagccacggggtataattcctctggaaaatttgtctatcagggaagtggaagactcgaagaagccaaactgcttcgaattatatataccagacaataaggaccaggtgatcaaggcctgcaagaccgaggcagacggacgcgtggtcgagggcaaccatacagtctatcgaatttctgcccctacgccagaggagaaggaggaatggatcaagtgcatcaaagccgcaattagccgggaccccttctatgaaatgctcgccgcacgaaagaaaaaagtttcgagcacgaaaagacattag

SEQ ID NO: 219946 - DNA, 1080 bp, synthetic construct
  misc_feature 1..1080: note = Description of Artificial Sequence: Synthetic coding sequence
  source 1..1080: mol_type = other DNA
atgtccctgcaacgcctccttcagcacagtagcaatggcaatcttgctgatttttgcgcaggacccgcttactcatcatacagcactctgacaggatcactcacgatggatgacaacaggcggattcagatgctcgctgacactgtggctaccttgccaagaggaaggaagcaactcgctttgactaggtcttcctccttaagcgatttctcctggtctcagcggaaactcgtcacggtggagaagcaggacaatgaaacattcggctttgagatacagagttaccgaccacaaaaccagaacgcttgcagctctgagatgttcaccctgatctgcaagatccaggaagactctcctgcccattgtgctggcctacaggccggtgacgtcttggcgaatatcaatggggtcagcactgagggctttacttataaacaggtggtagatctcattagatcctcagggaatctgctcacaatcgaaactctgaacggcacgatgatccttaagaggactgaactggaggcaaaactgcaagtcctgaagcaaactctgaaacagaagtgggtggagtatcgttcccttcagctacaggaacatagactgctgcacggtgatgctgcgaattgccctagcctggaaaatatggacctggatgagttgagcctcttcggaccactgcctggcccaggccctgctttggtggatcgcaaccgtctgtcgtccgaatcgtcttgcaaatcctggttgagctccatgaccatggacagcgaggatggataccagacttgtgtttccgaggactctagccggggagctttctcacggcagacaagcactgatgacgaatgtttcatccccaaggagggggacgactttcttagacgcagctcttcccgcaggaatcgctcgattagtaacacaagtagtggcagcatgtctcctctatgggaaggcaatctttcatctatgtttgggacactgccaaggaaatcgaggaaggggtccgttaggaaacagctgctgaaatttattcccggactacatcgggctgtcgaggaggaggagagtcgcttttag

SEQ ID NO: 219947 - DNA, 762 bp, synthetic construct
  misc_feature 1..762: note = Description of Artificial Sequence: Synthetic coding sequence
  source 1..762: mol_type = other DNA
atgttcacactcatctgtaagatccaggaagattcccccgctcactgtgccggtcttcaagctggggatgtgctcgctaatatcaatggcgtgtccaccgaaggcttcacttacaaacaagtggtggacctgatccgctcaagtggaaacctcctaacaatcgaaactctgaacggcactatgatactcaagcgcacagagctggaggctaaactccaggtgctcaaacagaccctcaaacaaaagtgggtcgaataccgttccctgcaacttcaggagcatagactcctgcatggcgacgccgcaaactgcccaagtctggagaatatggatcttgacgaactctccctttttggacctttgccgggaccgggaccggctctggtcgatcgcaacaggttgagcagtgaatctagctgtaaatcttggttatccagcatgactatggattccgaggacgggtaccagacatgtgtcagtgaagattcctcccgaggagccttctcccggcagacctccacagatgatgagtgttttattccgaaggagggggacgacttcttgcgccgttcgtcatcccgccgaaataggtccataagtaacacatcatcgggcagcatgtctccactgtgggagggaaacctgtcatctatgtttggaacattgcccaggaaatcacggaaaggaagcgtgaggaaacaactgctgaagtttattccaggtctgcacagggctgtggaggaggaggagtccaggttttag

SEQ ID NO: 219948 - DNA, 1203 bp, synthetic construct
  misc_feature 1..1203: note = Description of Artificial Sequence: Synthetic coding sequence
  source 1..1203: mol_type = other DNA
atggaagacggcgtttatgagcccccagacctcacgccagaggaaaggatggagctagagaatattagacggaggaagcaggagctactggtagaaattcagcgcctgcgggaagaactgtccgaagccatgagtgaggtcgaaggactcgaggcaaatgaaggaagcaaaacactgcaacggaaccggaaaatggccatgggtaggaaaaaattcaacatggatccgaaaaagggcatacagtttctggttgagaacgagctcctgcagaacactcctgaggagatcgcccgttttctgtataaaggcgagggccttaacaagaccgccataggcgattacctcggcgaaagggaagaactgaacctggccgtgctgcacgcgtttgtcgacctgcacgagttcaccgatctgaatctggtgcaggccctgcggcagttcctgtggtccttcaggcttcccggtgaagcccagaagattgatcgcatgatggaggcttttgctcaacgctattgcctgtgcaacccgggagtgttccagtccacggatacctgctatgtgctgagttttgccgtgattatgctcaatacaagtttgcataacccaaatgtacgcgacaagccaggacttgagcgcttcgttgcaatgaaccggggtatcaacgaggggggagatttgcccgaggagctgctccggaatctttatgacagcatccggaacgagccctttaagatccccgaagatgacggcaacgatctcacccatacatttttcaatccagacagggagggatggttgctgaagttggccggtgggagagtgaagacgtggaaacggaggtggtttatcctgaccgataactgtctgtattatttcgaatacactaccgataaggaacctaggggaatcatccctctggagaacctgtcaattcgcgaagtcgacgaccctcgaaagccaaattgcttcgagctatacattcctaataacaaaggtcagctgattaaggcgtgcaagactgaagccgacggaagagtagtcgagggcaaccatatggtataccgcatcagtgcgcctactcaagaggaaaaagacgaatggatcaaatcaattcaagctgctgtctcagtagaccctttctacgaaatgctggccgctcgaaaaaaaagaatttccgttaagaaaaaacaggagcagccctag

SEQ ID NO: 219949 - DNA, 1200 bp, synthetic construct
  misc_feature 1..1200: note = Description of Artificial Sequence: Synthetic coding sequence
  source 1..1200: mol_type = other DNA
atggaagatggcgtgtatgaacctccggacctcacacccgaggagagaatggagctggagaatatacgaagaagaaagcaggaattgttggtagaaattcaacgccttagagaagaactctccgaggcaatgtcagaggtagaaggactggaagcgaacgagggtagtaaaactctgcaacgtaacagaaaaatggcgatgggtcggaaaaagttcaacatggaccccaaaaaggggatccagtttctggtggagaacgagctcctgcagaatactccagaagagatagcacgttttctgtacaaaggtgaaggactcaacaagacagccatcggcgattatctgggggagcgggaagaactgaacttggccgtgctccacgctttcgtggaccttcacgaatttactgaccttaacctcgtgcaggctttgcggcagttcttgtggtcctttcgccttcctggagaagcacagaagatcgacagaatgatggaggccttcgcccagagatactgtctttgtaaccctggcgtattccagagtacagacacctgctatgtactaagctttgccgtgataatgctgaacacttcactgcataaccctaacgtgcgtgataaacctggtctggagcgattcgttgctatgaacagaggaatcaatgagggcggtgacctgcccgaggaacttctccgtaatttatatgattccatccgcaacgagcctttcaagattcccgaggacgacggaaatgacctcacgcacacattcttcaacccagatagagaaggatggctgctcaagcttggcggtagggttaagacctggaagcgccgttggtttatcctgactgacaactgcttgtattacttcgagtatactactgacaaagaacccagggggatcataccactggaaaatctgtctatccgcgaggtggacgatcccagaaaacccaactgctttgagctgtacattcctaacaacaaggggcagctcataaaggcatgtaaaactgaggctgatggcagggtggtagagggtaaccatatggtatacaggatctccgcaccgacccaggaggagaaagatgagtggattaagtctattcaggccgcagtgtccgtggatcccttctacgagatgctcgccgcaaggaagaaaaggatatctgtaaaaaagaagcaagaacagccctag

SEQ ID NO: 219950 - DNA, 1200 bp, synthetic construct
  misc_feature 1..1200: note = Description of Artificial Sequence: Synthetic coding sequence
  source 1..1200: mol_type = other DNA
atggatgaagacggcggaggtgagggaggtggggtgcccgaagacctgtcactcgaggagagggaggaactgctggatatccggaggcgcaaaaaagagttaattgatgacatcgagcgcctgaaatacgagatagcagaggtgatgacggaaattgataacctcacctccgttgaggaaagcaaaaccactcaacgcaataagcagatagcaatgggtaggaaaaaatttaacatggatccaaagaaaggcattcagtttctgatcgaaaacgatctcctgcagtctagccctgaggatgtcgcccaatttctctataagggggaaggcctaaataaaaccgtgatcggtgactacctgggcgaaagagacgaattcaatataaaagtgctgcaggcattcgtagagttgcacgaattcgccgatctgaacctggttcaagcactcaggcaattcctgtggtcttttagattaccgggagaggcccagaagatagacaggatgatggaagcttttgcatcccgatattgcttatgtaatcctggcgtgttccaaagtaccgacacttgttacgttctgtcctttgccatcattatgctgaacacgagtttacataaccacaacgttcgggataagcccacagcagagagattcatcgcaatgaatcggggtatcaacgaaggtggcgatctgccggaggaattactccgtaatctttacgagtctataaagaacgagccattcaagatccccgaggatgacggcaatgatctgacccacaccttctttaacccagatagagaggggtggcttctgaagttggggggaagagtgaagacatggaagcggaggtggttcatactgacggacaactgcctctactattttgagtataccaccgataaggagcctcggggaattatcccattggaaaatttaagtataagggaggtagaagatccacgcaaacccaattgctttgagctttataacccttctcataagggacaagtgataaaggcatgcaagaccgaagctgacggtagagtcgtggaaggcaaccacgtcgtctaccgaatctccgccccatcacccgaagagaaggaggagtggatgaaatcaatcaaggcaagcatttctcgtgacccattttacgacatgttggctaccagaaaaaggaggatcgccaacaaaaaatag

SEQ ID NO: 219951 - DNA, 945 bp, synthetic construct
  misc_feature 1..945: note = Description of Artificial Sequence: Synthetic coding sequence
  source 1..945: mol_type = other DNA
atggcacttccacagctgcagaccgccatgttggctgcatttctgtgggatccgagggatgtggttcttactgcccaaccaggcgctgagcagtgtgccgagagctctcagcatatccgaatattgcagccacagttcagactcatccgactcagattttggaagctgtacatccagcgacgcgtgcaggcctggcagttcctgtggagctttcggctcccaggtgaggcccagaaaattgataggatgatggaagctttcgcatccagatactgcctatgcaacccaggagttttccagtcaaccgacacctgttacgtgttgtcttttgccataatcatgttgaatacaagcctgcacaaccataacgtccgagataagcctaccgccgaaagatttattgccatgaatagaggcataaacgagggaggtgatctgcctgaggaactcctgcggaatttatatgaaagcattaagaacgagcccttcaaaattcctgaggacgatggcaacgatcttactcacaccttctttaacccagaccgcgagggctggttactgaaactaggcggtagggtgaagacctggaaaaggagatggttcatcctgaccgataactgtctgtactatttcgagtatactaccgataaggagccacgaggcatcattcctctggagaatctgtccatccgtgaggtggaggaccctagaaaacctaattgtttcgaattatacaatccctcgcataagggccaagtgattaaagcctgtaaaacggaggccgacggacgggtcgttgaggggaaccatgttgtgtaccgaatctccgcgcctagcccagaagagaaagaagaatggatgaagagtatcaaggcaagcatctcccgggacccattctacgacatgctggcaacgcgcaagagacgcatcgcaaataaaaagtag

SEQ ID NO: 219952 - DNA, 1185 bp, synthetic construct
  misc_feature 1..1185: note = Description of Artificial Sequence: Synthetic coding sequence
  source 1..1185: mol_type = other DNA
atggacctctgtcaccctgagcccgctgagcttagctccggtgagacagaagagctccagcgcataaagtggcatcggaaacaactgttagaggatatacaaaaactcaaggacgagatcgctgatgttttcgcgcagatcgactgctttgaatcagctgaggagagccgcatggctcagaaggagaaagaattgtgtatcgggaggaaaaaatttaatatggatcctgccaagggcatccagtactttattgagcacaagcttctgactccggacgtgcaggatattgcacggtttctgtacaaaggggaagggctgaataaaaccgctatcggaacatatttaggagaaagggatccaatcaatctccaggtgctccaggccttcgtggattgccatgagttcgctaatctgaacttagtccaggcactgcggcagttcctatggagctttcgcctcccaggggaggcacagaagatcgaccgtatgatggaggcgtttgcaacccggtactgtctatgcaaccccggtgtgttccagagcactgacacctgctatgtcctaagtttttcaattataatgcttaacacctctctgcataatccgaatgtgcgagataggcctccgtttgagcggttcgtgagcatgaaccgcggaattaacaacggaagcgatctgcccgaagaccagctcagaaacctcttcgactcaatcaagtctgaaccattctcgattccggaggacgacgggaacgatctgacgcacaccttcttcaatcctgatagggagggctggctactcaagctgggaggcagggttaaaacttggaagagacgctggttcatccttactgacaactgtctctactactttgaattcaccactgacaaggaacccaggggaatcattccacttgaaaacctgagcgtgcagaaggttgatgacccaaaaaagcctttctgtctggagctgtacaacccatcctgcagaggacagaaaatcaaggcttgtaagactgacggcgatggcagggtggtggaagggaagcacgagtcttatagaatcagcgctacgtctgctgaggagcgggatcagtggatagagtccattcgggcatccattacgcgggtgcctttttatgatctggtgtccactcgtaaaaaaaaaatcgcctctaagcagtag

SEQ ID NO: 219953 - DNA, 474 bp, synthetic construct
  misc_feature 1..474: note = Description of Artificial Sequence: Synthetic coding sequence
  source 1..474: mol_type = other DNA
atggatctgtgtcatcccgagcccgctgagctttcaagcggggaaaccgaggaacttcagcggattaaatggcatagaaagcagctgttggaggatatccagaaactcaaagatgaaattgcagatgtttttgcacagatcgattgtttcgagtctgccgaggaatcaagaatggctcagaaagaaaaagagctgtgcattgggcgtaagaaattcaatatggatcccgctaaaggaatccaatactttatcgaacacaagttgctgacgcccgacgtgcaggatatagcccgattcctttataagggagagggacttaataaaactgccatcggtacttatctcggggagagggatcccataaatttgcaggttctgcaggcatttgtggattgccatgagttcgcgaaccttaatctggtccaggccctgaggtttagagaaggcgcttccgacctgggcttcggaggctag

SEQ ID NO: 219954 - DNA, 876 bp, synthetic construct
  misc_feature 1..876: note = Description of Artificial Sequence: Synthetic coding sequence
  source 1..876: mol_type = other DNA
gatagatccactggtcacttgttccctagaggagtgggtatggatctatgtcacccggaacccgctgagctgtcatccggtgaaacggaggaactgcagagaatcaagtggcacagaaaacagctcctcgaggacatccagaagttaaaggacgaaatcgcagatgttttcgctcagatcgactgtttcgagagcgctgaggaaagcaggatggcccagaaggaaaaagagctgtgtatcggcagaaagaagttcaacatggaccctgccaagggcatccaatactttattgaacacaagctgctcacacccgatgtgcaggacatcgctagattcctatacaaaggcgaggggctgaacaagaccgccatcggaacctatcttggcgagcgggatcccatcaacctccaggtgctgcaggcatttgtcgattgccatgaattcgcaaatctcaaccttgtccaggcattacggcagtttctgtggtcatttcggctcccaggagaagcccagaagattgatcgtatgatggaggcattcgctacacggtactgcctctgcaaccccggagtgtttcagagcactgatacgtgctatgtcctgtcatttagtattattatgttaaatacaagcctgcacaaccccaatgtgcgggaccgcccacccttcgaacggttcgtgagcatgaacagagggataaacaacgggagtgacctccctgaagatcagttacgcgttacatgggagtgttctcaacgcaggtctcgggagcgtacttttcagaaggaagaagttgctaggaccgaagcctgccctgactgggaacgtcgcggtgtccaatgcggcagagaaccattgagacaacaccaggagtag

SEQ ID NO: 219955 - DNA, 444 bp, synthetic construct
  misc_feature 1..444: note = Description of Artificial Sequence: Synthetic coding sequence
  source 1..444: mol_type = other DNA
tgaacccataccagtgggagcctctcctcccgggatagccaagctggcgactccgcgtccagggccggaggcagggttaaaacatggaagcggcgttggttcattttgacagacaactgtctgtattacttcgagttcacaacggataaagaacccagaggcatcattcccctggaaaatctcagcgtgcagaaggtggatgacccaaagaaacctttctgcctggagctgtacaacccatcctgcaggggccagaagatcaaggcctgcaagactgacggcgatggacgtgtggttgaggggaagcacgaatcatacaggatcagcgctacatctgcagaagaacgggatcagtggattgaaagtattcgtgctagcattaccagagtcccattttacgacctcgtctccacgcggaagaagaagattgcctcaaaacagtag

SEQ ID NO: 219956 - DNA, 354 bp, synthetic construct
  misc_feature 1..354: note = Description of Artificial Sequence: Synthetic coding sequence
  source 1..354: mol_type = other DNA
atggacctctgtcacccagagcccgctgagttgtcatccggggagaccgaggagcttcaaagaattaagtggcatcggaaacagctgctggaggatattcagaagctgaaagatgaaatcgctgacgtctttgcccagattgattgcttcgagagtgccgaggagtcacgaatggctcaaaaagagaaggagctttgcattggccgaaaaaagtttaatatggaccccgctaaagggattcagtattttattgagcacaagctgctgaccccagacgtccaggatattgcccgtttcctctacaagggggagggcctgaataagactgccattggaacttatttgggtgaatag

SEQ ID NO: 219957 - DNA, 777 bp, synthetic construct
  misc_feature 1..777: note = Description of Artificial Sequence: Synthetic coding sequence
  source 1..777: mol_type = other DNA
atggtgctctgcgttcagggaccgagaccccttctcgccgttgagcggaccggccaacggcctttgtgggccccttcacttgaactcccgaagcctgtgatgcagcccctgcctgccggagccttcctggaagaggtggcggagggtaccccagctcagactgaatccgaacctaaagtgttagatcccgaagaagatctgctgtgtattgcaaagacattttcttaccttcgcgagtctggatggtactggggctcaatcacagcgtcagaagcgaggcagcatctgcaaaagatgccagagggaacttttctggtgcgcgacagcactcatcccagctacctgtttacactcagtgtgaaaacgacacggggaccaactaatgtgaggattgaatatgcagatagcagctttagactagattcaaattgcttgagccggccacgcatactcgcgtttcctgacgtggtttccctcgtacagcattacgtcgccagctgtaccgccgacacccggagcgacagccccgatcccgcacccacaccggctttacctatgccgaaagaagacgcgccttctgaccccgctctcccagcccctcctccagctaccgcagtgcacctgaagctcgtgcaacctttcgtgcgcagatcaagtgcacgaagcctgcagcatctgtgtaggcttgtaattaatcgcttggtagcagacgtggactgtctccctctcccccgacgaatggctgattacctacgccagtacccattccagctttag

SEQ ID NO: 219958 - DNA, 828 bp, synthetic construct
  misc_feature 1..828: note = Description of Artificial Sequence: Synthetic coding sequence
  source 1..828: mol_type = other DNA
atgtatctcgagcacacctcgcattgtccccatcacgatgacgacacagctatggacacccccctgccacgccctagaccactactggccgtggaacgaactggccagcggccactgtgggctcctagtttggagttaccaaagcctgtgatgcagccgctgccagccggagcttttcttgaggaagttgccgagggaacgccagcacagacagagtccgagcccaaggtgctggacccggaggaggatctcctgtgtatcgcgaagaccttcagctacctaagggaatccggctggtactgggggtcaatcaccgcttccgaagctcgacaacatcttcaaaagatgccggaggggaccttcctggtaagggacagcactcacccttcttatttgttcaccctgagtgttaagacaactcgcggtcctactaacgtgcgaattgaatacgcggacagctcctttcgtcttgattcaaattgcttgtcccgtccaagaattctcgcctttcccgacgtggttagcctggttcaacattatgtcgcttcctgcaccgctgataccagaagcgatagtccagaccctgcccctacccctgccctccctatgcctaaagaggatgcaccttccgacccagcacttcctgcacccccaccagccactgcggtccaccttaagctggtccaaccgtttgtgcgtagaagttccgctcggtccctgcaacatctctgtcggctggtcatcaacaggctcgttgccgatgttgattgcctccctctgcctaggcgaatggctgattatctccggcagtatccctttcagctgtag

SEQ ID NO: 219959 - DNA, 1269 bp, synthetic construct
  misc_feature 1..1269: note = Description of Artificial Sequence: Synthetic coding sequence
  source 1..1269: mol_type = other DNA
atgcccgctggaaggaggggtcccgcagcgcagtcagccagacgcccaccccctctccttcctctgctccttctcttatgcgttttaggggcacccagagctggatccggcgctcacactgccgtgatcagcccccaagaccccacattactgatcgggagttccttgctggcaacttgcagtgtgcatggtgaccctccgggtgccacagccgagggcctgtattggacgctgaacgggcgaagattgcccccagagctgagtcgagtgcttaacgcctccactctggctttggcacttgctaacctgaacggctcacgtcaacggtccggcgataatctggtgtgtcacgcccgtgatggaagtattctggccggaagctgtctttacgtggggctgcctccagaaaagccagtgaatattagctgttggagtaaaaatatgaaagacctgacttgcaggtggacccccggtgcccacggtgagactttcttgcatacgaactactccctgaaatacaaactccgatggtacggccaagataatacatgtgaagaataccacaccgtgggcccacacagttgtcatattcccaaagatctggcgctctttactccatatgaaatatgggtggaagcaactaaccgtcttggctctgcaaggtccgacgtgttaactctcgatatactggacgtggtcacaactgaccccccacctgacgtgcatgttagcagagttggcggactggaagaccagctgtcagtgagatgggtttctccgccagcactaaaggattttttgttccaggccaagtatcagatacggtatagagtggaggattcagtagactggaaagttgtagacgatgtgtctaatcagacctcctgtaggcttgcaggacttaagcccggtacagtgtacttcgtgcaggtccgatgtaacccatttgggatctacggatccaaaaaggccggaatctggtctgagtggagtcatcccacggccgcttccacccctcgctcagagagacctgggcctggcggtggcgcttgtgagccacgcggaggtgagccgtccagcggccctgtgcgacgggaactcaagcaatttctagggtggcttaagaaacacgcctattgtagcaatctgtcttttagactgtacgaccagtggagggcctggatgcagaagagtcataagactcgcaaccaagatgaggggatcctgccttccgggaggcggggaacagcaagggggccagcacgctag

SEQ ID NO: 219960 - DNA, 702 bp, synthetic construct
  misc_feature 1..702: note = Description of Artificial Sequence: Synthetic coding sequence
  source 1..702: mol_type = other DNA
atggggagactggtcctcctgtggggagctgcagtgttcctgctggggggttggatggccctcggacagggaggagccgctgagggagttcaaatccagattatatacttcaacctagaaaccgtccaggttacttggaatgcgtccaaatacagcagaaccaacttgaccttccactacagatttaatggcgatgaagcatacgatcagtgcaccaattatttacttcaggagggacatacctctggctgcctccttgatgctgaacaacgtgatgacatcctgtacttctcaatacggaatgggacccaccctgtcttcacagcttccaggtggatggtatattaccttaagccaagttctccgaagcatgtcaggttctcctggcaccaagatgccgtaacagttacttgctcagatctctcctatggagatctgctgtatgaagtgcaatatcgtagcccttttgacactgaatggcagactcagtcaagaagcgttacccaagctggtgtgcagtggtgcgatttgtgcctgctccaaccctcccctcctcgcttcaaaagattttcttgcttaagtctgccctcatcatgggactatagacaccccccacccaggctggccaacttctgcatcatttctcgggatggtgtatccccatgctggcccggatggtcccggacatgcgacctgcgctag

SEQ ID NO: 219961 - DNA, 771 bp, synthetic construct
  misc_feature 1..771: note = Description of Artificial Sequence: Synthetic coding sequence
  source 1..771: mol_type = other DNA
atgggccgtctagtgctgctatggggagccgcagtgtttctcctgggtggctggatggcgcttggccaggggggtgctgccgagggagtccagatacagatcatctacttcaacctcgagacagttcaggtgacctggaatgcatctaagtactcacgaaccaaccttaccttccactacagattcaacggagacgaagcatatgatcagtgcacgaactatttactccaggagggccatacttcaggctgtttactggatgctgagcagcgcgacgatattctgtatttctccattaggaatggcactcacccagtcttcacagcctcgcggtggatggtgtactatctgaaaccctcaagtccaaagcatgtgcggttcagctggcatcaggatgctgtgacagtaacttgctccgatttgtcttacggggatctgttgtacgaggtccagtatcgcagcccgttcgatacagaatggcagagcaagcaggaaaacacctgtaatgtgacaatcgagggcctcgatgcggaaaaatgctatagcttttgggtacgcgtcaaagcgatggaggacgtctatgggccagacacctaccctagtgactggtccgaagtcacatgctggcagcgcggtgaaatcagggacgcatgcgccgagaccccaacgcctcccaaaccaaagctgtccaaattcatcctgattagcagcctcgccattctcctgatggtgagcctcttactgttatcactatggaagctctggaggtag

SEQ ID NO: 219962 - DNA, 768 bp, synthetic construct
  misc_feature 1..768: note = Description of Artificial Sequence: Synthetic coding sequence
  source 1..768: mol_type = other DNA
atggggcgactagtccttctttggggagccgcagtcttcctgttagggggttggatggccctcgggcagggaggagctgcagaaggagttcaaatccagataatttatttcaatttggaaacagttcaggtgacttggaacgctagtaagtattctcgcactaatctgactttccattacagattcaacggtgatgaagcatatgaccagtgcacaaattacctgctgcaggaagggcacacatccggctgcctgttggacgctgagcagagggatgatatcctctacttcagcatccggaatggaacccacccagtcttcacagccagccggtggatggtgtactatctgaaaccttcaagtcccaagcatgtccgattctcttggcatcaggacgcagtgactgttacttgctcggatctcagctacggcgacttgctgtatgaggtgcaatatcgaagtcctttcgacacggagtggcagagcaaacaggaaaatacatgcaatgtcactattgaagggcttgatgcggaaaaatgttactcattctgggtaagagtgaaagccatggaggacgtgtacggcccagatacttacccgtctgactggagtgaggtgacgtgttggcagcgaggagagatacgagatgcttgtgctgagacacctacaccgccaaagccgaaactgagtaagttcatcctgatcagcagcctggcaatcctcttgatggtgtctctgcttttgctgagtctgtggaagttgtggtag

SEQ ID NO: 219963 - DNA, 411 bp, synthetic construct
  misc_feature 1..411: note = Description of Artificial Sequence: Synthetic coding sequence
  source 1..411: mol_type = other DNA
atgcgaactcctggccctctgccagtgctcctgctgttactggccggagcacccgctgcgaggcctaccccacctacctgttactcaagaatgagggccctgagccaagagataactagagatttcaaccttttgcaggttagcgagccctcagagccctgcgtacgctatttaccgcgtttgtacctcgatatccataactactgcgtcttagataagcttcgcgattttgtggcaagccccccttgttggaaggtggcccaagtagatagtttgaaagataaagcccgaaagttgtacacgattatgaacagcttctgccgcagggacttggtgtttttgctggacgattgcaatgcattggagtatccaattcctgtgaccactgtgttgccagaccggcagcgatag

SEQ ID NO: 219964 - DNA, 3762 bp, synthetic construct
  misc_feature 1..3762: note = Description of Artificial Sequence: Synthetic coding sequence
  source 1..3762: mol_type = other DNA
atggcagcccaagtgacactggaagatgccctttccaacgtggatctcttggaagagctacccctcccagaccagcagccctgtatagagccgccaccctctagtttgttgtaccagccaaatttcaacaccaattttgaggatcggaacgccttcgttacaggaatcgccaggtacatcgaacaggccacggtccactccagcatgaacgagatgctagaggaaggacaagaatacgctgtcatgctgtatacatggagatcttgcagtcgggctattccccaagtaaagtgtaatgagcagcccaaccgggtggagatatatgaaaaaacggtggaagttctcgagccagaagttaccaagctgatgaacttcatgtactttcagaggaatgccatcgaacgcttttgtggcgaagtgaggcgcctgtgccatgcagagaggaggaaggactttgtgtcagaggcatacctcattacactcggtaagtttattaacatgtttgccgtactagatgaactcaaaaacatgaagtgctccgtgaaaaacgaccacagtgcctacaagcgggcagctcagtttcttaggaaaatggccgacccgcagtctatccaggaaagtcagaacctaagcatgtttttagccaaccacaacaaaatcacacaaagcctccagcagcagcttgaggtgataagcggctatgaggaactgctagcagatattgtgaatctgtgcgtcgactattatgaaaaccgtatgtatctgacccccagtgagaagcatatgctgttgaaggtgatgggctttggactgtacctgatggatggatcagtcagcaatatttacaaactggatgccaagaaacgcattaacttaagtaaaatcgataagtactttaaacagcttcaggtggtccccctgtttggcgacatgcagatcgagcttgccaggtacatcaaaacctccgcacactatgaggaaaacaagagtcggtggacctgtacgtcctcgggctcttcgccacaatataatatctgcgagcagatgatccagatacgggaagaccatatgaggttcatctcagagctcgcgaggtattcaaattcggaggtggtgactggttcaggacgccaggaggcccagaagacagatgcggagtataggaagctgtttgatcttgctctgcaggggctgcaacttctgagccagtggtctgcccacgtaatggaggtttatagctggaaactagttcacccaacagataagtattcaaacaaggattgccctgattctgctgaggagtatgaacgcgcaacacgctataactatacgtccgaggaaaagttcgcactagtggaagtgatcgctatgattaaaggcctgcaagtactgatgggtcggatggagtcagtcttcaaccatgctatacgccacacggtttatgctgcactgcaggatttcagtcaggtcacgctgcgggagcccctgcgccaagccatcaaaaaaaagaagaatgtgattcagagcgtgctgcaagcgattaggaagactgtctgtgactgggaaacaggtcacgaacccttcaatgacccagccctccgcggagaaaaggatcccaaatccgggtttgacatcaaagtcccaaggcgggctgtcgggccaagctcaacccaactttacatggtcaggactatgctcgagtcacttattgccgacaaatcagggtccaagaaaactttaagatctagcttggagggaccaactatcttggacatagagaagtttcacagggagagcttcttttatacacacctgatcaatttctctgagaccttacagcagtgctgcgacctctcacagctgtggttcagggagttcttcctggagttaacgatgggaaggcgcatccagttcccaatcgaaatgtctatgccatggattttaacagaccacatactcgaaactaaagaggcctccatgatggagtatgtgctttacagcttagacctttataacgattcagctcactacgcattgacccgcttcaacaagcagttcctgtacgacgaaattgaggccgaggtgaacctttgtttcgatcaatttgtctataagctcgccgaccaaatctttgcgtactacaaggtaatggcagggagcctccttctggacaaacgcctgaggtcagagtgcaaaaaccagggcgctacaatccatttgcctccctctaaccgctatgaaacattgctgaagcagagacatgtgcaactcctgggtcgctccatcgacctgaaccgcctgatcacacagcgcgtgtcagctgcgatgtataaaagcctggaacttgctatcgggagattcgagtctgaggatttgaccagcatcgtcgaattggatgggctgctagagatcaatcggatgacacacaagctccttagtcgatatcttacactggatggattcgatgccatgtttcgagaggcaaaccataatgtttctgcgccatacggcagaatcactcttcatgttttctgggaactgaattatgattttctgcccaactactgctataatggcagtaccaaccgattcgtacggacagttctaccctttagccaagagtttcagcgggacaagcagccgaatgcacaaccccaatacctgcacggctccaaggcactgaatctggcatattccagtatatatggatcctataggaactttgtggggcctccccattttcaggtcatctgtagactgctcggctaccaaggcatcgcagttgtgatggaagagctgttaaaagtagtaaaatccttgcttcagggtaccatcctgcagtacgtcaaaacactgatggaggtgatgccaaaaatctgtcggcttccaaggcatgagtatgggagcccaggtattctggagttcttccaccaccagttgaaggatattgtggagtacgccgaactgaaaaccgtgtgcttccaaaacctccgtgaggtaggcaacgccattctgttctgcctgctgatcgagcagtctctatccctggaggaagtgtgcgatctgttgcatgccgcaccgtttcagaacatcctgccaagggtacacgtcaaagagggagaacgattggatgccaaaatgaaaagactcgagtccaaatatgcacctctccacttagtacctctaatagagcgccttggcactcctcagcaaattgccattgcacgggaaggggacttgttgacaaaggagcgcctttgttgcggcctgtccatgttcgaagtcatactcaccagaatacgatcattcctagacgatcccatttggcgaggcccactaccttccaatggggtgatgcacgttgacgaatgcgtggagttccacagactgtggtccgcaatgcaatttgtgtactgtatcccggtgggaacccacgagtttaccgtggaacaatgctttggggatggtttacactgggccggttgcatgataattgtgctcttgggccagcagcgtcggttcgctgtcctggacttttgctatcatttactgaaggttcaaaaacacgatggcaaggatgaaattattaaaaacgtgccactaaagaaaatggttgaaagaatacggaaatttcagattttaaatgatgagattatcaccatattggacaagtatttgaagtccggggacggcgagggaactcctgtggagcacgtaagatgcttccagccacctatccatcagagcctagctagcagctag

SEQ ID NO: 219965 - DNA, 3768 bp, synthetic construct
  misc_feature 1..3768: note = Description of Artificial Sequence: Synthetic coding sequence
  source 1..3768: mol_type = other DNA
atgggacccaagcatgttcttaggcagcccggaccgtccgagcgccatcatccagaagtcccagcatggacccctagggcaggtcccccttgttggctctgtcgtcagcgctgggggtggacgttgcacccacctgggagggggtgtcctgcgctgctgctcagcgagcctagaatggccgctcaagtgaccttggaggatgccctatctaacgttgatctgctagaggagcttcctctcccagaccagcagccctgtatcgagccacctccatcttcgcttctgtaccagaatgagatgctggaagaggggcaggagtatgcggtgatgctctatacgtggcgctcatgctcccgcgcaatccctcaggtcaagtgtaatgaacagcctaatagagtggaaatctacgagaaaactgtggaggtcctggagcccgaagtcacaaagctgatgaactttatgtattttcaacggaacgccatcgaaagattttgcggtgaagtgaggcggctttgtcacgctgagcggaggaaggatttcgtttccgaagcctatctgatcacattgggcaaatttataaacatgttcgccgtgcttgatgagctcaaaaacatgaaatgctccgttaagaacgaccattctgcttacaagcgagctgcacagtttctcagaaagatggcggacccacagtccatccaggaaagccagaacctctcaatgtttctcgctaatcataataagatcactcagagcctccagcagcagctcgaggtcattagtggctacgaggagctgctggcagacatagtgaatctctgcgttgattattacgaaaacagaatgtaccttactcctagtgagaagcatatgttgttgaaagtgatgggtttcggcctctatctgatggacggtagcgtgagcaacatatacaaactggacgctaaaaagcgaattaacttgtccaagatagataagtatttcaagcaattgcaggtcgtgccactgtttggcgacatgcagattgaactggcacgttacataaagacctctgcccactacgaggagaataaatcaaggtggacttgcacttcttctggaagttcaccgcaatataatatctgcgagcagatgattcagatccgagaagatcatatgaggttcatcagtgagctggctaggtactcaaattccgaggtcgtgacaggatccgggagacaggaagcacagaagacggacgctgaatacaggaagctattcgatctggccttgcagggactgcaactgttgtcccagtggagcgcacatgtcatggaagtgtacagttggaagttagtgcacccgactgacaagtacagtaacaaggactgccctgactccgctgaggagtacgaacgtgcgacccggtacaattacacctccgaggagaagtttgcactggtcgaggtgatcgccatgattaaggggttgcaggtgttaatgggacggatggaatctgtgttcaaccacgcaattcgccacacagtctacgctgcgctccaggacttttcccaggtcactcttagagagccgctgcgacaggccattaagaaaaagaagaatgttattcagagcgtcctacaagccattaggaagacggtgtgtgattgggagacaggccatgagccttttaacgacccagcgctacgtggcgagaaagatcccaagtccggatttgacattaaagtgccaaggcgcgcagtgggaccgtcttccactcagctctacatggtgagaactatgctggagtctctgattgccgacaaatccggttcgaaaaaaacactaaggagctccctcgaaggacccaccattctggacattgaaaagttccacagggaatccttcttctacacccacctgatcaacttttcagaaaccttgcagcagtgctgcgacctttctcagctctggtttagagagttcttcctggagctgacgatgggtaggcgcatccaatttcccatcgaaatgagtatgccgtggatactcacagaccacattttagagacaaaggaggcttcaatgatggaatatgtgctgtattcgttggatctgtataatgactcggcccattacgctctgacacgcttcaacaagcagttcttatatgacgaaatcgaggccgaagtgaatctgtgcttcgaccaatttgtatacaagctggccgatcaaatctttgcttattacaaggtcatggccggtagtctactactagataaaagattgcgaagtgagtgtaaaaatcagggggcaactatccacttgcctccatcaaaccgctatgagaccctgcttaagcagcgtcacgtgcagttactcggccgaagcattgacttaaacaggctgattacacaacgggtgtccgcagccatgtataagtctttagagctggccataggccgtttcgagtctgaagacctgacatcaattgtcgagttggatggcctgttagagatcaacagaatgacacacaagctcttgtctagatatctgacattggatggcttcgatgctatgtttcgagaagccaatcacaatgtgagtgctccctatggcaggatcacacttcacgtcttctgggagctgaactatgattttttacccaattattgttacaatggcagcacaaaccgattcgtgcggaccgtgcttccttttagtcaggaattccagcgggacaaacagccaaatgctcagcctcagtacttacacggatccaaggcactcaatctcgcttactctagcatctatggatcataccggaactttgttggcccacctcattttcaggtcatctgtcgactgctcgggtaccaggggatcgccgtggttatggaggagttgctcaaagtggtgaagtcactgctacagggtacaattttacagtatgtgaagacgcttatggaggttatgcccaagatatgccgcctccccagacacgaatacggaagtccaggcatcctggagttcttccatcaccaactcaaagacattgtagagtacgcagaattgaaaacggtgtgtttccagaacttgcatgcagccccatttcagaacatcctgccacgggtccacgtaaaagagggtgaaaggctcgatgccaagatgaagagactcgagtcaaagtacgcccctctccaccttgttcccctgattgaaaggctaggaacacctcagcaaatcgcgattgctcgggaaggtgatcttctgaccaaagaacgactgtgttgcggactgagcatgtttgaagttattcttacacggatccggtctttcctggacgatccaatctggagaggccctctaccttccaacggtgtgatgcatgtggacgagtgcgtggagtttcatcgactctggagcgccatgcagttcgtatattgcatccccgtgggaacccacgagtttacagtcgagcaatgtttcggcgacggactccattgggccggttgcatgatcatcgtcttgctcggccaacagcgcaggtttgcagtactggatttttgttaccacctcctcaaggtccagaaacacgatgggaaggacgaaatcattaagaatgtgccccttaaaaaaatggtagagagaatccgaaagtttcaaattctgaatgatgagatcattactatcttagacaaatatcttaagagcggcgacggtgaggggacgccagtcgaacacgttagatgctttcagccccctatacatcagtcactcgcctccagttag

SEQ ID NO: 219966 - DNA, 2469 bp, synthetic construct
  misc_feature 1..2469: note = Description of Artificial Sequence: Synthetic coding sequence
  source 1..2469: mol_type = other DNA
atggcagagagtttgggttctgccgagctgctgaggcagttaaagagtctaggaatggagaggttgttacatgcagtcaacaccttcctgagacagagctgcacctacttacctctcctgacatttgggggaaaaacttcctttgtcagtctagatgtgtacggtaccgaagccaactgttctgccacttcctgtagcttcccaaaagcagccgctacttggccacgaaggcaagccccaggtccgctcggggaactcgtccggggaccacccgatcaaggcgtggcagagcagtctttctcccatggcctcttcgagtttggcatcactaacgtgccgtgtatattctctcccccacagatgtttccttggatcattcagttatacatggtcagaactatgctcgagtctctgattgcagacaaatctggatccaaaaagacactgcgctccagcctggagggcccaactattttggatatcgagaagttccaccgcgaatcattcttttatactcacctgatcaacttcagcgagacgctgcaacagtgctgcgacttaagtcaactttggttcagggaattcttcctggagcttaccatgggcaggaggatacagtttcccatcgagatgtcaatgccttggatcctcacagaccatatcctggagactaaggaggcctccatgatggaatatgttctatatagcttagacctttataacgactcagcacactatgcactcacacgctttaataagcagtttctctacgacgagattgaggccgaagtcaacttgtgtttcgaccagttcgtgtacaagctcgctgaccagattttcgcatactacaaggtgatggctggctctcttttgctggataagcggctgcggagtgagtgcaagaatcagggggctacaatacacctccctccttcaaacagatacgagactttgttgaaacagcgccatgtgcaactgctgggtagatccatcgatctgaatcgcctgattactcagcgggtaagtgctgctatgtataagagcctcgagctggctattggcaggtttgaatcagaagacctgacgtcgattgtggaactcgatggtttgctggagatcaatagaatgacgcacaagttactttcaaggtacctgacactcgacgggttcgacgctatgtttcgcgaggctaaccacaatgtctcagccccatacgggaggataaccctgcacgtcttttgggaactaaattacgatttcctgccaaattactgttataatggctccaccaatagattcgtgcgcaccgtactcccattctcgcaggagttccagcgtgataagcaacccaacgctcagcctcagtacctgcacggatccaaggctctgaacttggcttactcaagtatatacgggtcctatagaaactttgtgggcccaccacatttccaggtgatttgccggctcctgggatatcagggcatcgccgtcgtgatggaagagctgcttaaggtggttaagagtcttctccagggaaccatattacagtatgtgaaaaccctgatggaagtcatgccaaaaatttgtagattgcctcgacacgaatatggcagccccggtatcctcgagttctttcaccaccagctgaaggatatcgttgagtacgccgaactcaagaccgtgtgcttccaaaacctccgcgaggttgggaacgccatactgttctgcctcttgattgaacagtctctgtcgctggaagaagtctgtgacctgctacacgcggcaccctttcagaatatcttgccccgagttcatgttaaagagggggagcgattagacgctaagatgaaacggttggaatccaagtacgcccctctgcacctggtcccattaatcgaacgactgggtacccctcagcagatagccatcgctagagagggggacctgttgacgaaggaacgtctttgttgcgggctgagcatgttcgaagtgatcctgactagaatccggtcctttctggatgacccgatttggcgaggaccccttccgtccaacggtgtgatgcatgttgacgaatgcgttgagtttcacagactgtggtctgccatgcagtttgtttactgcatccctgttggaacacatgagttcactgtcgagcagtgcttcggcgatggactccactgggctggatgcatgattatcgtgctcctggggcagcagcgcaggtttgccgtcctcgacttttgttaccatctcctaaaggtgcagaagcacgatggtaaagatgaaattatcaagaatgtccctctgaagaagatggtagagcggatcaggaagtttcagattctcaatgacgaaattatcacgattctggataaatacctgaagtccggtgacggagaaggcactcccgtagagcatgtgcgatgtttccagccccctattcaccagtccctcgcctctagctag

SEQ ID NO: 219967 - DNA, 3762 bp, synthetic construct
  misc_feature 1..3762: note = Description of Artificial Sequence: Synthetic coding sequence
  source 1..3762: mol_type = other DNA
atggctgcccaggtgaccctcgaagacgccctgagcaacgtggacttgctggaagaacttcccttgcctgaccaacagccgtgtattgaacccccaccaagcagcctgttgtaccagcctaattttaacacaaattttgaagacaggaacgcctttgtgaccgggatcgcacgctatatcgaacaggcaactgtccatagcagtatgaacgagatgctggaggaaggacaagagtacgcagtgatgctgtacacttggaggagctgcagccgtgctatccctcaggtaaaatgcaatgagcaacctaacagagtggagatctatgagaagactgtcgaggtgctggagcctgaggttacaaaactgatgaacttcatgtactttcaaaggaatgccattgaaaggttttgcggggaagtccgacgcctatgccacgcagagagacggaaggatttcgtgtccgaggcgtacctgatcacattggggaaattcatcaacatgttcgccgtactggacgaactaaagaacatgaagtgttcggtgaaaaacgatcacagcgcttataaaagagcggctcagtttttgaggaaaatggcggatccacaatccattcaagagagccagaacctgagcatgttcctagctaaccacaacaaaataacacaatccctgcaacaacagctggaagttatctccggttatgaagagctcctggcagatatcgtaaatctttgcgtggattattatgagaacaggatgtatctcacaccatccgagaagcatatgttattaaaggtcatgggatttggattgtatctaatggatggttcggtatcaaacatatataagctggacgctaagaagcggatcaacctgtctaagattgataagtactttaaacagcttcaagtcgtgcccctgtttggagatatgcaaatcgagctggcgagatatatcaagacatctgcccattatgaggaaaacaaatcccgctggacatgcacctcctcagggagtagtccccagtacaacatatgcgagcagatgattcagatcagagaggatcatatgcgtttcatatcagaactggcccgatactctaactccgaagtcgtgacaggatcagggcgtcaggaagctcagaagaccgacgcagagtacagaaagctctttgacttggcgctacaagggctacagttgctctctcaatggtccgctcatgtcatggaagtttacagctggaaacttgtgcaccctactgataagtattcaaataaagattgtcccgattccgccgaagaatatgagcgcgcaacacgttacaactacactagcgaggaaaagtttgcccttgtggaggtcattgccatgattaagggactccaagtgcttatgggcaggatggagtctgtgtttaatcacgctattaggcacacagtgtacgcggctttgcaggatttttctcaagtgactcttcgcgagccactgcgccaggcaatcaagaagaaaaagaatgtcatccaatccgttctccaggccatcaggaaaactgtgtgcgactgggagacaggtcacgaaccatttaatgatcccgcactcagaggtgaaaaagaccccaagtctggattcgatattaaagtgccgaggagagccgtgggcccaagcagcacgcagctgtatatggtcaggacaatgcttgagagcctgatcgccgacaagtctggcagtaagaaaacattgaggagcagccttgagggtcctaccatcttggatatcgagaagtttcatagagaaagcttcttttatacacacctgatcaatttctctgagacgctacagcagtgttgcgatctaagccagttgtggttccgggagttttttctagagctgaccatgggacgcaggattcaattccctatcgaaatgagtatgccatggatcctcaccgaccacatccttgagactaaggaagcctccatgatggagtacgtgctttactcgttggacttgtacaacgattccgctcattacgctctgaccagattcaacaagcagtttctgtacgatgaaattgaagctgaggtgaatttatgttttgaccaatttgtctacaaactggcagaccagattttcgcatactataaagtgatggctggaagcctcttgttagacaagaggcttcgctctgaatgtaagaaccagggggctactattcacttacccccatccaatcggtacgaaactctgttgaagcaaagacatgtgcagctgctgggcagatccattgatttgaacaggctgatcacacaaagggtgagtgctgcaatgtataagtctctggaattggctataggtaggttcgagtcagaagacctaacaagcatagtcgagctcgatgggctgcttgagataaaccgaatgactcataagctgctatcaagatatctcacactggacggctttgatgccatgttcagagaggcaaaccacaatgtgtccgctccctacggcaggatcaccttgcacgtgttctgggagctgaattacgatttcctgcctaattattgttataacgggtctacaaaccggtttgttcggaccgttctccccttttctcaggagtttcagagggacaagcagcctaatgcccagcctcagtacctccatgggtcaaaagcactgaacctggcttactcaagtatctatggtagttaccggaatttcgtgggacctcctcacttccaagtgatctgtcgtctgctgggataccaagggatcgcggtggtgatggaagaattactcaaggtagtcaaatctttactgcaaggtactattcttcagtacgtgaagacattaatggaagtaatgcctaagatttgccgtctccctcgtcatgagtatggatctccagggatcctggagttcttccatcaccagctcaaggacattgtggaatatgccgaattgaaaacagtatgctttcagaatctgagggaggtaggaaatgccattctcttttgtctgctgatcgagcagtccttgtctctggaggaagtatgcgatttgctgcatgcagccccttttcagaatattctgccacgcgtccatgtcaaggaaggggaaagattagatgcaaaaatgaagcgcttagagtctaaatacgcgccacttcacctagtgcccctgatcgagcgcttaggaacacctcagcagatcgcgatcgcccgagagggggatctgctgacaaaagagagactttgctgcggcctcagcatgttcgaggtgattcttacacgcattcgatcttttctggatgatcctatttggcgtgggcctctgccctccaacggggtcatgcatgttgatgagtgcgttgagttccatcggctgtggagtgccatgcaatttgtgtactgtatcccagtcggaactcatgagtttacagtggagcaatgctttggcgatggccttcattgggcgggttgcatgattatcgtgttgttggggcagcagaggcgcttcgccgtgttagatttttgttatcacctgttgaaggtgcagaaacacgacggcaaagacgaaatcataaaaaacgtgcccctgaagaagatggtggagaggatccgcaagttccaaatccttaatgatgaaataattacaatactcgataaatacctgaaatccggcgacggggagggaacgccagtggagcatgtacgatgctttcagccacctattcaccagagtctggcatcctcttag

SEQ ID NO: 219968 - DNA, 486 bp, synthetic construct
  misc_feature 1..486: note = Description of Artificial Sequence: Synthetic coding sequence
  source 1..486: mol_type = other DNA
atggcagcccaggtcactctggaggatgcactcagcaacgtcgaccttctcgaagaactgccgcttcccgatcagcagccatgcattgaacccccaccgtcaagcctgctgtatcagcctaatttcaataccaacttcgaggaccgcaacgcctttgtcaccggcattgcaaggtatattgagcaggcaaccgtgcatagcagcatgaacgagatgctcgaagagggacaggagtatgccgtgatgctatatacatggcgctcatgctcaagagctatcccacaggtaaagtgtaacgagcagccaaaccgcgtagagatatacgagaagaccgtggaagtgcttgaaccagaggtcaccaagctcatgaacttcatgtactttcagaggaacgccattgagcgattctgtggggaggtcagaaggctctgccatgctgaaagaaggaaagatttcgtgtctgaggcgtaccttatcactctttag

SEQ ID NO: 219969 - DNA, 456 bp, synthetic construct
  misc_feature 1..456: note = Description of Artificial Sequence: Synthetic coding sequence
  source 1..456: mol_type = other DNA
atggctgcccaggtaacacttgaagatgctctgtcgaacgtggatctgctggaagaattgccattgccagatcaacagccgtgtattgagcccccacctagctccctactatatcagcccaacttcaataccaattttgaggataggaatgcattcgttacgggcattgctagatacatagagcaggccacagtgcacagctcaatgaatgaaatgctggaagaggggcaagagtacgctgtcatgctgtacacatggagatcatgctcacgcgcaatcccacaggtcaagtgtaatgaacagcctaacagagtcgaaatatacgaaaaaactgttgaagtgctggagccagaggtgaccaagttaatgaacttcatgtactttcagcgcaacgctattgagaggttctgcggcgaagtcagacggctgtgtcacgccgagcggcgtaaggattag

SEQ ID NO: 219970 - DNA, 3837 bp, synthetic construct
  misc_feature 1..3837: note = Description of Artificial Sequence: Synthetic coding sequence
  source 1..3837: mol_type = other DNA
atgacgacccacgttactctcgaagatgcccttagtaatgtggacctgcttgaggagcttcccttgcccgatcagcaaccctgcatcgaaccgcctcccagttctattatgtatcaggcaaactttgatacgaattttgaagataggaatgcttttgtcactggaattgctcggtacatcgaacaggctacagtgcattcaagcatgaacgagatgttagaggaaggacacgagtatgccgttatgctctatacctggagaagctgctccagggcgattccacgcgtcaagtgcaatgagcagcccaaccgcgtagagatttacgagaagactgtggaggtcctagaacccgaggtaaccaaactgatgaagttcatgtattttcaaagaaaagcgatagaacggttctgttccgaggtgaagagactgtgccacgccgaaaggcgcaaggactttgtgtcagaagcttatctgctcaccttggggaagttcatcaacatgtttgcagttctggatgagctgaaaaatatgaaatgttcagtgaagaatgaccatagcgcctataagcgggctgcacagttcctcagaaaaatggctgacccccagagtattcaggaaagccagaatctctcaatgttcctggctaatcataaccgcattactcaatgcctgcatcagcagctggaagtcatacccggatatgaggaacttctagccgatatcgtgaatatttgcgtcgattattacgagaataaaatgtatttgacacctagcgagaaacacatgctgctgaaagtgatggggttcggcttatatctgatggacgggaatgtcagcaatatctataaactagacgccaagaaaagaatcaatctatcaaaaattgataaatttttcaagcagctgcaggtagtgccactgtttggtgacatgcagattgaactggccagatatattaaaacatctgctcattacgaggaaaataagtccaaatggacatgcacacagtcctcaatcagccctcagtacaacatatgtgagcaaatggtgcagatcagagatgatcatattcgctttatcagcgaactggcccgatactcgaactccgaggtagttacggggagcggactcgattcacagaaatccgacgaggagtaccgcgagctattcgacttagcccttcggggtcttcagttgttatctaaatggtcggctcacgtgatggaagtttattcctggaagctggtgcaccccacagacaagttttgcaacaaggattgcccaggcaccgccgaggagtacgagcgtgccacaagatataattatacctccgaggagaaattcgcattcgtcgaggtgattgccatgataaaaggccttcaagtgctcatgggaagaatggaatccgtgttcaatcaggcaatacgcaacaccatttatgcggctttgcaagactttgcccaggttactctgagagaacctctgagacaggctgtgcgcaaaaaaaagaacgtgctaatctcagttctccaggcgatacggaagacaatttgcgattgggagggcggacgtgaacccccaaacgacccgtgtcttcgaggcgagaaagatcccaagggaggttttgacatcaaggtccctcgcagagctgttggaccatctagtacacaggcctgccaatggtcccccagagcgctgttccacccaacaggcggtacacaagggcgtcgagggtgccgctcgctcttatacatggttcgcaccatgttagaatccttaattgcagacaagagcggaagcaagaagactctgcgcagttcacttgacggacctatagtgcttgctatagaggatttccataagcagtctttttttttcactcatttactaaatatctccgaagctctgcagcagtgctgtgatctgagccaattatggttccgcgagtttttcctggagctcaccatgggtcggaggatccagtttccgatagagatgtccatgccttggatactgaccgatcatattttagaaacaaaggagccctcgatgatggagtacgtactgtacccactggacctttacaatgatagcgcatattatgcgctgaccaagttcaaaaagcagttcctctatgacgagattgaagccgaagtcaacctctgttttgatcagtttgtgtacaagctggctgaccagatttttgcatactacaaagctatggccggaagtgtcctactggacaaacgcttcagggccgagtgcaagaactatggcgttataataccttacccgccatctaataggtacgaaacgctgctgaagcagcggcacgtgcagctcttgggcagatccatcgatttgaacaggctaataacacagcgtatctccgctgccatgtacaaatccctggaccaggccatctctaggttcgagagtgaggaccttacttccattgtcgagttagagtggcttctcgaaatcaacagacttacccaccggcttttgtgcaagcatatgactctggattcttttgatgccatgtttcgggaagctaaccacaacgtctcagccccttatggacgaatcacgttgcacgttttctgggagcttaactttgattttctacctaactattgttacaatggatcgacaaacagattcgtgagaactgctatcccattcacacaggaaccccaacgtgataagcccgctaacgtgcagccctattatttgtacggcagcaaaccactgaatattgcctacagccatatatattccagctaccgcaacttcgtgggccctcctcattttaagactatctgcaggttattaggctatcagggcatcgccgtggtgatggaagagttgctgaaaatcgtaaaatcattattgcagggcactatcctgcaatatgtaaaaacactcatcgaggttatgccaaagatctgccgattgcctcgccatgaatatgggagcccagggatccttgagttcttccaccaccagctaaaagatattatcgagtatgctgaacttaagaccgatgttttccaatcactgcgtgaggttggaaatgcgatcctcttttgcttgttaatagaacaggctttaagtcaagaagaagtgtgtgatttgttgcacgcggctccattccagaatatcctacctagagtctacatcaaggagggggaacgactggaagttagaatgaagcgactggaagctaagtacgccccactgcatctggtgccactcattgaacgacttggaacgccccagcagattgctattgcgcgagaaggcgaccttcttacaaaggagagactttgttgcggtctgtctatgttcgaagtcattctcacccgaattcggtcttacttacaggatccaatctggagggggcctccacccactaatggcgtcatgcatgtggacgagtgtgtggagtttcatcggctgtggtcagctatgcagttcgtgtactgtattcccgtgggcaccaacgaatttaccgcagaacagtgttttggggacggcctgaactgggccggttgttctataattgtcttacttgggcagcagaggagattcgacctgttcgacttttgctaccacttgctgaaagtgcagaggcaggatggcaaggatgagataatcaagaacgtccctctgaagaagatggcagaccggatcaggaagtatcagatactgaataatgaagtatttgcgatccttaacaagtacatgaagtctgtcgaaaccgatagctctacggtggagcatgtccggtgcttccagccgcctattcatcagagtctcgcaacaacatgttag

SEQ ID NO: 219971 - DNA, 3762 bp, synthetic construct
  misc_feature 1..3762: note = Description of Artificial Sequence: Synthetic coding sequence
  source 1..3762: mol_type = other DNA
atgacaacccacgtgactctagaggacgccctgtcgaacgttgacctgctggaagaactaccgctgccagaccagcaaccctgcatcgagccaccaccttccagtataatgtatcaggcaaattttgacactaactttgaggaccgcaatgcatttgtaactgggatagcccgatatatcgagcaagcaacggtgcatagctctatgaacgagatgctggaggagggtcatgagtacgccgtcatgctgtacacctggagatcgtgttcccgtgccattcctaaagtgaaatgtaatgaacagccaaatcgagtcgagatatacgaaaagacagttgaggtactagaacctgaggtgaccaagctcatgaaatttatgtactttcagcggaaagctatagagcggttttgcagcgaggtgaaacgcctgtgccatgccgagcgcaggaaagatttcgtaagtgaggcctacctcctcacgctgggcaaatttataaatatgtttgcagtgttagacgaactgaagaacatgaagtgttcggtcaagaacgaccattcagcctataaacgagccgcacagtttcttcgcaaaatggctgacccccagtccatacaggagtcccagaatctctcgatgtttctggccaaccacaatcgcataacacaatgcctgcaccagcaactcgaggtgatcccaggttatgaagaactccttgctgacatagtgaacatatgcgtggattattatgagaataaaatgtacctaaccccctccgagaaacacatgcttctcaaagtaatgggattcggcttatacttaatggacggcaacgtttctaacatatacaaactggatgccaaaaaaagaataaatcttagcaagattgataagttcttcaagcagctgcaggtggtcccgttattcggagacatgcagattgagctggcaaggtacatcaagacttccgcccactacgaggaaaataagtctaagtggacctgcacacagagttcgatatctccacaatacaatatctgtgagcagatggtacaaattcgtgacgaccacatccgattcatctcagagctagcgaggtactctaactccgaagtggtgactgggtctggactggactctcaaaaatctgacgaggagtaccgggagctttttgatttggcactgcgcggattacagctgctctcaaaatggtcagcgcacgttatggaggtctattcttggaaactcgtgcatccaacggacaagttctgtaataaagattgtccaggaaccgcagaggagtatgaacgggctactaggtacaattatacatcagaggaaaaattcgcctttgtcgaggtgattgctatgatcaaaggcttgcaggtactgatgggcagaatggaatctgtatttaatcaagctatccgcaacaccatctatgcagccctgcaggatttcgcacaggtaacattacgagaacctctgcgccaggctgtgagaaagaagaagaatgtcctgatatctgtgctgcaagccatcagaaagaccatttgtgactgggaagggggacgcgaacctcctaatgacccatgtttgcgcggagaaaaagatccgaagggaggcttcgatatcaaagtaccacgcagagcagtgggtcccagcagcacccagctctacatggttcggactatgctcgaaagcctcattgccgacaagagtgggtccaaaaagaccttaagaagctcccttgatggtcctatagtgctggccatcgaggattttcacaagcagagcttttttttcacacatctgctcaacatctcggaagccctccaacagtgttgcgacctgagtcagctgtggttcagagagtttttcttggaattaaccatgggcagacggatacaattccctatcgagatgtctatgccttggattctaactgatcatatcttggaaaccaaggagccctccatgatggagtacgtgctgtaccctctggatctctacaatgactccgcctactatgctctgaccaaattcaagaagcagttcctctacgatgaaatcgaagccgaggtgaacctgtgttttgaccagttcgtgtataaacttgccgaccagattttcgcttattataaagctatggcgggaagcgtcctactcgataaaaggtttcgggcagaatgtaaaaactacggtgtgattatcccgtatcctcccagcaatcggtatgaaaccctcctgaagcagaggcacgtacagcttttagggaggagtattgatctgaaccggctcatcacacagcgcattagcgccgcaatgtacaagtccctggaccaggccatcagtagatttgagagcgaggacttaacatctatcgtggagcttgagtggctcctcgagattaataggctcactcacagattgttgtgcaaacacatgacactagactcgtttgacgcgatgtttcgtgaggctaatcacaacgtttccgctccatacggacgcatcacactacatgtgttctgggaacttaactttgacttcctacctaattactgctataacggatccaccaacaggtttgttaggaccgcgataccctttacacaagaaccgcaacgggataaaccggcaaacgtgcaaccttattacctttacgggagtaaacctcttaacattgcatactcgcacatttattcttcttacagaaacttcgttggccctccccatttcaaaaccatctgtcggttgctgggctaccaggggattgcagtagtaatggaagaattattgaagatagtgaaaagtctgctgcaagggacaatcctgcagtacgttaagacattgatcgaagtgatgcctaagatctgcagattgcccagacacgagtacggctctccaggtatcctcgagtttttccaccaccaactgaaagatattattgagtatgccgagctgaagaccgatgtgtttcagtcactgagagaggtagggaacgctattttgttctgcctccttatagagcaggccttgtcacaggaggaagtttgcgacctgctgcacgccgcaccattccaaaatatcttgccacgcgtgtatattaaagaaggtgaaaggctggaggtccgtatgaaacgccttgaagcaaagtacgccccactacaccttgtcccattgattgaacggctggggactccgcagcagatagctatcgctcgagagggcgacttgctcaccaaagagcggttatgttgtggtctctcgatgttcgaggtcatacttacacggattagatcttatttgcaggatcccatctggcggggtcccccaccgacaaatggcgtaatgcatgtggacgagtgcgttgagtttcatagactctggagcgctatgcagttcgtgtactgcatccccgtgggaactaacgaatttaccgcagaacagtgctttggagatggcctcaattgggcaggctgcagtatcattgttttgttgggtcagcaacgaagatttgacctgttcgacttctgttaccatctgttaaaggtccaacggcaggacgggaaagatgagatcattaaaaacgtgcctctgaagaagatggctgaccggatccgtaagtaccaaatcctgaacaacgaggtatttgcaattctgaacaaatacatgaaatcagtggagactgattcgagtaccgtggaacacgtgcgatgtttccagccaccgatccaccaatccttagctaccacatgctag

SEQ ID NO: 219972 - DNA, 3762 bp, synthetic construct
  misc_feature 1..3762: note = Description of Artificial Sequence: Synthetic coding sequence
  source 1..3762: mol_type = other DNA
atgaccactcatgtcaccctggaagacgctctcagcaatgtggatctgctcgaggagctgcctctcccagatcagcaaccttgcatcgagcccccaccttcttccatcatgtaccaggccaattttgacaccaactttgaagaccggaacgcctttgtgaccggaattgctaggtatattgaacaggcaacggtccattccagtatgaacgagatgctggaggaaggacacgagtacgccgtgatgctgtacacctggaggagttgtagtagagctattcccaaagttaaatgcaacgagcaaccgaacagagtggaaatctacgagaagacagtcgaagtgctggaaccagaggtgacgaagctaatgaaatttatgtactttcagcgcaaagctatcgagaggttctgtagtgaagtcaagagattgtgtcatgctgagagacggaaagatttcgtgtccgaagcatatctactgaccctagggaaatttataaatatgtttgctgtactcgatgaactcaagaacatgaaatgctctgtgaaaaatgatcactcagcgtacaagcgagctgcccagttcctgcgtaagatggctgacccccaaagcatccaggaatcacaaaatctttctatgttcctcgcaaatcataatcggatcactcagtgtctccaccagcagttagaggtgattcccggatacgaggagctcttggctgatattgttaacatatgcgtggactactacgagaacaagatgtatctcaccccatcagagaaacacatgttactgaaagttatggggtttggcctgtacctcatggatggcaacgtgagcaatatttacaagctggatgccaagaagcggattaacctgtccaaaatcgacaaattttttaagcagctacaggtagtgccattatttggggatatgcagatagagctggcacgttatattaagacgagtgctcactatgaggagaacaagtcgaagtggacgtgtacacagtcatccatctcaccgcagtacaacatttgtgaacagatggtccagattagggacgatcatatccggttcatctccgagctggcccgatactcgaattctgaagtggtcacgggatccggcctggacagccagaaatcggatgaagaatatcgagagctgtttgatctcgcgctcagagggcttcagctgctgagcaagtggtctgctcacgtcatggaggtctactcctggaaattggtacatcccactgacaagttttgtaataaagactgccctggtacggcagaggagtacgagagagctactcgatacaattacaccagcgaagaaaagtttgcgtttgtggaagtgatagcaatgatcaagggactgcaagttttgatgggacgtatggagagcgtattcaatcaggccatccgtaacaccatatacgccgcactgcaggatttcgcccaggtgacactgcgggaaccattgcgccaagccgtgcgcaaaaaaaagaatgtactgatctcagtgctccaggccatacgaaagaccatctgcgattgggaggggggtcgagaaccccctaacgatccgtgccttaggggtgagaaggatccaaagggaggctttgatataaaggttcccagaagggcggtgggaccctcgtccactcagctgtacatggtccggaccatgcttgagagtcttatcgctgacaagtcaggatctaaaaagacgctccggagctcgctggatgggcctatagtgctcgcgatcgaagattttcataagcagtcctttttctttacccatctgctgaacattagcgaggcgctgcaacagtgttgtgatctaagccagctttggtttcgcgagttcttcctcgagcttacaatggggcgtaggatccagtttcccattgaaatgagcatgccttggatactcaccgaccatattttggaaacaaaggaaccaagtatgatggaatacgtcctctatccattggacttatacaacgatagtgcctattacgccttaaccaaatttaagaagcagttcctttacgatgagatcgaggcagaagtgaacctgtgcttcgaccagttcgtttacaagctcgctgatcagattttcgcgtactataaggccatggccggttcagtcttgcttgataagaggttccgcgcagaatgcaagaactatggcgtgatcatcccctatccaccatcaaatcggtatgagactttgcttaaacaacgacacgttcaacttctcggacggagcatcgacttgaatcgcctcattacccagcgaattagcgcagccatgtacaagagcctggatcaagcaatttctagatttgagtcagaagatctgacgtctatagtagagctggaatggctgctggaaatcaatcgactgacccaccggctgttgtgtaagcatatgacgttagactcttttgacgcaatgttccgtgaagccaatcataacgtaagtgccccatacggccgtatcactctgcacgtgttttgggagctcaacttcgactttcttcccaattattgctacaatgggagcactaacagattcgtgaggaccgctattccatttacccaggaaccacagcgggacaaacccgcaaatgttcaaccgtactacttatacggatcgaagccgctgaatatcgcctattcccatatttactcttcctaccgcaatttcgtcggacctccacattttaagaccatttgccggttgttgggataccagggcatcgccgttgtcatggaggagctgctgaagattgtaaagagcctgcttcaggggaccatactccagtatgtaaaaacgttgattgaagtaatgccgaagatctgcaggctgccccgtcatgaatacggatcccctggtatcttggagttcttccaccaccagctaaaggacatcatcgagtatgcggaacttaagactgacgtctttcagagtcttcgtgaggttggcaacgcaattctgttttgtctccttatagagcaggccctgtctcaggaagaagtatgcgacctgctgcacgccgcaccattccagaatatattaccacgagtgtacattaaggagggtgagagacttgaggtgcgtatgaaaaggctcgaagctaaatacgctcctctccatctggttccactgattgagcggctcggtacaccacaacagatcgctatcgcccgtgagggagatttgctgaccaaagagcggctgtgctgcggcctgagcatgttcgaggtgattctgacacggataagatcctatttgcaggatccaatctggagaggcccacctccaactaatggggtgatgcacgtagacgagtgtgtggaattccatcgcctttggtcagcaatgcaattcgtgtattgcattcccgttggaacaaacgaatttactgccgaacagtgtttcggtgacggtttgaattgggcgggatgcagtatcattgtgttactcggccaacagaggagattcgacctgtttgacttctgttaccacctgctgaaggtacagaggcaggacggaaaggatgagatcatcaagaacgttcctctaaaaaagatggccgaccggatcagaaagtaccagatcctgaacaatgaagtgttcgccatcctaaataaatacatgaaatctgttgagacagatagtagcaccgtggagcacgtgcgctgctttcaaccgcctattcatcagtcactcgctactacctgctag

SEQ ID NO: 219973 - DNA, 2859 bp, synthetic construct
  misc_feature 1..2859: note = Description of Artificial Sequence: Synthetic coding sequence
  source 1..2859: mol_type = other DNA
gagaaaagaaggcgatggacctgcacccaatcttctatctctccccagtacaatatctgcgagcagatggtgcaaatccgggacgatcacatcaggttcattagcgagttggctagatattccaactctgaggtcgtcacaggctctgggctcgactcacagaagagcgatgaagagtacagggaacttttcgacctcgccctcagaggtctgcagctactgtctaagtggagcgctcacgtgatggaagtgtatagctggaagctagtgcatccgactgacaaattctgtaacaaggattgtcccggaaccgccgaagagtatgagcgagcaacgagatataactatacgtccgaagagaagtttgccttcgttgaggtgattgccatgattaagggccttcaagtgctgatggggcgtatggagtcagtatttaatcaagcgattcgcaacactatctacgcggctctgcaggattttgcccaagtaaccttgagagagcctctgagacaggccgtgcgcaaaaaaaaaaacgtccttatctccgtactccaggccatcagaaaaacgatctgcgattgggaagggggacgtgagccaccaaatgatccatgtctgagaggagaaaaagaccccaagggcggatttgacatcaaagtgcccaggcgggctgttggtccaagttcaacccaggcttgtcagtggagccccagggccctcttccacccaacaggtggtacccaaggcagaagggggtgccgctccctgttgtatatggtccgaaccatgctggagtcactcatcgctgacaaatctggaagcaagaagacgcttaggagcagccttgatgggccaatcgtccttgctattgaggacttccacaagcagtcattttttttcacccacttgctaaatatctctgaagccttgcagcaatgctgtgatctctctcagctgtggtttcgggagttctttctggagctgaccatggggagacgcattcaatttccaattgagatgagtatgccttggatactgacggaccacattttagagacaaaagaaccaagtatgatggagtacgtgctctacccattggatttgtacaacgactccgcgtattatgctctgactaagtttaaaaagcagttcctatacgatgagatcgaagcagaggtgaacctctgctttgatcaattcgtttataaattggccgatcagatcttcgcatactacaaagccatggcgggaagcgttctcctggataagagattcagggccgagtgtaaaaattatggagtcataatcccctaccctccatccaataggtatgaaactcttctgaagcaaaggcacgtccagttgctggggcgtagcattgacctgaaccggctgataacccagcgaatctcagcagcaatgtataagtctttagatcaagcaatctcgcgattcgagagcgaggatctcacgtccatcgtcgaactggagtggcttctcgaaatcaaccgactcactcatagactgctctgtaaacacatgaccctggacagctttgatgctatgttccgtgaggccaaccacaatgtgtctgctccctatgggaggattactttacatgttttttgggaactcaactttgacttcctgcctaattactgctacaatggcagtactaatcggtttgtgagaactgccatacctttcactcaggaaccccagagggacaagcctgctaatgtgcaaccttactacctgtatgggagcaagccactcaacatcgcctactcacacatttattcctcttatagaaatttcgtgggaccccctcactttaagacaatatgtcggctgctaggataccagggtatcgctgtggtcatggaggagttgttaaaaatagtcaaatctctgctgcagggtaccatcttgcagtatgtgaaaaccctgatcgaagtgatgcccaagatctgccgattgccaagacacgagtatgggagtccaggcattcttgagttcttccaccaccagctgaaggacatcatcgagtatgcagagttgaaaacagacgtcttccagagtctgagggaagtggggaacgcaatccttttctgtctgctgatagaacaggctctgagccaggaggaggtttgcgatctgcttcatgcagctcctttccaaaacatcctgcccagggtctacatcaaagagggcgagaggctggaagtcaggatgaaacgcctcgaagcaaagtacgctcccctgcacctggtacccctgatcgagaggcttggaaccccccagcagatagctatcgcccgtgagggcgacttattgactaaagaaagattatgctgtgggctatcaatgttcgaggtcatcctcaccagaatccgtagttacctgcaagacccaatttggcgcggacctccccctacaaatggggtgatgcatgtagacgagtgtgtagaatttcacaggctttggtcagcaatgcaattcgtatactgcatcccagttggcaccaatgagtttactgccgagcagtgcttcggcgacggactcaactgggcagggtgcagcattatcgtcctgctgggacagcagagaagattcgatctgtttgacttctgctaccacctgctgaaggtccaaaggcaggatggaaaagacgagattattaagaatgtgcccctgaaaaagatggctgaccgcatcagaaagtatcagattctgaacaacgaagtcttcgccatcctgaataagtacatgaagtctgtcgaaactgatagcagcaccgtcgagcacgtgagatgtttccagccgcctatccaccagtctttggctacaacttgttag

SEQ ID NO: 219974 - DNA, 651 bp, synthetic construct
  misc_feature 1..651: note = Description of Artificial Sequence: Synthetic coding sequence
  source 1..651: mol_type = other DNA
atggccggaagcgtccttctggacaagcggttccgcgcagagtgcaagaattacggagtgattatcccatatcccccttctaaccgatacgagaccctactcaaacagcggcatgtgcaactactgggacggagcatcgatctcaatcgtctcattactcagcgaatttccgcggcaatgtacaagtcccttgaccaggccatttcccgctttgagtcagaggatcttacgagcatcgtggaactggagtggctgctcgagatcaaccgtctgacccaccgactcctttgcaaacacatgaccctggattccttcgatgccatgtttcgggaggccaaccacaacgtgagcgccccttacggtcggataacattacatgtgttctgggagctcaactttgatttcctgccaaattactgttacaacggatcaaccaacaggttcgttcgcacggcatctttccacccacgaaccactactcggcaaacgtgccaacgacccgcactgctaccattgtggatccaggcctcccaacactgtctacaaccccacttgcagctgcttcaggaatttagaggggcaacctcattccaggattatgctgatagctgggtcattcgcgcaagcttatggtcgtggcggaattgctag

SEQ ID NO: 219975 - DNA, 3537 bp, synthetic construct
  misc_feature 1..3537: note = Description of Artificial Sequence: Synthetic coding sequence
  source 1..3537: mol_type = other DNA
atgaccactcacgtcactctggaggacgctttatctaacgtagacctccttgaggagctccctctaccaaacgagcagcccaacagggtggaaatctacgaaaaaaccgtggaggtcttagagccggaagttacaaagctgatgaagttcatgtacttccaacggaaggcaatagagagattttgctccgaggtgaagaggttatgccacgcagaacgaagaaaggacttcgtgtccgaagcctacctgttaactctgggtaagttcattaatatgtttgccgttctggacgaattaaagaacatgaagtgcagtgtgaagaacgatcactccgcctataagagggccgctcagtttctgaggaagatggctgacccgcagtcaattcaagagtcgcagaatttgtccatgtttttggcaaatcacaatcggatcacccagtgcctgcaccagcagttggaagtgatcccaggttatgaagaactcctggcagatatcgtgaacatatgtgttgattattacgagaacaaaatgtacctgacaccgtccgagaagcatatgctgctcaaggtaatgggctttgggttgtatctgatggatgggaatgtgagcaatatttataagctcgatgctaagaagagaatcaatctttctaagatcgacaaatttttcaagcagctgcaggtggtgcccctcttcggagacatgcagatcgaactagctcgatacataaagaccagtgctcattacgaggagaacaagagtaagtggacctgcacccagagttcaatatcaccacagtataatatttgcgaacagatggtgcaaatcagggacgatcatatccgttttattagcgaactcgcgaggtactctaattccgaggtggtgactggttctggcttagactcccagaaatctgatgaagaatatagagagctcttcgatttggctctgagaggattgcagctgctgtcgaaatggtccgcacatgtgatggaggtgtatagctggaagctagtgcaccctacagacaagttctgtaacaaggattgtcccggaaccgcagaagaatacgaaagagccacgaggtacaattacacctccgaggaaaagttcgcctttgtagaggttatagccatgatcaaggggctccaggtgctgatggggcgaatggaaagtgtgttcaatcaggctatacggaacactatttacgccgctctgcaggatttcgcccaggtgacactgcgagaacccctccgccaagctgtaagaaaaaagaagaacgtgctgatttccgtgctgcaggcaattagaaagacgatctgtgactgggagggaggtcgcgagccgcctaacgacccctgcctgagaggggagaaggatcctaagggcggttttgatataaaggtgcccagacgggcagtgggcccaagcagcacacagctgtacatggtgaggaccatgttggaatctctgattgctgataaatctggaagcaaaaaaaccctccgcagctcattagatggccctattgtcttagccatcgaggatttccataagcagtctttcttcttcacccacctgctgaacatcagcgaggccctgcagcagtgctgcgacctcagccaactgtggtttcgcgagttcttcctagagctcacaatgggtcgcagaattcagtttccaatcgaaatgagcatgccctggatcctgaccgatcatatcctggaaacgaaggagccctctatgatggagtatgtgttgtacccattggacttgtataacgatagcgcttactacgccctaaccaagtttaaaaagcagttcctgtacgatgagattgaggctgaggtcaatctgtgttttgaccagttcgtatacaaactagctgatcagattttcgcttactacaaggctatggctggttccgtattgctggacaaaaggtttcgtgccgaatgtaagaactatggagtcattatcccctacccaccgagcaaccgatatgagactctcctaaaacagagacatgtgcaattgctgggacggagcatcgatttgaatcggctgatcacccagagaatctccgctgccatgtataagtcactagaccaggcaatttccagattcgagagtgaggacctcaccagtatcgtggagctcgaatggctgctggagataaatagactcacccataggttactgtgtaagcacatgacactggactcatttgatgcaatgttccgggaggcaaatcacaatgtcagcgccccttatggcaggattacgcttcacgtcttttgggagctgaatttcgactttctgcccaattactgttacaatggatctactaacagatttgtacgaactgctatcccattcacacaggagccccaaagggacaagccggcaaatgtgcaaccttattatctgtatggaagtaagcctctcaatattgcatacagccatatttattcctcatacagaaattttgttggacccccacactttaagaccatttgtagactgttaggatatcaagggattgcagtcgtgatggaggaacttctaaaaatcgtaaagagtctgctgcaagggaccatactacagtatgtcaagactctgatcgaagttatgcccaagatttgtagactccccaggcacgagtatggatctcccggaatcctggagttcttccaccatcagcttaaagacatcatcgaatatgccgagctgaagaccgatgtcttccagtctttgagagaagtcggcaatgccatcctgttctgtctcctgatcgagcaggccctctcgcaggaggaggtgtgcgacttacttcatgcagctccttttcagaatatccttccgagagtgtacatcaaggaaggcgagcgtctggaagtcagaatgaaacggcttgaagcaaagtacgcgcctctgcaccttgtgcccctgatcgagcgactgggcaccccacagcagatcgctatcgctagagagggcgacctcctgacgaaggagagattatgctgcggattgtccatgtttgaggtaattctgacacgcatcagaagctacttacaagaccccatttggcgcggacctccgcctactaatggcgtgatgcacgtggacgaatgcgtggagtttcataggctgtggagcgccatgcagttcgtttactgcatcccagtggggacaaatgaatttacagcagaacagtgtttcggtgacggtcttaactgggccggttgttcgattattgtgttattggggcagcaaagacgctttgaccttttcgacttttgctaccacctgctcaaggtacagcgccaggacggtaaagatgagatcataaaaaatgtcccccttaagaagatggccgacaggattcggaaatatcagattctgaataatgaagtatttgcgatcttgaacaagtatatgaagtctgtggagaccgactcatccactgtagaacatgttcgctgctttcagcccccaattcaccagagcctggctactacgtgttag

SEQ ID NO: 219976 - DNA, 4617 bp, synthetic construct
  misc_feature 1..4617: note = Description of Artificial Sequence: Synthetic coding sequence
  source 1..4617: mol_type = other DNA
atggaaccaaggatggaatcatgcctcgctcaggtcctgcagaaggatgtcggcaaaagactgcaagtggggcaagagctaatcgactatttttcggacaaacagaagtctgcagatctggagcacgaccaaaccatgcttgataagctcgtggacgggctggccacctcgtgggtcaattctagcaattacaaggttgttcttcttggcatggatattctttccgccctcgtgacgcgcctgcaggatcgcttcaaagcccagatcggcactgtgttaccctctcttatcgatcggcttggagatgcaaaagactccgtccgtgaacaggatcagaccttgctactcaagataatggaccaggcagctaatccacagtacgtgtgggaccggatgctgggcggttttaaacataagaattttaggacaagagagggaatttgtctctgcctcatagccaccttaaacgcctctggggctcagactttgaccctgagtaaaatcgttccccatatttgcaacctcctgggtgatcccaacagccaggtgcgagatgccgcaattaacagcctggtcgagatttatagacacgtcggggaacgggttcgcgcagacttgtctaagaagggcttacctcagagtagactaaacgtgatcttcacaaaatttgacgaagtgcagaaatccggcaacatgattcagtccgctaacgataaaaattttgatgacgaagatagcgtcgatggcaacaggccctcttcggcgtcaagcaccagctccaaggctccaccttcatctcggagaaacgtgggcatggggaccactcgcagactcgggtcaagtaccctcggatcgaaatcctccgctgctaaagaaggggcaggagcggtggacgaagaagacttcatcaaggcctttgatgacgtgccagtcgttcagatttacagcagccgagacttagaggaaagcattaacaaaatacgtgagatactgtccgacgacaaacatgactgggagcagcgggtgaatgctctcaaaaagatacggtcattgctgttagcaggggcagccgagtacgacaattttttccagcatctgcggttactggacggcgcatttaaactttcagcaaaagacctacgttcacaggtggtccgagaggcctgcataactttaggacacctgtcttctgtgctaggcaacaaattcgaccatggtgctgaggccataatgccaacaatattcaatctcatccctaattccgccaagatcatggctacctccggggtcgtggccgtgagactgatcatcagacacacacacatccctcggcttattccggtgatcacctcaaattgtacaagcaagtccgtggccgtgcgacgacggtgctttgaattcctggacttactgttgcaggagtggcagacccactctctggaacgtcatatcagcgtcctggctgagacaatcaagaagggaatccacgacgcggactctgaggcacggattgaggcgagaaaatgctattggggcttccattcccacttcagccgagaagccgaacacctgtatcataccctcgaatcttcataccaaaaagctctgcagtctcatttgaagaactctgatagtattgtgtcgctccctcagtccgacagaagctcctcgtcttcgcaggagtcacttaaccgcccattgagcgccaagaggtctcccacaggctcgacaacgtcccgggcatccactgtgagcactaaaagcgtgagcaccacgggctctctgcagcggagcagatctgatattgacgtgaacgctgctgcgagcgcaaaatctaaggtgtctagctcgtctgggacaaccccattctccagtgccgctgccttaccccctggttcctacgctagcttgggccgaatcaggacacggcgtcagagctccgggagcgctacaaacgtggccagcaccccggacaaccgaggacggtctcgtgcaaaggtggtctcacagagccagcgctccagatcagccaatccggcaggagctgggtcccgttcatcaagtcctggcaaactgctaggtagtggatacggcggtctgacaggcggatctagcagaggcccacccgtcacaccgtcttctgaaaagcgctccaagatccccaggtcccagggatgcagtcgcgagacctcgcccaaccgcattggtctcgctaggtccagtaggatccctcgaccttcgatgagccagggatgctccagggacacctctagggagtcctccagagacactagccccgctcggggatttccaccacttgaccggttcgggctggggcagccaggaagaatcccaggatcagtgaacgcaatgagagttctctccacatcaaccgacctggaggcagccgtcgccgacgccctgaagaagccggttagacggaggtacgaaccctatgggatgtatagcgatgatgacgccaattccgacgcttcctccgtttgtagtgagcgatcctacggtagtaggaacggtggtatcccacattatctgcgacaaacagaagacgtggctgaggttttgaaccactgcgcttcttctaactggagcgagaggaaagaggggctgctgggcctgcagaatttgctgaaaagccagagaaccctcagcagggtagagctgaaacggctctgtgagatcttcacaagaatgtttgcagatccgcacagtaagcgtgtgttcagcatgttcctcgagacactagtggactttatcatcatacataaggatgatttgcaggactggctattcgtcctcctgacccagctgctgaaaaaaatgggagccgacctgttaggctcagtgcaggccaaggtgcagaaagcactggacgtcaccagagacagctttcctttcgaccagcagtttaatatcctgatgaggttcatcgtcgaccagacacagactccgaatctgaaagtgaaggtggcgattctgaagtatatcgaaagcttggccaggcagatggaccctaccgactttgtgaactcttccgagacaaggctcgccgtcagccggatcatcacttggacaactgagccgaagtcaagtgacgtgcgcaaggctgcccaaatcgttctcataagtttattcgagttaaacacaccagagttcacgatgctgctgggcgcattacctaagacatttcaggatggcgctacaaagttgctgcataatcatctcaaaaatagctctaacacaagcgttggatctccatccaatacgatcgggagaacaccttcaaggcatacatcctccaggacaagtccactgaccagccctacaaactgttcccatggcggactgagccctagcagactgtgggggtggtctgctgacgggctcgctaaacaccccccacccttctctcaacctaactcaattcctacagcaccttcccataaggcactgaggagatcctactccccttccatgctggactacgataccgagaacttgaattccgaagagatctatagcagtcttaggggggtcacagaagccatcgaaaaattttcgtttcgtagccaagaggacctgaatgaacccataaaacgggatggcaaaaaagagtgcgacatcgtgagtcgcgatgggggagctgcatctccggcaactgaaggaagaggaggttccgaggtggaaggaggcagaactgccctagataataagactagcttgctgaacacccaaccccctcgtgcgttcccaggccctcgtgccagggactacaatccatacccttactccgatgcaattaacacctacgataagaccgcactgaaggaagcggtttttgatgacgacatggaacagttgcgagacgtaccgatcgatcattctgacctcgtcgctgatcttctaaaagaactgagtaatcacaacgaaagggtggaggaacgaaaaggagctctgctggaactgctgaaaatcacgcgcgaagactcactgggggtgtgggaagagcacttcaaaacaatcctgctgctgcttcttgagactctgggcgataaagaccacagtatacgggctcttgccctaagagtgttgagagagatcctcagaaatcaacctgcccgtttcaagaactatgcggaacttactatcatgaaaactttggaagcccacaaagacagtcacaaagaagttgtccgggctgccgaggaagctgcttctactctggctagttcaatccatcccgagcaatgcattaaggtcctttgccccatcattcagacagccgattatcccattaacctggctgctataaagatgcagactaaagttgtggagcgaattgccaaagaatcactcttacagctgttggtggatatcatcccaggactgcttcagggatacgacaatacggagagttccgtacggaaggcgagcgtgttttgtctggttgccatatattccgttatcggcgaggacttgaagccccaccttgcccagctgaccgggtcgaagatgaaactccttaatctgtatataaagcgggcacagactactaactccaattcatcgagttcctcagatgtcagcacacattcctat

SEQ ID NO: 219977 - DNA, 4437 bp, synthetic construct
  misc_feature 1..4437: note = Description of Artificial Sequence: Synthetic coding sequence
  source 1..4437: mol_type = other DNA
atggagcctagaatggaatcctgtctggcgcaagtcctacagaaagacgtgggcaagaggttgcaagttggacaggagctgatcgactatttctcagacaagcaaaagtccgcagacctggagcatgaccaaacgatgctcgacaaacttgttgatggcctggcaacctcttgggttaatagctccaactacaaagtggtgttacttggcatggatatcctgagtgctctggtcactaggctgcaggacagattcaaggctcagatcggcactgtgctcccatccctcatcgacagactgggtgacgccaaggattctgtgagggaacaagatcagacgttgctcctgaaaattatggaccaggctgccaacccgcagtacgtatgggacaggatgctgggagggtttaaacacaagaatttccgaacccgtgaaggcatctgtctttgtttaatagcaacattgaatgccagcggagcccaaactttgacattgtcaaagatcgtccctcacatttgtaatctgcttggggaccctaattcgcaggtgagggacgccgcaatcaacagccttgtggagatatatcgccatgtgggcgagagggtgagagctgacctgtctaagaagggcttgccgcagagcagactgaatgtcattttcactaaattcgatgaggtccaaaagtcaggcaacatgatacagtctgccaatgacaagaattttgacgatgaggatagtgtcgacggtaacaggccctcgtccgctagtagcacctcctcaaaggcaccaccctccagccggcgaaatgttggcatgggaaccacacggcgtttaggcagctctacactgggttccaagagtagcgcagccaaggagggcgctggagccgtggatgaggaggactttataaaagcctttgacgacgtccccgtggtccaaatttattcttctcgggatcttgaggagtctatcaacaaaatccgggaaatactgtccgatgataaacacgattgggagcagcgcgtgaatgctctcaaaaaaattaggtccctcctgctggctggagccgcagaatacgataactttttccaacatcttcgactgctcgacggcgctttcaagctgtctgccaaagaccttagaagccaggtcgtgcgcgaggcatgtattactctgggccacttgtcttccgtgcttggcaacaaatttgatcacggggctgaggcgatcatgccaacgatttttaacctgatcccaaacagtgctaagatcatggccacctccggggtcgttgccgtgcggctcattatacggcacacccatatcccaaggctgatccccgtaataacgtcaaactgtacctcgaagtccgtggccgttaggcgacgctgtttcgagttcctggacctcctgctgcaagaatggcagacgcactccctggagagacacatttctgtactggcagaaactatcaagaaaggcatccacgatgccgatagtgaagctcgtattgaggctcggaaatgctactggggttttcactcccatttcagtcgtgaagctgagcacctctatcacacgctggagtcatcttatcagaaagcactgcagtcccatttgaagaatagtgacagcattgtgtccctaccccaaagtgacagatcctcttccagttctcaggaaagcctgaaccgcccattgtctgccaagagaagccccacaggttccacaacatctagggcctccacagtttctaccaaaagcgtgtctacaaccgggagcctgcaacgctcacgctctgacattgacgtaaacgctgcagcaagtgcaaagtccaaggtgtcaagttccagcggtacgacgcctttttcctctgctgccgctctcccacccggaagctatgcgtcccttgacgggactaccactaaggcagaggggaggatccgcaccagacgccaatcttctggctccgcaaccaacgtggcctccacaccagacaacagaggcaggtcccgtgccaaagtggtgtcacaatcccagagaagtcgttctgccaaccccgcaggggctggatcccgcagctcttcacccggtaagctgctgggaagtggctatggaggcctcaccgggggatcctctcggggtccacccgtgacaccctcaagcgaaaagcgcagtaaaatccctcgaagccagggatgctcacgcgagacttcaccaaaccgaatcggattagataggttcggattaggccagccaggcagaatccctgggagcgtgaatgcaatgcgagtgcttagcacaagcactgatttggaggccgcagtggcagacgccctcctgttgggagacagtcgaagcaagaaaaagcccgtaaggaggcgctatgagccttatggaatgtattcagacgacgacgcaaatagcgatgcctccagtgtgtgttccgagcggtcttacggatcaaggaacggaggcataccacactacttacgccaaacggaggatgtagcggaagtcctgaaccactgcgcatcttcaaattggtcagagagaaaagagggcttgctgggcctgcaaaatctactcaaatctcagagaacactgtccagagtggagttgaagagactgtgcgaaatcttcacacgcatgtttgccgacccccattccaaagtgttctccatgtttctggaaaccttggtggatttcattattattcacaaggatgacttgcaagactggctctttgtcctcctgacccagctactgaagaagatgggagctgatcttctggggtctgtccaagcgaaggtgcagaaagccctggatgttacccgcgatagctttccttttgaccagcagtttaatatcctgatgcgctttatcgtggatcagacccagacgccaaacctaaaagtcaaggtggcgattttgaaatatatagagagtctggccagacaaatggaccctactgactttgtgaactccagtgaaacccgactagcagtcagcagaataattacctggacgacagagcctaagtcgagtgatgtgcggaaagctgctcaaatcgttttaatctccctgttcgaactaaatacacctgagttcaccatgttactcggcgctctgccgaagacttttcaggacggcgcaactaagttattgcataatcacctgaaaaactcttccaatacaagcgttggtagcccatctaataccatcggtcgaactccgagccggcacacttcgagcaggacaagccctttgacctcccccacgaactgtagccacgggggtctgagccccagcatgctggactatgacacagagaacctgaattctgaggagatctacagttccctgcgaggggtcaccgaagccattgaaaagttttctttccggagccaggaagacttgaacgagcccatcaagcgggacgggaagaaagaatgcgacattgttagcagagacgggggtgcagcctctccagctaccgagggacggggaggttcagaagtggagggaggcaggaccgctcttgacaacaaaacttccctgctgaatactcaacccccaagggcttttccaggcccacgcgcacgagactacaacccatatccctactcagacgcaattaacacctacgacaaaacagccctgaaagaggctgtttttgatgacgacatggagcaactgcgtgatgttccaatcgaccactccgatcttgtggccgatcttctcaaagagctgtcaaaccacaacgaaagggtggaagagagaaagggtgccttacttgagctcctcaagattacccgggaggacagcttgggcgtctgggaagaacacttcaagacaattcttctgctcctgctggagactctgggagataaagatcatagcatcagagctctcgctctgcgagtgctgagggagattctgaggaatcagccagcaagatttaagaactatgctgaattgacaataatgaagacccttgaagcacataaagattctcacaaagaagtcgtgagagccgctgaagaggccgctagtacgttggcctcctcaatccatccagaacagtgcatcaaagtcctatgtccaataattcagactgccgactatcctatcaacctagctgccattaagatgcaaactaaagtggttgaacggattgctaaggagagcctccttcagttgcttgtggatatcattccgggactcctgcagggctatgataacaccgaatcgtcagtgaggaaagccagtgtattttgtctcgtcgctatctattcagtcattggagaggacctcaagccacatttagctcagctcacaggctcaaaaatgaaacttttgaacctctacatcaaacgggcacagaccactaattccaattcaagttctagctctgatgtgtccacccactcctag

SEQ ID NO: 219978 - DNA, 4416 bp, synthetic construct
  misc_feature 1..4416: note = Description of Artificial Sequence: Synthetic coding sequence
  source 1..4416: mol_type = other DNA
atggaaccacgtatggaaagttgcctggcccaagtcctacagaaggatgtggggaaacgccttcaggtgggccaggagttgatcgactacttctcagataagcaaaagtccgcggacttagagcatgatcagacgatgctggacaagcttgtggatggcctggccacgagttgggtgaactcatccaattataaagtggttctgctgggtatggacatcctttcggcccttgtaacccgccttcaggacaggttcaaagcacagatcggcacggtcctcccttccctgattgatcggcttggcgacgcgaaggactcggtgcgagaacaggatcagactctactgctcaaaatcatggaccaggccgctaaccctcaatacgtgtgggacaggatgctaggcggtttcaagcacaagaatttccgaactagggagggcatttgcttgtgcttaatagccaccttaaatgcctccggcgcacagactctgacgctttccaaaatcgtccctcatatctgtaacctcctgggggaccctaattcacaagtgcgtgatgctgctatcaactctctcgtggagatctacaggcatgttggtgaacgagttcgtgcagacctctccaaaaaaggactgcctcagtccagactgaatgtcatcttcactaagttcgatgaggtgcagaagagcggcaatatgatccagtctgccaacgacaaaaattttgacgatgaagactcagtagacggcaacagaccatcttccgcttcttccacaagctcaaaggctccgcctagctctagaagaaacgtggggatgggaactacaaggaggctgggatcatctacactcggaagcaaatcatccgccgctaaggagggggctggcgctgtggacgaggaagacttcattaaggcctttgatgacgtgccggtggtccaaatctatagtagcagggatctggaggaatccataaacaagattcgggagatactgagcgatgataagcacgattgggaacaacgcgtaaatgcactgaagaaaatcaggagtttgctcctggccggtgctgccgagtatgacaatttcttccaacaccttcggcttcttgatggcgctttcaagctatctgctaaagaccttcggtctcaggttgtgagagaggcatgtatcacactgggacatctgtcttctgtcctaggcaataagtttgaccacggagctgaagcaatcatgcccacaattttcaacctcatccctaattccgcaaagattatggccacaagtggagtcgtggctgttcgattgatcatcaggcatacccatattcccagactgatccctgtgataacctccaactgtacttccaagtccgtcgccgttcgaagacggtgtttcgaatttctggatctcttgcttcaagagtggcagactcactcactggagagacatatttcagtcctcgccgaaacaattaagaagggtatccacgacgcagacagcgaggcacggatcgaagctcgaaaatgttattggggcttccactcgcactttagtcgggaagcagagcacttgtaccatacgctggaaagctcctatcagaaagcactccagtctcacctcaaaaatagtgatagcattgtcagtttgccacagagtgatcggagttccagttcatctcaggagagcctcaacaggcctctctcagctaaaagatcgcctacaggaagtaccacctccagagcatccaccgtcagtacaaaatccgtctccacgactggttcgcttcagcgctcgagatccgacatcgatgtcaacgcagccgcatctgccaagtccaaggtctcatctagtagcggcactacaccattctctagtgccgctgctctccctccagggagctacgccagcctgggcaggataagaaccaggcgtcaaagcagcggttctgcaacgaacgtggcttcgactcccgacaaccggggtaggagtagggctaaggtcgtgagtcagagtcaaaggtcccgaagtgctaatcctgcgggtgcaggctcacgatcctcatctcctgggaagttgctgggaagtggatacggcggactgactggtgggtcttccagggggccacctgtcacaccatcctccgagaagagaagcaagatccctcgctcccagggatgctctagggagactagtcctaataggatcggactcgatcgcttcgggctgggccagcccggtaggatcccaggctccgtgaacgccatgagggttctctctactagtactgaccttgaggccgcagtagccgatgcactgttattgggggactctcgctctaagaagaagccggtgcgtcggcgatacgagccctatggcatgtacagcgacgatgatgccaacagtgatgccagttccgtgtgttctgagcggtcctacgggtcccgaaatggaggcatcccgcactacctgcgccagacagaggatgtggctgaggtgctgaaccactgtgctagctccaattggagcgaacgcaaggagggattactcggcctgcagaacctcctcaaaagccagcggacgctgtccagagtcgagctcaagcgactttgcgaaattttcactcggatgtttgcagacccacatagcaagctggtgttttctatgttcctggagacactggtcgactttataattatccacaaggatgaccttcaggattggctttttgttctgctgacgcagctcctcaagaagatgggcgctgatctgctgggcagtgtgcaggctaaagtgcagaaggcgctagatgtcactcgtgatagcttcccatttgatcaacagttcaatatcctcatgaggttcattgttgaccagactcagacgcccaatctgaaggtgaaggtggcgatactgaaatatatcgagtcccttgcgaggcaaatggatcctacggactttgtgaacagttctgagaccaggctggccgtttctagaattatcacctggactaccgaacctaaatcttccgatgtgcgcaaagctgcgcagatagtcttgattagcctcttcgagcttaatacacccgagttcaccatgctgttgggggctctccccaagacgtttcaggacggagccacgaaactcctgcacaatcatctgaagaactcttctaacacttcggttggttctcctagcaatacaattgggagaacaccaagtaggcacacaagctcccgtacctcacctcttacctctcccaccaactgttctcatgggggacttagcccaagtatgctcgactatgacacagagaatctgaactctgaggagatctattcctccctgaggggggtaaccgaagcaatcgaaaaattctctttcaggagtcaggaggatctgaacgaaccaattaagcgcgatggaaagaaggaatgtgatatcgtctccagggacggcggagctgccagccctgccactgaggggagaggtgggtctgaggtcgaagggggtcggacagcactggataacaaaacatctttactgaacacacagccccctagggcctttcctgggcctcgcgctcgcgattacaatccatacccatatagcgatgcaatcaacacttatgacaagactgccttgaaagaggccgtgtttgatgatgacatggagcagcttagagatgtccctatagatcacagcgatctggttgccgatctgctgaaggagctttccaatcataacgagagggtggaagaaaggaagggagcattgctggagttattgaagattaccagagaggacagcctgggagtgtgggaggagcactttaaaactattctactcctcctgcttgaaacactcggcgataaagatcattcaatccgggcacttgccctgagagtcctaagggaaatcctcaggaaccaacctgccaggttcaaaaattacgcggagcttaccatcatgaaaaccctggaagcccacaaagattcccacaaagaggtcgtgagagccgctgaggaggctgcgagcactttagcaagttcaattcacccggagcagtgtattaaggtgctgtgtcctatcatccaaactgctgactacccaattaatttggctgcaattaagatgcaaactaaggtcgtggaacgaatcgctaaagagtccctcctgcagttgttggtggatatcatacctggtctcttacaggggtatgacaacactgaatcttccgttcggaaagcatcagtcttctgcctagtagctatttactcagtcattggggaagatttgaaaccccacctggcccaactgaccggttctaagatgaagctgttgaacctctatattaagcgggcacaaactacgaactccaattcgagctcctcatcagatgtctcaacacatagttag

SEQ ID NO: 219979 - DNA, 2115 bp, synthetic construct
  misc_feature 1..2115: note = Description of Artificial Sequence: Synthetic coding sequence
  source 1..2115: mol_type = other DNA
tgaaccaaattcgatgaagtacagaagtcaggaaacatgatccaatctgccaacgataaaaacttcgacgacgaggactctgttgatggaaaccgacccagcagcgcaagctccacatcttcaaaggcccctccaagtagtcgcagaaacgtagggatgggaactacaaggcgattgggtagcagtaccttggggtcaaaaagtagcgctgctaaagaaggagccggtgccgtcgacgaggaggacttcataaaggcattcgatgacgtgcccgtggttcagatttactcatcacgggatctcgaagagtctatcaacaaaatcagggagatattgagcgatgacaaacacgactgggagcagcgggtaaacgctcttaagaaaatcaggtccctgctcttggccggagctgctgaatacgataacttcttccagcacctaagactcttggacggggcttttaaactgtcagctaaggacctccggtctcaggttgtgcgagaggcctgtattaccctcggccacctgagtagtgtgctaggcaacaaatttgatcatggtgcagaggcaatcatgcccaccattttcaacttgatccccaacagcgccaaaatcatggcaacttccggagttgtcgctgtcagactgattatcaggcatactcacatcccccgactcatcccggtgataacatcgaactgtacttcgaagagtgttgccgttaggcgacgctgcttcgaatttctggacttgctcctgcaggagtggcaaacccactctctggagcgccatatctcagtgttggccgagactatcaagaagggtattcacgatgcagatagtgaggcaagaatcgaggcgcgaaagtgttactggggattccactcccatttctcccgagaagcggagcatctgtaccacaccctagagtcaagttatcagaaagctctgcagtcccatcttaagaactccgactcaattgtgagtctcccacagagtgatcggtcaagcagtagctcgcaggagtccctaaacagacctttgagcgcaaaacgcagccctactggctctacgacatcccgagcgtccacagtgtccactaaatctgtgagcactacaggctcactccagcggtcacggtcagatatagatgttaatgcagccgcaagcgccaaatccaaggtctcaagctcaagcgggaccaccccattctctagcgcggctgccctccccccaggaagctatgcaagcctgggtcgaatccgaacccgccgacagagcagtggtagtgccaccaatgttgcctcaacgcctgacaatcggggtcgcagcagggccaaggttgtgagccagtcccaaagaagtcgtagcgccaacccggctggcgctggttcaaggtcctcgagtccaggtaagttgcttggaagtggctacggaggcctcaccggcggttcgagcaggggtccacccgttactccaagctccgagaagcgaagcaaaatacccaggagtcagggctgctcacgggagacaagccctaataggatcgggcttgaccggttcgggctggggcagcctggacgcattcctggcagcgtgaacgcaatgcgggtcctgagcaccagcactgatctcgaagcggctgttgccgatgccctcctactgggtgattcccgatcaaagaaaaagccagtgcggcgaagatacgaaccttatggcatgtactctgacgatgatgccaactccgatgcaagtagcgtatgtagtgaacgcagctacggatcacgaaatgggggaataccccactacttaaggcaaacagaggacgtggcagaggtgttaaatcactgtgcaagttccaattggtccgagcggaaggaagggctgttgggactacagaatttgctcaaaagtcagagaaccctgtcgcgggttgagctaaagcgcctgtgcgaaattttcacgcggatgtttgccgatccgcactccaaaattgccgatagtgaagccgaatgcgaagacaaggaaggcaatcttttcccttctgaagtaagttgcactgtgtccttccaatacgtgttcggcgatagctgcggcttttataataactcatag

SEQ ID NO: 219980 - DNA, 4485 bp, synthetic construct
  misc_feature 1..4485: note = Description of Artificial Sequence: Synthetic coding sequence
  source 1..4485: mol_type = other DNA
atggagccacgcatggagtcctgcctcgctcaggttctccagaaagatgtcggaaagaggcttcaggttggccaggaactcatcgattatttctctgacaaacagaagtccgctgacttagagcacgaccagaccatgctcgataagctcgtggacgggcttgcaacctcatgggtgaactcatctaactataaggtcgtactcctcggcatggacatcctgtccgccctcgtgacacgactgcaagaccgattcaaagctcagataggaacagtcttgcctagtctcattgaccggcttggcgacgcaaaagattctgtcagggaacaggatcaaactctgctgctgaaaattatggatcaggcggctaatccacagtatgtgtgggacaggatgctgggcggttttaaacataaaaatttccggaccagagagggaatttgtctgtgcctgattgccacccttaatgcaagcggagctcagaccctgaccctgagtaagatagtgcctcacatctgcaatctactgggggaccccaatagtcaagtgcgggatgccgctattaacagccttgtagaaatttatagacacgtgggtgaacgcgtgagagctgacctgtcaaagaagggcctgccacagtcacgcctgaatgttatcttcactaagtttgacgaggtgcaaaagtctggaaacatgattcagtccgccaacgataaaaactttgacgacgaggattcagtggatggcaatagaccctccagcgcatcgtcaacttctagcaaggccccaccttctagtagaagaaacgtggggatggggacgacgcggaggcttgggagctccacccttgggagcaaatcttcggccgcaaaggaaggggctggagccgtggatgaagaggactttatcaaagcctttgatgacgtgccagtcgtacagatctactcctcccgtgacctggaggaatctattaacaagatccgcgagatcctgtcggacgataagcatgactgggagcagcgggtgaacgctctcaagaaaattcgttcccttcttctggcgggtgcggcagagtatgacaactttttccagcacttgagacttttggacggagctttcaagttgtccgccaaggatctgaggtcccaggtcgtaagggaggcgtgcattaccctcggtcacctctcttctgttttaggaaataagttcgaccacggggcagaggccataatgccaacaatctttaatctcattccaaattcagctaagatcatggccactagcggcgtcgtagcagtgcggttgattatcaggcacacacacattccaagattgatcccagtgataactagtaattgtaccagtaagagcgttgctgtgcgtcgtcgatgcttcgagttcctggatctgttattacaagagtggcagacccacagtctggaaagacacatttctgttctggcggagaccattaaaaaggggatacacgatgccgacagtgaagcgcgaatcgaggcccgtaagtgctactggggatttcacagccatttcagtcgggaagccgagcatctataccatacacttgaaagcagttatcagaaggcactccagagccacttgaaaaattcagattccattgtttcactcccacagtctgatcggtcctcttcttcctctcaggaaagcctcaatcgccctctctctgctaagcggagtcctactggtagcacaacttctcgggcttccacggtgtctaccaagtcagtgagtacaaccgggagtctccagaggtcacgcagcgatattgacgttaatgcagccgcatctgctaaatctaaggttagcagcagcagcggtaccactcctttttcgagcgccgctgccctaccccctggcagctatgcgagtcttggtcggattagaacacgccgtcagtctagcggcagcgcaaccaatgttgcttctacaccagataaccgagggcgttcgcgggctaaggtcgtgagtcagtcccagaggtcgaggtcagctaacccagctggagcagggtccagaagctcttcacctgggaagctgctgggttccggttacggcggtctgaccggcggaagctcccgcggacctccagtgacaccctcttcggaaaaacgatctaaaatacctcgctctcagggatgttcccgggaaacatccccaaatcggatagggcttgataggttcggactggggcagccaggtcgcatcccaggatcagttaacgcaatgcgcgtactcagcacatccacagacctggaggcggcagtggctgacgctttagtgagaggaacaagcaccggcaaaaagaagcccgtgcgaagacgctacgagccctacgggatgtacagcgacgacgatgctaattccgacgcatcatcagtgtgcagcgagaggagctacgggagcagaaacggaggtatcccacattacttaaggcaaacggaggacgttgcggaggtgctgaaccactgtgcttccagcaactggagcgagcgaaaagaggggctgctgggcctgcaaaacctgttaaaaagccagagaactttaagcagggtagagctgaagcgcctgtgtgagatattcactcgcatgttcgctgaccctcatagcaagatagctgactctgaggctgagtgcgaggataaagaaggtaacttgttcccttctgaggttagttgtacgagggtgttcagtatgttcttagaaacacttgtcgactttataatcatacacaaagacgatctacaggactggctgttcgtactgctgactcagctgcttaagaaaatgggagcagatctgctgggctccgtgcaggccaaagtacagaaggctctggacgttacgcgggatagtttcccgttcgatcagcagttcaacattctgatgcgtttcatcgtggatcagacacagaccccaaacttaaaagtgaaggtggccatcctcaaatatatcgaaagcctggctaggcaaatggaccccacggatttcgtcaactcctctgagacccggctggcggtatcacggatcatcacctggacaacagagcccaaatcttctgatgtgaggaaggcggcacagatcgtgctcatttccctttttgaactcaacactcccgagttcaccatgctgctcggggctttgcccaagaccttccaagacggggcaaccaagcttctccacaatcatttgaagaactcctctaacaccagcgtgggctcacccagtaacactattggcagaactccatcccggcacacgtcctcgagaacaagtcctttgacttcgcccacgaactgcagccatggtggactttccccttcgatgttggattatgatacggaaaatttgaacagcgaggagatatactcgtcgctccggggagtcactgaagccattgagaaatttagcttccgaagtcaggaggatctgaacgagccaattaaacgggatggcaagaaagagtgcgacatcgtgtccagagacggtggcgctgccagcccagccactgaaggtcggggtggcagcgaagtggaggggggacgcaccgcactggacaataagacctcactgctgaacacccagcctcctcgtgcttttcccggacctagagcgagggactacaacccatacccctattcagacgctattaatacctatgacaagaccgctctcaaagaagccgtgttcgacgacgatatggagcagctgagagacgtgccaatcgatcatagcgatctggtcgctgaccttttgaaggaactaagcaaccacaacgagcgcgttgaagaaaggaagggagccttattggagctgctaaaaataactcgggaggactctttaggggtgtgggaggaacattttaaaactatcttgctcctactgctggagacactgggagacaaagaccattccatccgagccctcgccttaagagtgttaagagagatcctgagaaaccagccggcaaggttcaagaattacgcggaactcaccataatgaagacgctggaggctcataaagactcgcacaaagaggttgtccgcgcagccgaagaggcggcaagtacactggcttccagtattcaccctgagcagtgtatcaaagtgctctgccccatcattcagacagccgactatccaatcaacttagccgctatcaagatgcagacaaaggttgtggaacgcatcgccaaggagagtttactgcagttactggtggacataattcccggtttgttacagggctatgacaacacagagtcaagcgtgagaaaggcttcagtgttctgcctcgtggcaatctatagcgttatcggagaggatctcaagccgcacctggctcaactcacgggaagtaagatgaaactgcttaacctgtacattaagagagcccagaccacgaatagtaatagcagtagcagcagtgatgtctccacccacagctag

SEQ ID NO: 219981 - DNA, 4434 bp, synthetic construct
  misc_feature 1..4434: note = Description of Artificial Sequence: Synthetic coding sequence
  source 1..4434: mol_type = other DNA
atggaaccaagaatggaatcctgtttggcgcaagtgttacagaaagatgttggcaaacgcctacaggtcggccaggaactgatagactatttctctgacaaacagaagtctgccgacctggagcacgaccagaccatgttagacaagctcgtggacggtctggccacgtcctgggtgaactccagcaattataaggtcgtcctgctgggcatggacattctatccgcgttagtgacgaggctgcaagatagatttaaggcacagattgggacagtcctgccatctctgattgaccgattgggcgacgcaaaggattccgtgcgagaacaggatcagaccctgcttttgaagattatggatcaggccgctaacccccaatacgtctgggacaggatgctgggcggattcaagcacaagaattttagaactagggagggcatctgtctctgtcttatcgcgacgctgaacgcttcaggggcacaaacactcacattatcgaagatcgtgccacacatatgtaacctactaggcgaccctaactcacaggtaagggatgccgctattaattccttagttgagatctaccgtcatgtgggcgagcgggtgcgcgcagacttgagcaagaaggggctgccgcaatcaagattaaatgttatctttacaaagttcgacgaagtccagaaatctggtaatatgattcagtctgctaacgacaaaaactttgatgatgaagattccgtcgatggcaaccgtcccagctcagccagctccaccagcagtaaggcaccgcctagcagtagacgcaacgtgggaatgggaaccaccaggcgtttgggcagcagtacccttggatctaagtcctctgccgctaaggagggagcaggtgcagtagacgaagaagattttatcaaggcatttgacgacgtcccggtcgtgcaaatctatagttcacgagatttagaagagtccattaacaaaatacgagagatcctaagcgacgacaaacacgattgggaacagagagtgaatgccttgaagaagataaggtctctactacttgcaggagctgctgagtacgacaatttctttcagcatctgcgtttgttggacggggctttcaagctttccgcaaaggatttgaggtctcaagtggttcgagaagcttgcattacacttggccacctaagtagtgtgctcggaaacaaatttgaccacggggctgaggccatcatgccaactatatttaaccttatccctaactcagcgaagatcatggccacaagcggagtggtggccgttcgcctcatcattaggcacacccatattccgagacttataccagtcatcacaagtaattgcacctctaagagcgtcgccgttagacgacgttgctttgaattccttgatctgctactccaggagtggcagacacacagtttagagcgccatattagcgtgcttgctgagaccattaagaaaggtatccatgacgcagactctgaggccagaatcgaggccagaaagtgctactggggatttcattctcacttctccagggaagccgagcacctgtaccacacgcttgagtcctcatatcaaaaggccctgcagagtcacctgaagaactctgacagcattgtttccctccctcagagcgataggtcttccagttccagtcaggaaagcctaaatcgccctttgtccgcaaaacgttccccaacagggtccaccacttcgcgggcatccacggtctcaactaaaagtgtcagcacaactgggagtctccagcgatcccggtccgatattgacgtgaacgcagccgcatcagcaaaaagcaaggtctcatccagctccgggacgacccccttttctagcgcagcagctctcccgcctgggagctatgcttcacttgagagtcgccatatgcgagaagacatggaatacatcggattggattccggccgaattagaacccgaaggcagtcatccggctccgccacgaatgtggcgagcaccccggacaaccggggtaggtccagggcaaaggtggtgtctcagagtcagcccggatctaggtcctcttcaccagggaagttgctggggtccggttatgggggactgacaggtggctctagccggggacccccagtcactcccagttctgagaagagatctaagatccctagatcacaggggtgtagtagagagacatctcctaaccgcatagggctggaccgcttcggcctcggccaaccaggcagaattcctgggtctgtaaatgccatgcgggtgttatccaccagtacagacctagaggctgctgtggcagatgccctgcttctcggtgactctaggagcaagaaaccagtccgaaggagatatgagccctatggaatgtattcggacgatgatgcaaactcagacgcctctagcgtttgttccgagcggagctacgggtctaggaacgggggtatcccacactacctaagacagacagaagatgttgccgaggtcctgaatcattgtgcaagttctaactggtctgaacgtaaggaaggcctcctcgggctgcagaatttactcaaatcacaacgcaccctgtctagggtcgagctcaagcgcttgtgtgagattttcacaaggatgttcgcggatccccactccaagcgggtgttttccatgtttctggagaccctggtggacttcatcatcatccacaaggatgacctgcaagattggctttttgtgctgctgacccagttactaaagaaaatgggcgctgacttgctcggatctgtgcaggcgaaagtccaaaaagcattagatgtcactcgcgactcattcccgttcgatcagcagttcaatattctcatgcgttttatcgtggatcagactcaaactccaaacttaaaggttaaagtagccattctgaagtacatcgaaagtttggccagacagatggaccctacggactttgtaaattcaagcgaaaccaggctggcagtctcacggattataacatggactaccgagcccaagagctcagatgtgagaaaagcggctcagattgtccttattagcttattcgagttaaataccccggagtttaccatgttactgggagctcttccaaagacatttcaggatggggcaactaaactcctgcataaccacctgaaaaacagctctaatacctccgtgggaagtccttcaaacacaattgggcgaactccctcacgccatacatcatcccgcacatccccactgacctctcccaccaactgcagtcatggagggcttagcccttcgatgctcgactacgatacagagaacctcaacagcgaagaaatatattctagcctcaggggagtcactgaggctattgagaaattttcctttcgttcccaggaggatctcaatgaacctatcaaaagggatggaaagaaggaatgtgatatcgtgtccagggacggtggggctgcctctccggcaacagaaggacgcggagggtctgaagttgagggaggcagaaccgctctggataacaagaccagcctgttgaacactcagcctcctcgggcttttccaggcccaagagccagggattataatccctacccatatagcgatgcaattaatacctatgacaagacagctctgaaagaagctgtgtttgatgacgacatggaacagctgcgtgacgtgccgatcgaccactctgaccttgtcgccgacctcctcaaggaattgagtaaccacaatgaaagagtggaggagcggaagggtgcactcctggaactacttaagatcactagggaggactccctcggtgtgtgggaggagcacttcaaaactatcttgctcctcttgctcgagactcttggagataaagatcatagcataagggcactggccctgagggtcctccgggaaatcctccgtaatcagccagcccgattcaagaattacgctgagctgaccatcatgaagacgctggaggcccataaggattcgcataaggaagttgtgagggcagccgaggaagctgcatccaccctagcgtcctcaattcaccccgaacagtgtatcaaggtgctatgccctataattcagaccgcggactaccccattaatctggcggctataaagatgcagactaaagtcgtcgagcggattgccaaggaatccctgttgcagctcctcgtggacataatcccgggtttactgcagggttacgacaataccgaaagcagcgtcaggaaagccagcgtattttgcttagtggccatatactctgtgataggagaggatctgaaacctcatttagcccagcttaccggaagcaagatgaagctgctgaatctgtatatcaaacgcgcacagacaaccaattctaactcatcctccagctctgatgtatcaacgcatagctag

SEQ ID NO: 219982 - DNA, 3768 bp, synthetic construct
  misc_feature 1..3768: note = Description of Artificial Sequence: Synthetic coding sequence
  source 1..3768: mol_type = other DNA
atgctgcaaaactgtagcgataaaaactttgacgatgaggattccgtggatgggaaccgaccgtcttcagcaagctccacatctagcaaagccccaccttcctcccgaaggaatgttgggatgggaactaccaggagattgggcagtagcacactgggttcaaaatcgagtgctgctaaggaaggagccggtgcagtggacgaggaggactttatcaaagcgtttgatgacgttccagtcgtacagatctattcaagccgcgatttagaggaaagcatcaataagattcgcgaaattctcagcgacgataagcacgactgggaacagcgtgtaaacgcccttaagaaaatacggtctctcctgctggctggtgccgctgagtacgacaatttcttccagcacttgcgtctcttagatggggctttcaaactttctgctaaggatctcaggagtcaagtggtacgggaggcgtgtatcacccttggccacctgtcctctgtgttaggaaataagtttgatcacggagcagaggccatcatgcccacaatatttaatctgatccccaattctgccaagatcatggctacctccggtgtcgtcgctgtgagactaattatccggcacacacacatccccaggctcattccagtcattacctcaaactgtacatcaaagtctgttgctgtcagacggagatgcttcgaatttctagacctgctcctgcaggagtggcaaacacattcccttgagaggcacataagcgtgcttgcggagactataaagaagggcatacacgatgccgattctgaggcccgtatcgaagccaggaaatgttactggggctttcacagtcattttagtcgagaggctgagcacctgtaccacaccttagagtctagttaccagaaagcactccagtctcatctcaagaatagcgacagcatcgtgtcgcttccccagagcgacagatcttcctcttcaagccaggaatctctcaaccgaccactgtcggctaaacggtcccctacggggtcaactaccagtagagcctctaccgtgtcgacaaaatctgtctcaacaaccgggagcctccagaggtcccgctccgacattgatgtgaatgccgctgcatcggccaaaagcaaagtgagctctagttctggcaccaccccctttagctcggcagcagcactgccaccagggtcgtatgcttcactgggcaggatccggactcggaggcagagcagtggtagcgcgacaaatgtcgcatccacccctgacaacaggggtcgctcacgggctaaagtagtgtcccagagtcagcgatcccgatcagctaatcccgcaggagctggttccagatccagctctcctggcaagctgctgggctccggctacggcggactgaccggcggttcatctagaggacccccagtgaccccttctagcgaaaaacgatcaaagatcccacgcagtcagggttgctcacgagagacttctcccaaccggattggcctggacaggtttggattaggacagcccggaagaattccaggtagtgtcaatgctatgcgcgttctgagcacatcaactgatctagaggccgctgtggcagacgcactcaaaaagccagtgcgaaggcgttatgaaccctacggaatgtattctgatgatgacgcgaactccgatgccagctccgtatgttctgaaaggagctacggttcacgtaatggcggaattccccactacctgcgtcagaccgaggatgtggctgaggtgttaaatcactgcgcctccagcaactggagcgaaaggaaagaagggctgctggggctacaaaatctgttgaagtcgcagaggaccttgtctagagttgaactgaaacggctctgtgagattttcacacggatgtttgctgatccacatagtaagattgctgacagcgaagcggagtgcgaagacaaagaagggaatctgttccctagcgaggtttcatgcacccgtgtgttcagcatgtttctcgaaaccctggtcgactttattatcatccacaaggacgatttgcaggactggctatttgtgcttctcacacagctgctgaagaaaatgggagctgacctgctgggatctgtgcaggccaaggtacagaaagcccttgatgtcaccagggattcttttccttttgaccaacagtttaacattctgatgaggtttatcgtggaccagactcagactccaaacttaaaggttaaggtagcaattttgaagtacatcgaatctcttgccaggcagatggaccccaccgatttcgtgaattcctcagagacccggttggctgtctcacggattattacatggactacagaacccaaatcttccgatgttcggaaggctgctcagatcgtgctgataagcctattcgaactaaacacccctgagttcacaatgttgctgggtgcactgcctaagacattccaggacggggcaactaagttattacacaaccacctaaaaaactcgtccaacacctcagtgggttcacccagcaatacaatcgggagaaccccatctagacacacctcctcgaggacgtccccgcttaccagtcccacaaactgctcccacggcggactgagcccgtccatgctggactatgacacagaaaacttgaactccgaagagatctattcaagcctcagaggcgtcacggaggccattgagaagttcagcttcaggtcacaagaagacctgaatgagcctatcaaaagggacggaaaaaaggagtgcgatatagtctcccgagatggtggcgcagctagtccagccactgaaggacgaggaggctctgaagtagagggaggtagaaccgctctagataacaagacaagtctcttaaatactcaacctccgagagcctttcccggacctcgggctcgcgattataacccgtacccatactctgacgcgatcaacacttatgataagacagctctcaaggaggccgtgttcgacgacgacatggagcagcttcgggacgtgcctatcgatcattccgacctcgtggccgacttgctgaaagagcttagtaatcacaacgaaagagtggaagaacgaaaaggagccctcctggagcttctgaaaataacacgcgaagacagtctgggcgtgtgggaggagcattttaagacaattctgctgttactgctcgagacactgggagacaaggatcattcgattagagctctggcactgagagtgctgcgggaaatcttacggaatcagccagcaagatttaagaattatgcggaactaactataatgaaaaccctcgaggctcacaaggactctcacaaagaagtggtgcgtgcggcagaggaagccgctagcactctcgccagctccatccaccccgagcagtgcatcaaagtgttgtgtcctattatacaaacagctgactatcctattaatctggcggcaattaaaatgcagaccaaggtggtcgagcgcattgcaaaggaaagcttgctgcaacttctcgtagatattattcctgggctgttacagggctatgacaacaccgagtcatcagtgcgcaaggctagtgtcttttgcttggtagcgatctattcagttatcggggaggatctaaaaccacatttagcccagctgactggcagcaaaatgaaactgctcaacttatatattaagcgtgcacagacaactaactccaacagcagctcctcctctgatgtgagcacccactcctag

SEQ ID NO: 219983 - DNA, 3738 bp, synthetic construct
  misc_feature 1..3738: note = Description of Artificial Sequence: Synthetic coding sequence
  source 1..3738: mol_type = other DNA
atgacaacagggaaagataagaactttgatgacgaagattccgtcgatgggaaccgcccatccagcgctagctccacctccagcaaagcacccccatcctcccgaagaaatgtgggcatgggaaccactagacgtttaggcagttctaccctcggcagcaaaagctccgctgcaaaagagggagccggagccgtagacgaggaagactttattaaggctttcgatgacgtccccgttgtgcagatctattccagtagggatctggaggagtcaattaataagatcagggaaatcctcagcgatgataaacacgactgggagcaacgggtcaacgctttaaagaaaattaggagcttactgctcgccggagcagccgagtacgacaacttctttcagcaccttagattactagacggagcctttaagctctcagcaaaggatctgcggagccaagtggtccgggaggcctgtatcactctcggccacctctcgagtgttctgggcaataaattcgaccatggcgctgaggcaattatgcctactatctttaatttgatacccaatagtgcgaagatcatggcaacgtcgggcgtggtcgctgtcaggcttataattcggcatactcacatcccgaggctgatccccgtcatcacctctaattgtacatcgaagtccgtggccgtaaggagacggtgctttgaatttctggatctcctgctccaggagtggcagacccattctcttgagcgtcacattagcgtgctggccgagactatcaagaagggaatccacgacgctgatagcgaggcgagaatcgaggctagaaaatgttactggggattccattcacacttctcaagagaggccgagcacctgtaccatacgctcgagtcatcataccagaaggccttacagagccacctgaaaaacagcgattccatcgtttctctcccacagagcgacaggtcgtcttcttcatcacaggaatccctcaatcggcctttgagtgctaagaggagcccaacaggctcgacaacatccagagctagtacagtgtccacaaaatcagtatctacaactggttccttgcagcggtctcgcagtgacatcgatgtcaatgctgctgccagcgctaagtccaaggtgagctcttcttctggaacaacaccattctcttccgcagctgccctgcccccaggttcctacgcttcactggacggtaccaccacaaaggctgaaggcagaattcgaacaaggcgacagtcaagcggctccgccacaaacgtggcatcaacaccagacaaccgaggtcgctctagagccaaagtcgtttcgcagagccagcggagccgcagtgcgaatcccgcaggagctggctcccgaagtagctccccgggaaaattgcttggcagcggctacggaggactgaccggtggctcaagcagaggacctccggtcactcccagttccgaaaaacgcagtaaaataccccgttcccagggatgctcccgggagacaagtcctaatcgaattgggttagatcgattcgggttggggcaacctggacgcataccagggtctgtgaatgcaatgcgcgtgctgtctacttccacagacctggaggccgcagtggccgatgctctgttgctgggagattcccgctccaagaagcctgtgcgtcgacgatacgagccctacggaatgtattcagatgatgatgctaactccgacgcaagctccgtatgcagtgagcgctcttacggatcgagaaatggcggaattcctcattatctccgccagactgaggacgtcgcggaggtgctgaatcactgtgcttcctcaaattggtcggagcgcaaggaaggactgttgggcctgcaaaatctgctgaagtcacagagaacactctccagagtagagctgaagcgactctgcgagatatttacgcggatgttcgccgatccccatagcaaggtcttctccatgtttttggagacactcgtagacttcattattatccacaaggatgatcttcaggattggctttttgttctcctgacacagctccttaaaaagatgggcgcagatctcctaggcagtgtgcaggctaaagtccagaaggcactcgatgtgacccgtgacagttttcccttcgaccagcagttcaacattctaatgaggtttattgtggaccagacacagacacctaacctgaaagtgaaggtagctattctcaaatacattgagtcgctggctcggcagatggatccaaccgattttgtgaattcatccgagaccagattggccgtgtcgaggattatcacctggacaactgaacctaagagctccgatgtacggaaagcagctcagatagttttgatctccctatttgaactcaatacccctgagttcaccatgcttttgggcgcactgcctaagactttccaagacggagcaactaaattgctacataaccacctgaagaactctagtaacacgtcagtggggagccccagtaacaccatagggcgaactccttctaggcacacaagttcaaggacctcccctttgactagccctaccaattgctctcacgggggattgagcccgtctatgttggactacgacacagaaaacttgaattccgaggagatttattcctccctgcgcggtgtgacggaagctatcgaaaaattcagtttccgcagccaggaagatctcaacgaaccaataaaaagagacgggaagaaggagtgcgatatcgtgtcacgggatggaggagccgcaagtcccgcaaccgaggggaggggaggatccgaagtcgagggaggccgtacagcccttgacaataaaacctctctacttaacactcaaccgccacgcgctttccctggtccacgagcacgcgattacaacccgtatccatactccgacgccatcaacacatatgacaagacggcgctaaaggaggccgtttttgacgatgacatggagcagctgcgagacgtcccgatcgaccattccgatctggtggccgaccttttaaaggagctgagcaatcacaatgagcgtgtggaagagagaaaaggggcattacttgaactcctcaaaatcacacgggaagacagcctcggggtgtgggaagaacattttaaaacaatcctcctgcttctgctggagacactcggagataaggaccattccatcagagctctggctctgagagtcctcagggagattctcagaaatcagccggctagatttaaaaactacgccgagctcacaatcatgaagacgctggaagcccacaaggattcccataaagaagttgtgcgggctgccgaagaggctgcctcaaccctggcttcttcaattcatcccgaacagtgtatcaaggtgctctgtccaatcattcagactgctgattacccaattaacttagccgctattaagatgcagaccaaggttgtcgagcggatagcgaaagagtctctgctccagctcctcgtggatatcatccctggccttctacaggggtacgataacacggaatcttccgtccgtaaggcttcagtcttttgcctggtggcaatctattccgtgatcggcgaggatttaaaaccccacctggctcagcttacaggctctaaaatgaagctgctcaacctatacattaagcgggctcagaccaccaacagcaactctagcagcagttctgacgtctccactcatagctag

SEQ ID NO: 219984 - DNA, 2988 bp, synthetic construct
  misc_feature 1..2988: note = Description of Artificial Sequence: Synthetic coding sequence
  source 1..2988: mol_type = other DNA
atgggacttcggaaccacttccctggagaggcggaaacgctctataactcattggagccatcttaccaaaaatccctgcagacataccttaagtcttccggctccgttgcttcattaccacagtcagatagatcatcttcttcatcacaggaatccctgaaccgacccttcagctctaagtggtccaccgctaacccctcaaccgtcgctgggagggttagtgccggatctagtaaagcgtcatccctacctgggtcactgcagcgtagcaggtccgatatcgatgttaatgcagcagccggtgctaaagctcatcacgctgcaggtcaatccgttcggagtggtcggttgggcgctggtgctttaaacgccggttcctacgcctcacttgaggatacgagtgacaaactggatggcaccgcatccgaagatggcagagtaagggcaaagctgtctgcaccactggcgggaatgggaaacgccaaggctgattcccgtggacggagcagaaccaaaatggtgtcccagagccaacctggttcacgctcaggatctcctggaagggtgctgaccactaccgctctctccactgtaagcagcggggtccagagggtcctggttaattccgcctctgctcagaagagaagcaagatcccacgatctcaaggttgtagtcgggaagcttctccatccaggctgtcagttgcaagatctagcaggattccacgtcctagcgtaagtcaaggttgctctagagaggcctcgagagagtcttcacgtgacacttcacccgtgcggagcttccagcccctgggacccggttacgggataagtcaatcctccaggttgtcttcaagcgtgtcagctatgcgggtccttaataccgggtcagacgtggaagaggctgtggctgacgcactgaaaaaaccggcaagacgacgatacgagtcttacggtatgcacagtgatgatgatgcaaactctgatgcgtcaagcgcatgcagcgaacgatcctactctagccgaaacggctctattcccacctatatgagacagaccgaggacgtagcagaggtgctcaaccgctgcgcctcttccaattggtctgagcgcaaggagggcctgttaggcctgcagaacttacttaagaaccagcgcacactgagccgcgtagaacttaagaggctgtgtgagatattcacacgcatgttcgccgacccgcacgggaaaagagtatttagcatgttcctagaaactttggtagattttattcaggttcataaggatgacttgcaggactggctgttcgtgctgctgacccagctattaaaaaagatgggtgccgaccttctcggatccgtgcaggcaaaggtccagaaggccctcgatgtgacaagggagagcttccccaatgacctccaatttaatatccttatgaggttcacagttgatcaaactcagaccccgagtcttaaggtcaaggtggctatcctaaaatacatcgagacattggccaaacagatggacccaggggatttcattaattcatccgagacgcgactggccgtgagtagggttattacatggactaccgaacccaaaagctcagacgtcagaaaggccgctcagagtgtgctgattagcctgtttgagctcaacacacctgaatttactatgcttctgggcgcactcccgaaaacattccaggacggggcaactaagctcctgcacaatcatttgcgcaacacaggtaacggtacgcaaagctcaatgggctcgcctctgaccaggccaacgcccaggagtccagccaattggtcttccccactaacaagcccaacgaacacttcacagaatactctgagtccaagcgccttcgactatgatactgaaaatatgaactcagaagatatatattcttcccttaggggcgtgactgaggcaattcaaaacttctccttcagatcacaggaagatatgaacgaacctctcaaaagagactccaagaaggacgacggcgacagcatgtgtgggggtccaggcatgtccgaccctcgtgccggaggcgacgccacagatagttcacagaccgccttggacaacaaagcttccctgctgcattcgatgcctactcattcatcgccccgaagccgagattacaacccttacaattacagtgattctatctccccatttaacaagagtgccctaaaggaagctatgttcgacgatgatgctgaccagtttcctgacgatctaagcttagaccatagtgacctggtggccgagcttctgaaggaactttcaaaccacaatgagagagtcgaggaaagaaagatagccctgtacgaactcatgaagttgacccaggaagaaagcttctctgtttgggatgaacacttcaagacgatcctactcctgctgctcgagacgctgggcgacaaggaaccaaccatcagggccctcgctctcaaagtgttacgcgagatactccgacatcaaccggctcgttttaagaactacgccgagctcacggttatgaaaactcttgaagcccacaaggatccccacaaggaggtggtcaggtcagccgaggaagctgccagcgtgttagccacgagcatctccccggagcagtgcatcaaggtcctttgcccaattattcagaccgcagattaccctataaatctggctgccattaagatgcagacaaaagtcatagaacgggtctccaaagagaccttgaatcttctgctgcccgagattatgcctggtctgattcagggctacgacaactcggagtcttctgttcgaaaggcctgcgtcttctgtctggtagccgtgcatgccgtgattggggacgaactgaaaccccacctgtcacagctgaccggaagcaaaatgaagcttcttaatctatacattaagagggctcagacgggctcaggaggggctgatccaaccactgacgttagcgggcagtcctag

SEQ ID NO: 219985 - DNA, 1296 bp, synthetic construct
  misc_feature 1..1296: note = Description of Artificial Sequence: Synthetic coding sequence
  source 1..1296: mol_type = other DNA
atgagaaggctgatttgcaagagaatctgtgactacaaatcatttgatgacgaagagagcgttgacgggaacaggccctcgtcagccgcttctgcatttaaggtccccgctccaaagacatctggcaatcctgctaactccgctagaaagccgggatccgctgggggaccaaaggtcggcggagcctccaaggagggaggcgctggggctgtcgatgaggacgactttatcaaagctttcactgacgtgccttccatacagatctactcaagccgcgaactggaagagacactcaataaaataagggagatcttatcagatgacaagcacgattgggatcaacgggcaaatgcacttaaaaaaataaggagcctgctggtggccggagctgcccagtacgactgtttttttcaacacctgcgactcttagatggcgcactgaagttgtctgctaaggatctgagaagccaagtggtccgcgaggcttgcatcaccgtggcccacttgagcacagtgctgggtaacaaatttgaccacggggcagaggccattgtcccaaccctgtttaatctggtaccaaattctgccaaggtcatggcgacttctggttgcgcagctattcgattcatcatccggcatactcacgtaccccgactcattcccctgattacttccaactgtacttccaaaagtgttccagtacgaaggagatctttcgagttcctcgaccttctgttacaagagtggcaaactcatagtctcgagagacacgccgcagtgctggtggaaaccatcaagaaggggattcacgacgcagatgctgaagcgcgagtcgaggctaggaagacgtacatgggcctgcgtaaccattttcccggtgaggccgaaacactttataacagcctggagccaagttatcagaaatccctgcagacctacctgaagtcatcagggagcgtggcctctctaccacaatctgatcgcagctcttcgagcagccaggaatcattgaaccgcccattcagctctaagtggtcaacagctaacccatccacagtcgccggacgcgtgagtgccggatcctcaaaagcatcaagtctcccaggtagtctgcaaaggtctagatctgatattgacgtcaacgccgcagcaggcgcaaaagcacatcatgcagccggtcaaagcgtgaggtcaggtcggctcggggctggcgctctgaatgccggaagctacgccagtttagaatgtgaggcattttggcgctcaggacgaactgccaagctctatagcgtgtag

SEQ ID NO: 219986 - DNA, 4518 bp, synthetic construct
  misc_feature 1..4518: note = Description of Artificial Sequence: Synthetic coding sequence
  source 1..4518: mol_type = other DNA
atggaacctaggagcatggaatacttttgtgcacaggtgcagcagaaggacgtgggagggcgactgcaagtgggccaagaacttcttctgtatctgggtgcgcctggagccatctccgaccttgaagaggacctggggcgtttaggcaagactgtcgacgccctcacggggtgggttggttcgtccaactacagagtgagcctgatgggacttgaaatattatccgcattcgtggacaggttatccaccaggtttaaatcatatgtcgctatggtgatcgttgctctaatcgatagaatgggagacgctaaggataaagtgcgcgacgaagcgcagactttgatcctaaagctgatggatcaagtggccccacccatgtacatctgggagcaactggccagcggtttcaagcataagaatttccgttctcgagaaggcgtctgcctctgcctgatcgaaaccctgaacatcttcggagcgcaacccctggtgatttcaaagttgatcccacacctatgcattctatttggggactctaattctcaggttcgcgatgccgcaattttagccatcgtggaaatataccggcatgtgggcgaaaaggtacgcatggatctctataagaggggtattccccctgctcgactggagatgatattcgccaaattcgacgaagtccagagttccggcggaatgatcctgagcgtgtgtaaggataagtcatttgatgatgaagagagtgtggacggaaatcgacccagcagtgcggcatctgcattcaaggttcccgcaccgaagacttctggaaatcccgcaaatagcgcaaggaagccagggtctgctggcggtcccaaggttgggggagccagcaaagagggtggcgctggcgctgttgatgaggatgattttatcaaggcatttaccgacgtaccttctatccaaatttatagttcacgggaattggaagagactctgaacaaaatcagggaaatcctctccgacgacaagcacgactgggaccagagagccaatgcattgaaaaaaattcgttctcttctagtggcgggagcggctcagtatgactgctttttccaacacctcagattgctggacggcgcattaaagctgtctgccaaagatctaagatctcaggttgtccgagaggcttgcatcactgtcgcgcaccttagcaccgttctggggaataaattcgaccacggcgcagaagctatagtgccaaccttatttaacttggttcccaatagtgctaaggtcatggccacatctggctgcgccgcaatacgttttatcatccgccacacgcacgtgcctagattaatccctctcattacatctaattgcacttctaagagtgtgcccgttcgtagacgcagttttgaattcctggacttgctgttgcaggagtggcagactcactctctagagagacacgccgcagtactagtggagaccattaagaaggggattcacgatgccgatgctgaggccagggtcgaggctaggaaaacttatatgggcttgcgcaatcatttccccggtgaagccgaaaccctctataattccctcgagccctcttatcagaagagcctgcaaacctatttaaaatcatctggcagcgtcgcatcactgccacagagtgaccggtccagctcctctagccaggagtccctgaatcgccctttttcctccaaatggagtacagctaatccttcaacggtggcaggtagagtgagcgccggaagttccaaagccagcagcctgcctggcagcctgcagcgaagccggtcagatatcgatgtcaacgcggctgccggagccaaagctcatcatgccgcaggacagtccgtgcggtcgggtcggctgggtgcgggtgctctgaacgcaggttcatacgccagtcttgaggatacttccgacaaactggacggcaccgccagcgaggacggccgtgtgagggcaaagcttagcgcaccactcgccggtatgggaaatgctaaggccgatagtcgtggcaggtcaaggactaagatggtgagtcaatcccaacccggtagtaggtctggctcacccggtcgggtgttgaccactacagctctgagtacagtgtccagtggggtgcagcgcgtcctggtcaactccgctagtgcacaaaagcgctctaagattcccaggagtcaaggctgttctcgagaggcaagcccaagccggctgagcgtggccagaagtagccgtatccctagaccatctgtctctcagggatgcagtcgggaagctagtagagagtcatcacgggatacctctcccgtgcgatcctttcagcctcttggccctggatacgggatctcccagtcttcaaggctgtccagctctgtatctgccatgagagttctgaatactggatctgatgtcgaggaggccgtggccgacgctctgaaaaagccggctcgtcgtagatacgaatcttacggaatgcattcggacgatgacgcaaactctgatgcatcaagcgcctgcagcgagaggtcctatagcagtagaaacggaagtatccctacatacatgcgacagacagaagatgtcgccgaagttttgaacaggtgcgcaagctccaactggagtgagcgaaaggaaggattgcttggcctccagaacctgctcaagaaccagcggactctcagcagggttgagctaaagcgtctctgcgagatatttacacgaatgttcgcggacccacacggaaaggtttttagtatgttcttggaaacactcgttgatttcattcaagtgcacaaagacgacttgcaggattggctgtttgtcctacttacgcagttgctcaagaagatgggggcagacttactggggagcgtgcaggccaaggttcaaaaagcgctggacgtgaccagagaatccttccccaatgacctgcagtttaacatcttaatgcgatttactgtcgatcagacacagaccccttcgctaaaggtgaaagttgctatcctgaaatatatagaaaccctggcgaaacagatggaccctggtgactttataaatagttccgaaacccgcctggccgtgtccagagtaattacctggaccacagagccaaaaagttccgatgtgaggaaagctgcccagtctgtactgatttctctattcgagctcaatacccctgagttcactatgctgttaggggcactgcccaaaacctttcaggacggggcaacgaaactcctgcacaaccatctacggaataccggcaacggcacgcaatccagcatgggcagcccacttactagaccaacccccaggagccccgctaattggtcaagccctcttaccagccctaccaataccagtcagaataccctctcccctagcgctttcgattatgacacggagaacatgaactccgaggacatttactctagtctgagaggggtcactgaggccattcagaatttctcattccgctcacaggaagacatgaacgaacccctgaagcgagacagtaagaaagacgacggagattctatgtgtgggggtcctggcatgtccgatcccagggcgggaggtgatgcaacagactcttctcagaccgctttagacaataaagctagtcttcttcacagcatgcccacacattcatctccccgatctcgcgactacaacccttataattacagtgactctatctcgcccttcaataagtcagcgctaaaggaagcgatgttcgatgatgatgcggaccagtttccagatgatctctcccttgatcactctgacctggtcgctgaactgctcaaagaactgtctaatcacaacgaaagggtagaggaacgaaaaattgcactgtatgagctgatgaaactgacccaagaggagtccttctcagtttgggatgagcactttaagactatcctccttctcctcctcgagaccctgggggataaagagcccaccataagggcgctcgcccttaaggtcctgagggaaatcctgcgccatcagccagcccgttttaagaactacgccgagctcacggtgatgaagaccctggaggctcacaaggaccctcacaaggaagtggtgcgatctgcggaggaggccgctagcgtcctggccacctctatctctccagaacagtgtatcaaggtgctgtgtcctatcattcagactgccgactaccccatcaaccttgccgcaatcaagatgcaaaccaaggtaatcgaacgtgtatctaaggagaccctgaatctcctgctgcctgagatcatgccaggactgatccaagggtacgataatagtgagtctagcgtgcgcaaggcttgtgtgttctgcctggtagccgtgcacgccgtcatcggcgacgaactcaagccacatctgagccagttgacgggcagtaagatgaagctgctcaacttgtacatcaaaagagctcagaccggttcgggcggagcagaccctaccactgacgtcagtggacaaagctag

SEQ ID NO: 219987 - DNA, 4542 bp, synthetic construct
  misc_feature 1..4542: note = Description of Artificial Sequence: Synthetic coding sequence
  source 1..4542: mol_type = other DNA
atggagccacggagtatggaatatttctgtgcacaagtgcagcagaaagacgtcggcggtcggctgcaggtgggtcaggagttactactatacttgggagcacctggggcaattagtgatctcgaagaggatcttgggagactgggcaaaactgtcgacgctcttactggatgggtcggaagttcaaactatcgcgtaagccttatgggcctggagattctttccgcctttgtggaccggctaagtacccgcttcaagagctatgttgctatggtaatagtggcactgatcgacaggatgggtgatgcaaaggataaagttagagacgaagcccagaccctaatactgaagctaatggatcaggtggctcctccaatgtacatctgggaacagctcgccagcggttttaaacacaagaattttagatccagagagggcgtgtgtctttgcctcatcgaaaccctgaacatctttggcgctcagccactcgtgatatctaaactgatcccccatctgtgcatcctgttcggagacagcaattctcaggtgagagatgcagcaattctagctatcgttgaaatctatcgccacgtgggagaaaaggtgcgcatggatctttataaaagaggcattccccctgcgaggctcgaaatgatttttgctaagttcgacgaagtgcagtcttccggcggaatgattctcagcgtatgcaaagacaagagcttcgatgacgaggaaagtgtggatgggaatcgcccatcaagcgccgcatctgccttcaaggtgcccgctcccaaaacgtctgggaatccagctaattcagcccgtaagccaggaagtgccggtggacctaaggtaggcggagcttccaaagaaggaggcgcaggtgctgtggacgaagacgactttattaaggcgtttactgatgtgccgtcgattcagatatatagctctcgggaactagaggaaacattaaataagatccgagagatactctcagacgacaaacacgactgggaccaacgtgcaaatgcactgaaaaagattaggagccttcttgtggcaggcgctgcacagtacgattgtttcttccagcacttgagattgttggacggcgctctgaaactgagtgctaaagatctgcgctcccaagtcgtgagggaggcctgcattaccgtcgctcatctgtcaaccgtgctgggaaacaagtttgaccatggagctgaggctatcgtgcccacattgtttaacttagtaccaaactcagctaaagtgatggctacttcagggtgcgccgcaattcgcttcattattcggcacacccatgtgcccaggcttatccctttgataacttcaaattgtacaagcaagtctgtgcccgtcaggcgacgtagtttcgagttcctagacctgctgctgcaggagtggcagacccattcccttgagcgacatgcagccgtgctggttgagaccattaaaaaaggcatacacgacgccgatgcagaagccagagtggaggccagaaaaacatacatggggctcagaaatcacttccctggcgaagctgagaccctgtacaacagccttgaaccttcttaccagaagtccctgcagacctatctaaaatcttccggcagcgtggcctccctgccccagtctgaccggtcatcaagctccagtcaggaaagccttaacagaccattttcgtctaaatggtccactgccaacccatctacagtggccggtagggtgtctgcaggatcatctaaagcctcctctctacccggtagcctccagagaagccgctcagacattgacgtgaacgccgcagccggtgcaaaagcccatcatgccgctggccagtccgtgcgctcagggagactgggcgcaggcgcactgaatgcgggatcctacgccagccttgaagacacgagcgacaaactggacgggactgcgtcggaagatggcagagtgagagctaagctctctgcccctttagcaggtatgggcaatgccaaagctgacagtaggggacggtcgcgaacaaaaatggtgtcacagagccagcctggctccaggtcagggtcaccgggacgtgtgctgactaccacggccctgagcaccgtcagctccggcgtgcagagggtccttgtaaacagcgcatccgcccagaagcgcagcaagatccctaggagccaaggctgttcgagagaagccagcccctcaaggctgagcgtagctcgaagttctcgcatacccagaccctcagtatcacaggggtgttcccgcgaggcaagcagggagtcctcccgagatacgtctcccgtgcggagcttccagccactgggacctggctacgggatatcacagagctcgaggttgagttctagcgtgagcgccatgagggttctgaataccggctccgatgtggaagaggcagtggctgacgccctgttactgggggatatccgcacaaagaagaaacccgctagacggcgatatgagtcatatggcatgcactccgatgatgacgccaattctgatgcttccagcgcctgctctgagaggtcttacagcagccgcaatgggtccataccaacatacatgcgacaaacagaggatgtagccgaagtcctgaacagatgtgccagttcaaattggtcagaacggaaggaaggcctactcgggttacagaacttgctaaaaaaccagcgaaccctcagtagagtagagttgaaacgcctttgtgagatttttacgaggatgttcgctgaccctcacggcaaagtgttttccatgtttcttgagactctggtggacttcatccaggtgcacaaggacgacctgcaagactggctttttgtcctgctgactcagctactgaaaaaaatgggcgctgacctgcttggctccgtgcaagccaaggtccagaaggcgctggacgtgacacgggaaagctttcctaacgacttacaattcaacatcctgatgcgcttcacagtcgatcaaacccagaccccaagcctcaaggttaaggtagcaattctgaagtatatcgaaacactggcaaagcagatggaccctggggactttatcaattctagtgaaacaaggctggcagtcagccgagtgataacatggactacagagccaaaatctagcgatgtacggaaggcagcgcagagcgtccttatttccctgtttgaattgaatacaccagaattcacaatgcttttaggggctctccctaagacattccaggacggcgctacaaagcttttgcacaatcacctccgcaatacaggtaatggtacccagtcctcaatgggctcgcctctcacaagaccgacacccagatcacccgctaactggtctagccccctgacctctccgacaaacactagccaaaacactttatcaccatccgctttcgattacgatacagaaaacatgaactccgaagatatttacagtagcctccgcggtgtcacggaggccattcagaatttttccttcaggtcacaggaagacatgaacgagcctcttaagcgagattccaagaaagatgacggagacagtatgtgtgggggtcctggaatgtctgacccccgagccggaggggatgccacagactcaagccagactgcccttgacaacaaggccagcctgctgcactccatgccgacacactctagccccagatctagagattataatccatacaactactcggacagcatcagtcctttcaacaaatcggccctcaaggaggccatgttcgatgatgacgctgaccaatttcctgatgatctgtccctcgatcatagcgatttagtggccgagctgctgaaagagctctcaaaccataacgagagagttgaggaacgcaagattgcactgtacgaactgatgaagctcacacaagaggagtccttcagcgtgtgggatgagcacttcaaaactatcctgctgcttctgctggagaccctcggagacaaagaacctactatccgggcactggcccttaaggtattgagggagatactcaggcaccagccagctagattcaaaaactatgccgagctaacagtaatgaaaacactggaggctcacaaagaccctcataaagaggtggtgcgaagcgccgaagaagccgcttctgtgctagccacatctatttcgccggagcagtgtatcaaggtgctgtgccccattatacaaaccgccgattacccaatcaatctcgccgcaattaagatgcaaactaaagtaatcgaacgtgtctccaaggagaccttaaacttgctgttacctgagattatgcctgggctgattcagggctatgataatagtgaaagctccgtgaggaaggcatgcgtgttttgtctggtggccgtacacgcagtgataggcgatgagctaaagccccacctttcccaactgacaggaagcaagatgaagctactgaacctgtacatcaagcgggcacagacaggctctggcggtgctgacccgactactgatgtgtccggccagtcctag

SEQ ID NO: 219988 - DNA, 4545 bp, synthetic construct
  misc_feature 1..4545: note = Description of Artificial Sequence: Synthetic coding sequence
  source 1..4545: mol_type = other DNA
atggagcctagatccatggaatacttttgtgcccaggtgcaacaaaaggacgtgggcggtcgcctgcaggttggccaggagttgctcctatatctgggcgctcccggagcaatctccgacctcgaggaggacctcggtcggttaggaaaaaccgtagacgccctgaccggttgggttggctcctccaattatagggttagcttgatgggactagaaatcctgagcgccttcgtagaccggctgagcacacggtttaaatcctacgtggccatggtcatcgtggcactgatcgataggatgggagatgccaaggataaggtccgggacgaagcacagaccctgatcctgaagttaatggaccaggttgccccacccatgtatatttgggagcagcttgctagcgggttcaaacacaagaatttccgcagtcgagaaggcgtgtgtctatgccttattgaaaccctgaatatcttcggcgctcagcccttggtgatttcaaaactgataccacatttgtgcattcttttcggtgatagtaactcgcaagtgcgagacgctgccatcctcgccattgtagaaatctatcgtcacgtgggggaaaaagtgaggatggatctgtacaagagagggattcctcctgcacgactggagatgatctttgctaaattcgacgaagtgcagtcaagtgggggaatgatcctgtctgtgtgcaaggataagtcatttgacgacgaggagtctgttgacggtaaccggccttcgtccgccgcttcagcctttaaagtgccagcacctaaaacctctgggaacccagctaactccgccagaaagccgggaagtgccggaggacctaaggttggagccggtgcaagcaaagaaggcggtgccggagctgtcgatgaagacgactttattaaggcgttcactgatgtcccttctatccagatatatagctcccgcgagctagaggagacgctcaacaaaattagggagatcctgtcagacgataagcacgactgggatcagcgcgctaacgcgctgaaaaagataagaagtctgttggtcgcaggagctgctcagtatgactgtttttttcagcatctgaggctactggacggggctctgaagctgtccgctaaagatctacgctcgcaggtagtaagggaggcctgcatcacagtggcccacctctccacagtgctgggtaataagtttgatcatggcgctgaggccatcgttccaacactctttaatttggtaccgaactcggccaaggttatggctactagtggctgcgccgcaattagattcatcataagacacacacacgtgccgagactgatccccttaattacgtctaattgtacttcgaaatccgttcccgtgagaaggaggagcttcgaattcctggacctcctactgcaggaatggcagacacactcgttagagcgtcatgctgcagttctggtggaaactatcaagaaaggaattcacgatgccgatgccgaggctagagtagaagcaaggaagacatacatggggctgcgcaaccactttccgggtgaagctgagacactttataattcgctggaacccagttatcaaaagagcctgcagacttaccttaaatcttctggctctgtggctagcctgccacagagcgaccgttccagctcttcctcacaggaaagtcttaaccgccctttcagcagcaagtggtctacagcaaacccaagcaccgtggctggaagagtttccgccggatcctctaaagccagctcccttccagggtccctacagagatcacgcagcgacatcgatgtgaacgcagctgcgggtgccaaagctcaccatgcagcaggtcaatccgtgagaagtgggcgtctgggggctggcgctctgaacgcaggctcctacgctagtttagaggacacttctgataagctcgacggcacagcctccgaagatggcagggttcgggctaagctctccgcgccattagcgggaatgggtaacgcaaaggccgattctagaggacgctctaggactaagatggtgagccaaagccagcctgggagccgatccgggagtccaggtcgggtactgacgacaacggcattatccacagtgtcctctggcgtgcaaagggtgctggtgaacagcgcctcagcacagaaaagatccaagattcccaggtcacagggctgctccagggaagcgagtccctcccgcttatctgtggcacgttcatcccgcatcccgaggccatcggtgtcccaggggtgcagccgggaggcctcccgagagagtagtagggatacctctccggtacggtccttccagccactggggcctggctacggtatctctcagtcaagcagattgtcttcttccgttagtgcaatgagagttttgaacacaggctccgatgtggaagaagccgtggcagatgccctccttctgggggacattcgcaccaagaagaagccagctagaagacgctacgagagttacgggatgcacagtgacgatgacgccaacagtgatgcatcatcagcatgcagtgaaaggtcctacagctccagaaacggttctattccgacttatatgaggcagaccgaggacgtggctgaggtcctgaatagatgtgcctcctcaaattggagcgagcgcaaggaaggcctgctggggttgcagaacctgctgaagaatcaacgaaccctgtcccgggtcgagctgaagcggctgtgcgaaatttttacacggatgttcgccgacccacacggtaaggtcttctccatgttcctggaaaccctggtggattttatccaggtgcataaagatgatcttcaggactggttgtttgttctgctcactcagcttctgaaaaagatgggggcagacctcctcggaagtgtccaggcgaaggtgcaaaaagctctggatgtgacgcgagagtcgtttcctaatgacctccagtttaacatccttatgaggtttactgtagaccagacacaaacgccttcgctgaaggtcaaggtggccatcctcaagtacattgaaaccctggccaaacagatggatcccggagattttatcaattcgtccgaaactcgactggccgtttcaagagtgatcacgtggactacagaaccaaagtcatccgatgtgcggaaggctgcccagagcgttctgatttccctatttgaactgaacaccccagagttcaccatgctcctcggcgctctgccaaaaacgttccaggacggggcaacaaaattacttcacaatcacctgcgcaacaccggaaatggcactcagtcttccatgggcagtcctcttactcgaccaacacctaggtcgcctgcaaactggtctagtccactcacttctcccactaatactagccagaataccttgagcccttccgcctttgactacgacactgagaacatgaattctgaagacatttattcttctctcaggggtgtcacagaggccatccagaatttcagttttcggtcccaggaagacatgaatgagcccctgaagagggactccaaaaaggatgatggcgattccatgtgcggtggtcctggcatgtctgaccctcgagcgggtggcgatgcaaccgactctagccagactgcgctggacaataaggcctcacttttacactcaatgcctactcatagctccccgagatcacgcgattataatccgtataattatagcgacagcatctcaccattcaataaatccgcccttaaggaggctatgttcgacgatgatgccgaccagtttcccgacgatctgagcctggatcactctgacctggtggccgagctcctgaaggagctgtctaatcacaatgaacgagtggaagagcgcaaaattgcactctacgagctcatgaagctgacacaggaggagtctttcagtgtgtgggacgagcatttcaaaacgattctgttgctgctgttggagactcttggcgacaaagagcctaccatccgagcgctggcgctcaaggttctgcgtgagatccttcgacatcagcctgctcggttcaaaaactacgcagaacttaccgttatgaagactcttgaggcgcataaggatccccacaaggaggtggtacggagcgccgaggaagccgctagtgtgctagccacctccattagccctgagcagtgtattaaggtactttgtccgatcatccaaaccgcagactacccaatcaacttagcagccattaaaatgcagaccaaggtgatagaaagggtctccaaagagactctgaacttactgctgcccgagataatgccgggacttattcagggatatgacaactcagagtcgtctgtgcggaaagcctgtgttttctgtcttgtcgctgtacacgctgtaatcggggacgagctgaagcctcatttgtctcaactcaccggatctaaaatgaaacttttaaatctttatataaaaagggcccaaactgggagtggcggagccgaccctacaaccgacgtgtcagggcaaagttag

SEQ ID NO: 219989 - DNA, 3882 bp, synthetic construct
  misc_feature 1..3882: note = Description of Artificial Sequence: Synthetic coding sequence
  source 1..3882: mol_type = other DNA
atggctatgggtgatgataaatcattcgatgacgaagaatctgttgacggaaacagaccttcctcggctgcaagtgcctttaaagtgcctgcacccaagaccagtggtaaccctgccaatagtgcacgtaaacccggaagtgccggtggccctaaagttggcggtgccagcaaagaaggaggcgcaggcgcagtggacgaggacgatttcattaaagcgtttactgacgttccgtctattcagatttatagtagccgcgaacttgaggaaaccctcaacaagattagagagattctgtcagatgataaacacgattgggaccagcgcgctaacgccctcaaaaaaattcggagtctgctcgtggccggagcggctcagtacgattgcttcttccagcacttacggttgctagacggcgcactgaagctcagcgctaaggaccttcgctcccaagtcgtacgtgaagcctgcatcacggtggcacacctgtctacagtgcttgggaataagtttgaccatggtgctgaggctattgtccccactctctttaaccttgtgcccaacagtgccaaagtgatggctacgtcaggctgcgctgcgattcgcttcattatccgacatacacatgttcccaggctgataccccttatcacctccaactgtacatccaagtctgttcccgtcagacgcaggagttttgaattcttagacctgttgttgcaagagtggcagacacactccctggaaaggcacgcggctgtcctggtggagactattaagaaaggcatccacgatgccgatgcggaggcccgtgtcgaagccagaaagacatacatggggctgagaaaccattttcctggagaagcagaaaccttatacaactcattggagccaagttatcagaagagtcttcagacttacctcaaatctagcggttccgtcgccagtctaccacagagcgaccgtagtagttccagctctcaggagtccttgaacagacccttctccagcaaatggtccactgccaacccctccactgtcgcgggacgggttagtgctggctccagcaaggccagttctctaccagggtctcttcagcgctcaaggtctgacattgatgtcaatgcagcggcaggggctaaagcccaccacgcagccggacaatcggtcagatcgggccgactcggtgccggagccctgaacgcgggtagctatgcaagcctggaagacactagcgataaacttgatggtactgcatctgaagatgggagggtgcgggcaaaattgtcagctcctctggccggtatgggtaacgcgaaggctgattcaagaggcagatctcgaaccaaaatggttagccaatctcagccgggtagccgatccggaagtcccggacgcgtcctaacgactaccgctctctctaccgtttcttccggggtgcaaagagtgttagtgaactccgcttccgcccaaaagaggagtaaaataccaaggagtcaaggctgttctagagaagcctcccctagtagactatcagttgcacggtctagtcgcatccccagaccctccgtgtcccagggctgctctcgcgaagctagtagggaaagttcgcgcgatacatcccccgtccggtcatttcagccgttggccagtcgccaccacagcaggagtaccggtgcgctctacgctccggaggtatacggagccagcggccctgggtacgggatcagccagtcttcgagattgtctagttctgtatccgccatgcgcgtgctgaataccggctctgacgtggaggaggccgtggccgacgccctgaagaagcccgcacgcaggaggtacgagagctatggtatgcactcagatgatgatgccaattcggacgctagttcggcgtgctcagaacgttcctacagctcacgcaacggctccatccctacttatatgcgccaaacagaggacgtggcagaggtgttaaatcggtgcgctagctctaattggtccgaaagaaaagagggattgctgggtctacagaatctgctgaaaaaccagaggacgctcagtcgggtggagctcaagcgactgtgtgaaatcttcacgcggatgttcgccgacccccacggcaaggttttttccatgttcctggagacattggtcgatttcatccaagtgcacaaggacgacctccaagactggctgtttgtcctcctgacccagctgttgaagaagatgggggcagatctgctgggaagtgttcaggctaaagtccagaaagccctggatgtcacccgcgagagtttccctaacgacctccagttcaacatcctaatgcggtttaccgtggaccaaacgcagacccccagcctgaaagttaaggtggctattttgaagtacattgaaacattggctaaacaaatggaccccggagattttataaattcaagtgaaacacgcttagctgtcagccgtgtgattacatggaccactgagcctaagtcaagtgatgtacgaaaagccgctcaatccgtgctgatttcgctgtttgagttgaacaccccagaattcaccatgctgttgggggcacttcccaagacgttccaggacggtgccacaaagctcctacataaccatctgaggaataccggaaatggcactcagtcgtccatgggcagtccacttactaggcccacgcccagaagtccggcaaactggtcatcaccactgacttcgcctacaaatacgtcccagaacaccctatccccttccgccttcgactatgacaccgagaatatgaacagcgaggatatttattcctcactgaggggtgtgactgaagcaattcagaatttttccttcaggagccaggaagacatgaacgagcctctgaaaagggattcgaagaaagacgatggggactcaatgtgcgggggtccaggcatgagcgacccgagagctggtggggatgccacggactcatctcagactgctttagataacaaagctagtctccttcactcaatgccaacacatagctctccccgatctcgggattacaacccatataactattccgattctataagtccgttcaataaaagcgcactcaaggaggccatgtttgatgacgatgccgatcagttccctgacgatttaagcttggatcacagcgacctggtggcagagctattgaaagagctcagtaatcataatgaacgggtggaggagcgtaagattgctctctacgagctgatgaaactgacacaggaggagtcattttccgtgtgggatgagcacttcaaaaccatcttgctgctcttactagagaccctgggggataaagagccgactatcagggccctggctctgaaggtgctccgcgaaatactccggcatcaacccgctcgctttaaaaactacgccgagctgacagtcatgaagacactggaggcacacaaggacccccacaaagaggtggttagatctgccgaagaggctgcttccgtcctcgcgacctcaatttctccagaacagtgcatcaaggtcctgtgtcccatcatccagaccgcagactaccctataaatctggcagctatcaagatgcagaccaaagtcattgaacgcgtttccaaagagacacttaacctgctcctgcctgagattatgcccggactgattcaaggctacgataactccgaatctagcgttaggaaagcctgcgtgttttgccttgtggctgtacacgctgtcatcggcgatgagctgaagccacacctatcacagttgacagggtccaaaatgaaattgctcaacctatacatcaaaagggcccaaacagggtctggcggtgcggatccaacaactgatgtcagtggccaatcttag

SEQ ID NO: 219990 - DNA, 3192 bp, synthetic construct
  misc_feature 1..3192: note = Description of Artificial Sequence: Synthetic coding sequence
  source 1..3192: mol_type = other DNA
atgagacgtctgatctgcaagcgaatttgcgattacaagagttttgatgacgaggagtccgttgacgggaatcgaccaagtagcgccgcaagcgccttcaaggttcccgcaccaaaaaccagcggcaacccagctaacagcgcgaggaagcctgggtccgccggagggcctaaggtaggtgagcttttatcgatcatgatttacagctcaagggagctggaggagactttgaacaagatcagagaaatcctgagcgatgacaagcacgactgggatcaacgcgcaaatgcattgaagaagattcgaagccttcttgtggctggcgcagctcaatatgactgcttttttcaacatctccggctcttagatggtgcattgaaactcagcgctaaagaccttagatctcaggtcgtccgcgaggcctgtattacagtagcgcatctgagtacagtattgggaaacaaatttgatcacggagccgaagcgatcgtaccaacgctgttcaacttggtccccaattcagcgaaggtgatggccacctccggctgcgctgccataagattcataatccgccacacccatgtgccaagattaattccactgatcaccagcaactgtacctccaagtccgtccccgtgagaaggagatcgtttgagtttcttgatcttctgttgcaggaatggcagacacactccctggagagacacgccgcagtgctagtggaaaccataaagaagggcatccacgatgccgacgcagaggccagggtggaagctagaaaaacatatatgggcctacgaaaccacttccctggggaggccgaaacgctatacaactctctggagccctcataccagaaatcactgcagacatatctcaagagtagcggaagcgttgcgagtttgccccagtccgatcgcagttcgagctcctctcaggagtctctgaaccgcccattcagtagtaagtggagtacagcaaaccctagcaccgtggcagggagagtgtccgccggatcttctaaggcctcgtccctaccagggagtctgcagaggagcaggtctgacattgacgtaaacgcagcagctggcgcaaaggcccatcatgcagcaggacagtccgttcgctccggcagactaggcgctggcgctctcaatgccggtagctacgcatctcttgaagacactagcgataagctggacgacctgttctcagacaacgggagggtacgagccaaactgtcggccccactagccggtatggggaatgccaaagccgattctcgtgggagaagtcgcaccaaaatggtgagccaatcgcagcgctccagtagccctgataagaatgaggggagccaatctgctaatactatcggcgcaggaagtaggtccggctccccgggtcgggtgctcaccactacggccctgtcgacggtgtcttccggagtgcagcgcgtgttggttaactccgcttccgcccagaaacggagtaagatcccccgttcccagggatgtagcagggaagcctcaccctcccggttgtcagttgctaggagcagtcgcatacctcggccatctgtgagtcaggggtgcagcagagaggcttctagagagagcagcagagatactagtccggttcgctcgtttcaacccttagggcctggatatggaatttcccagtcatccagactatccagtagtgtgagcgctatgagagttttgaacaccgggagcgatgttgaagaggcggttgccgacgctctggtcctcttcgactttaaaaccaaaaaaaaaccagctaggcgtcgttacgagtcctatggcatgcactcagatgatgatgcaaatagtgacgcatcctctgcctgctcggagcgttcttattcctcacggaatggttcaatcccaacatacatgcgacagacagaagatgtagccgaggtcctgaatagatgcgcatccagtaattggtctgagcggaaagagggcctgttgggactccaaaacctgttaaagaaccagaggacactttcacgcgttgagttgaagaggttgtgtgagatcttcacaaggatgttcgctgaccctcatgggaaagttttctctatgtttcttgaaactttggttgatttcattcaagttcacaaggacgacctgcaagactggcttttcgtactgctaacacaactgctcaagaagatgggagctgatttactgggatccgtacaagcgaaagtgcaaaaagctctggatgtaactagagagagctttcccaacgatctgcaatttaatattcttatgcggttcactgttgaccagacccagactccatcactgaaagtgaaagtggccatactgaagtacattgagaccctggctaagcagatggaccccggtgatttcatcaactcttctgaaacccgcctggctgtatctagagtgatcacctggacaaccgagcctaaatccagtgacgtgaggaaagcagcccagagtgttctgatctcactgttcgagctgaacactcctgagtttactatgcttttgggtgccctgccaaagactttccaagatggcgcaactaagcttctccataaccatctgcggaataccggaaacggcacgcagtctagtatgggctctcctttaaccaggcctacacctaggtcccctgctaactggtctagccctctgacttctcctacaaatacttcccaaaataccctctcccctagtgcctttgactacgatacagaaaatatgaactccgaagacatttactcctcattacggggagtcacagaggctatccagaactttagcttccgatcccaggaggatatgaacgagccccttaagagagactcaaagaaagatgatggcgattcaatgtgcggcggacccggaatgtctgatccacgtgccggaggtgacgctacggactcgtcgcagactgctctggacaacaaggcctctttgctgcactcaatgcccactcactcctcacctagaagccgcgactacaacccttacaattactctgacagcatttccccattcaataaatccgccctgaaggaagccatgtttgacgatgacgccgatcaattccccgatgacctgtcccttgaccactcagatcttgtggccgaactgctgaaggagcttagcaaccataatgagagggtgtag

SEQ ID NO: 219991 - DNA, 1680 bp, synthetic construct
  misc_feature 1..1680: note = Description of Artificial Sequence: Synthetic coding sequence
  source 1..1680: mol_type = other DNA
atgccaccgccttcccccgactcggaaaatggcttttaccccggactgccttcttccatgaacccagcattctttcctagttttagcccggtgtctcctcatggatgcaccggcctgagcgtccccactagcggcggaggaggcggtggctttgggggaccgttttccgcaactgccgtgcccccacctcctccccctgctatgaatattccacagcagcaaccccctcctcctgccgcaccacagcaaccgcaatctagaagatccccggtgagtccgcagctccagcaacagcatcaggcagctgctgccgctttcctgcagcagaggaatagttacaaccaccaccagcccctgcttaagcagtccccgtggagtaaccaccagtcctccgggtgggggacaggatccatgtcctggggggctatgcacggacgcgatcacagaagaactgggaacatggggatccctggcactatgaatcaaatcagcccgcttaaaaagcccttctctggcaacgtcatcgcgccacccaaatttactcgcagtaccccctcgttgactccaaagtcctggattgaggacaacgtgttccgcaccgataacaattctaatactctgctgccccttcaagatcgcagtaggatgtatgattccctgaatatgcacagcctcgaaaactccctgatagatattatgagagcagaacacgatccactcaaaggaagactgtcctatccacaccccggaacagataacttactgatgttaaacgggagatcaagtctgttcccaattgatgacggtctgctggacgatgggcacagcgaccaggtgggcgttctgaactcacctacatgctactcagcccatcagaacggagagcgtatcgagagattcagcagaaaagtttttgtgggaggcctgcctccagacatcgacgaagacgaaatcacggcgagctttcggaggttcggcccactggtcgtggactggccccataaagccgagagcaagtcctactttccccctaaggggtacgcgtttctgctgtttcaggaggagtccagcgtgcaggcgttgatcgatgcctgcattgaagaagatgggaagctatatctttgtgtgagcagcccaaccatcaaagacaagcctgtgcagatccgaccttggaatctcagcgactccgattttgtcatggacgggagtcagcctcttgaccccaggaagacaatttttgtgggcggagtgccacgccctctgagagccgtagagctagccatgatcatggataggttatatggtggcgtctgctacgcaggaattgacacagaccctgagctgaaatatcccaaaggcgctggcagggtggccttcagtaatcagcagagctacatcgccgcaatctctgcgaggttcgtccagctacagcatggcgacattgacaagcgcgtggaagtgaaaccatacgtcctagacgatcagatgtgcgatgagtgccagggcgctcgctgtggcggtaagttcgccccatttttttgtgccaatgtaacctgcctgcagtattattgtgaattctgctgggccaatatccattccagagccggtcgggagtttcataagccactggttaaagaaggcgcagacagaccgcgtcagatccacttccggtggaactag

SEQ ID NO: 219992 - DNA, 1731 bp, synthetic construct
  misc_feature 1..1731: note = Description of Artificial Sequence: Synthetic coding sequence
  source 1..1731: mol_type = other DNA
atgccacccccaagtcctgattccgagaatggattttaccccggtctcccatcttcaatgaatccagctttcttcccctccttctcccccgtaagtcctcacggttgtacaggtttgagtgtgccaccgccacccgctatgaacatccctcaacaacagcccccaccaccggctgctcctcaacagcctcaatcacgcagatctcccgtttcaccccagctgcaacagcagcaccaggccgcagccgcagcatttctacaacagagaaactcttacaaccatcatcaaccgttactgaagcaatctccttggtcaaaccatcagtcctctggatggggtacgggaagcatgtcatggggggcaatgcatggcagagatcacagacgcacagggaacatgggcatcccgggaaccatgaaccagatcagtccacttaagaaacccttctccggcaatgtgatagcaccccctaaatttacacgcagcacgccatctcttactccaaaatcgtggatcgaggacaacgtgttccggactgacaacaatagtaatactttactgccactccaggtgaggtcttctctgcagctaccagcctggggtagtgactctttgcaagattcctggtgtacagctgctggaacttcaaggattgatcaagaccgctcgcgcatgtatgattcccttaatatgcattccctggaaaatagtctgatcgacattatgcgcgcagaacatgatccacttaagggtagactctcctatcctcatcccggtaccgacaacctcctcatgttaaacgcaaggtcatatgggcgacgcagaggccgatcatctctcttcccaatagacgatggactgctggatgacggccactctgaccaagtaggagtgcttaactccccaacttgctactcggcgcaccagaatggagaacggatagagaggttcagtcggaaagtgtttgtcggcggtctgccacctgatatcgatgaggatgagatcactgcatctttccgtcgctttggccctctggtggtagattggccccataaagctgagtctaagtcctacttccctcccaagggatatgctttcctgctgttccaggaagagagcagcgtgcaggctttgatcgatgcctgtatagaggaagatggaaagttgtacctgtgtgtgagctccccgactattaaggacaagcccgtccagattcgtccctggaacctgtcggactctgactttgtcatggacggctctcagcccttggatccaaggaagaccatctttgtggggggtgtgcctcggccactgagagctgtagagctggcaatgattatggatcggctgtatggcggtgtgtgctatgctggcattgacacggatccggagttaaagtaccctaaaggggctggacgcgttgcgttttctaatcagcaaagctacatcgccgctattagtgccaggttcgtgcaactgcagcacggtgatattgataaacgtgtggaggttaagccttatgtgctggacgaccaaatgtgtgatgagtgccaaggggcacgctgcggtggcaaatttgcccctttcttttgcgctaacgtgacatgcctacagtattactgtgagttttgctgggctaacatccatagtcgcgctggccgagaatttcataagcccctggtcaaggagggcgctgatcggcctcgacaaattcacttccgttggaactag

SEQ ID NO: 219993 - DNA, 1704 bp, synthetic construct
  misc_feature 1..1704: note = Description of Artificial Sequence: Synthetic coding sequence
  source 1..1704: mol_type = other DNA
atgcccccacctagcccagattccgagaatggattctatcccggactcccctcctccatgaacccagctttctttccttcctttagccctgttagcccccatggctgcacagggttgtccgtccccacttcggggggtggtggcggagggtttggcggaccatttagtgccacagccgtgccaccgcctccacctcccgcaatgaacatcccccagcagcagccaccaccccctgccgcaccgcaacagccgcagagtcggaggagccctgtgtcgccccagctgcagcagcagcatcaggctgcggcagctgcattcctgcaacaaaggaactcctataaccaccatcaaccgctgctgaagcagagcccatggagtaatcaccagtcttcggggtggggtaccggatctatgagctggggtgctatgcatgggagggaccatcgcaggacgggcaacatggggattccaggaactatgaaccagatttcgcctctgaaaaagccattttctggcaatgtgattgcacctcctaaattcactcgctcaacccctagccttacccctaaatcatggatcgaggataacgtcttcagaaccgataacaactctaacactcttctgccgttgcaggaccggagccgcatgtatgacagcctaaacatgcactccctggagaattccctgatcgatattatgcgcgctgaacacgatccactaaaaggacgcctgagttatccacacccaggtaccgacaatcttctaatgttaaacgcgcgaagctacggtcgaagaaggggcaggtcttccctcttccccatcgatgacggcttattggatgatggccatagcgatcaggtaggagtgttgaacagccctacctgctactcagctcatcagaacggagagaggatcgaaaggttttcaaggaaagtgttcgttgggggattaccacctgatattgatgaggacgaaatcactgcatcattccggagattcggccctctggtcgttgactggcctcataaggccgaatctaaatcttatttccccccaaaggggtacgcttttttgctctttcaggaggagtcttctgtgcaggcccttatagatgcttgcatcgaagaggatggaaaactgtatctgtgtgtgtctagcccaaccatcaaagacaaacccgttcaaattcgtccctggaatcttagtgactctgacttcgttatggatggaagccagccgctggaccctcggaagactatctttgtcggcggagtgcctagacccctgcgcgctgttgaacttgcaatgattatggatcggctgtacggcggagtttgttatgccggtattgataccgaccccgagctcaagtatcctaagggtgcgggaagagttgccttcagtaatcagcagtcctacattgccgctataagcgcacggtttgtgcagcttcagcatggcgacatagacaagagagtggaggtgaaaccttacgtgctggacgatcagatgtgtgatgaatgccaaggtgcacgctgcggcggtaaatttgccccattcttttgtgccaatgtcacctgtctgcagtactactgtgaattctgttgggccaacatccatagtcgagcaggacgtgagttccacaagcccttggtcaaggaaggagcagaccgcccaagacagattcactttcggtggaattag

SEQ ID NO: 219994 - DNA, 1689 bp, synthetic construct
  misc_feature 1..1689: note = Description of Artificial Sequence: Synthetic coding sequence
  source 1..1689: mol_type = other DNA
atgcccccaccaagccccgacagtgagaacggcttctatccaggactaccttcctccatgaacccggcatttttccccagctttagcccagtatctccacatgggtgtacaggtctgtcagtgcctacctcgggaggcggtggcggaggatttggcggaccattttccgcaacagcagtgcccccacctccacccccagcaatgaacatcccacagcaacaacctcctccccctgccgctccccaacaaccccagagccgacggtcaccagtgtcccctcagctgcagcagcaacaccaggccgcagcagccgcatttctacaacagcgcaacagttacaatcatcaccaaccactcctgaaacagagcccatggagcaatcaccaatcatctggatggggcactggaagtatgagttggggggctatgcacggccgtgaccatcgtcggacaggtaatatgggaatacccggtactatgaaccagatctcgccattgaaaaaaccctttagtggaaacgtcattgctccccctaagtttacacgtagcacccccagcttaaccccaaagagctggattgaagacaacgttttccgtaccgataataactctaacactttgttacccttgcaggtgcggatggatagatcacggatgtacgactccctgaatatgcattccttggagaatagtctgatcgatattatgagagctgaacatgaccctctgaaaggtagactatcctacccccaccctggcaccgataacctgctgatgctgaacggccgatcgagtctctttcctatagatgatggacttcttgacgacggccattctgaccaagtcggcgtcttaaactccccaacgtgttacagtgctcaccagaacggagagaggatcgaacgcttctcacgtaaggtgtttgtgggcggactcccccctgatattgacgaggacgaaatcacagcttccttccgacgcttcggcccactggttgtcgattggccccacaaagccgagtcaaagagttacttcccccctaaaggatatgccttcctcctgttccaagaggaaagctctgtgcaggctctcatagatgcgtgtatcgaagaagacgggaagttgtacttgtgtgtctcttctcctacaataaaggacaaaccggtgcagatacggccatggaacctgtcagactccgattttgtgatggacgggtctcagccactggaccctagaaagacaatttttgtgggcggagtccctcggccactgagggctgtggagctggcaatgatcatggacagattgtatggaggcgtgtgttacgccggtatagatacggatcctgaactcaagtacccaaagggggctggacgggtcgcattttcaaaccaacagagctacatagccgctatcagtgctagatttgtgcagctgcagcacggcgatattgacaaacgcgtggaggtaaagccttacgttctcgatgaccagatgtgtgacgagtgtcaaggtgccaggtgtggcggtaagtttgccccattcttttgtgcaaacgtgacctgtttacagtactactgtgaattttgctgggcaaatatccatagccgagctggccgagagtttcataaaccactggtcaaggaaggcgcagataggcccaggcaaatccactttcgatggaattag

SEQ ID NO: 219995 - DNA, 3024 bp, synthetic construct
  misc_feature 1..3024: note = Description of Artificial Sequence: Synthetic coding sequence
  source 1..3024: mol_type = other DNA
atgcgggactttggcttcggcgtcctccagacggctccactaagatcatctagtcccggacctctgttctgcggcgaggcctatggcccttatgctgtgggctccgttaatccgctgccatctgctaccccctttggcccactgtcccccccaccactccctgtcacaggctttcttgaggcagcctcacccttctctgttccactggggggaggggctggctctccagcagctgctgccagttcatccagcccgttcctggcgcaccagcagactatgcaagacgagctgctgctgggtctcacacagcaacccgcacgtcccctttctggggctgcagcgactgagaagcttccagatcaccatcctggtggaggtactatcgctggggttactcacttgctccccagtcaggatttcaagccaagcctccaccatcccagcagcagtagcgctagttcttgttgttgctgtcggacatcctctccccaggatttcagcaagagacaacaacagcagttaagtagtcagaagcggaaagaattctctcctccacatctgccccatcctccggatagcaagccacccccaccaccccctcccctgcattgtccgggacggttctctccaccaccaccgcctgctgggccactccttcaacccgctcagctggcccagaggcagcagcagcagcctccgcagcagtttagtcttctccatcaacaacacctgagtccccaggactttgccccaagacagcgccctgccgatttacctcccctgccacaactgccaccaagccccccagctgctcctagacggcgacacggaggagctggctcgcccaggaaaactcctgccgcaggtgaaggcagcgccgcagagtcccctaatgccggtctggccagctctacccctgtgaaccccgcacccggttccatggagagccccaatcatcccttattgaactctcctagcaatctcttaccaggcggagccttgggagccggagccttcagttccttacagtcccctgacctgcctcacccaggaggcggtggagggggaggaggcggtggtccccctggtggcggtggagggggtggcagcgcctcaccgccaccgttgcccggattcggaacaccgtggtcggtgcagactgctagtccacctcctcaaccccagcaaccccctccgactcagccccagcagcaaccaccaccgcctcagcagcctccacagcctcaaccccaaccgccaggttccagcgctactacccctggaggcggatcaggtgggtccttgagtgccatgccacccccatcccccgattctgagaatggattttaccctggtcttccaagctcgatgaacccggctttttttccatctttctcgcctgttagccctcacggctgcactgggctctcagtaccaactagtggcggtgggggaggcggattcggcggaccgttttccgcaacagcagtgcctccacccccaccacccgctatgaacatcccccagcagcagcctccacccccagcagccccacagcaacctcagagtcgacgatctccagtaagtccccagttgcaacaacagcaccaggctgccgcagcagctttcctgcagcagagaaatagctataatcatcatcagcccctgctgaaacagtcaccctggtctaatcaccagtcttcgggttgggggaccggcagcatgtcttggggagcaatgcatggccgagaccacaggcgaacagggaacatgggaattccagggacaatgaaccagatttctcccctgaaaaagccattttcaggcaatgtgatagccccacctaagttcacgagaagcaccccctcgctcacaccaaagagttggatcgaggataacgtgttccgaactgacaataattcaaatactctgctgcctttgcaggtcagaatggatcggtctcgcatgtacgattcgcttaacatgcacagtctggaaaattccttaattgatataatgagggcagagcacgatcctctgaagggtcgcctcagttacccccaccctgggacagacaatttgttaatgttgaacgcgcgttcctatggaagacgcagaggccgatcatcattatttccgatcgacgatggccttctggacgacggccactcagaccaggtgggagtactcaacagtcctacctgttactcagcccatcaaaacggcgaacggatcgaaagattctctaggaaggtgttcgtggggggactgcctcccgatatcgacgaggatgaaattaccgcctctttccgaagatttggccctctcgtcgtagattggcctcacaaggccgaaagtaaatcatattttccccctaagggatacgccttcttgcttttccaagaagaatccagcgtccaagctcttatcgacgcctgtatagaggaggacggaaagttgtacctttgcgtgtcatcccccaccatcaaggataagccagttcagattcggccatggaaccttagcgattccgactttgttatggacggatcacagcctctggacccgagaaagaccatatttgttggaggagtgcccaggccactgcgcgctgttgagctcgcgatgattatggataggctatatggaggagtttgctacgccggaatagacactgacccggagctgaagtatccaaaaggtgccggtcgggtcgcctttagtaaccagcagagctatatcgccgctatttcagcgcgtttcgttcagctacagcacggtgatattgacaaacgggtggaagtaaagccgtacgtattagatgatcagatgtgtgatgagtgccaaggagccaggtgcggcggtaaatttgccccttttttttgcgctaacgtaacgtgcctacagtattactgtgaattctgttgggcaaatatccattcgcgcgcaggacgggaatttcataaacccttggtgaaagaaggcgctgacaggcccagacagattcattttagatggaactag

SEQ ID NO: 219996 - DNA, 1770 bp, synthetic construct
  misc_feature 1..1770: note = Description of Artificial Sequence: Synthetic coding sequence
  source 1..1770: mol_type = other DNA
atgccacctccatcaccggactcagaaaatgggttctacccaggccttccttcaagcatgaatcccgctttcttcccaagcttcagccctgtgagtccacatgggtgtaccggattaagcgtccctaccagcgggggaggagggggtgggttcggaggccctttcagtgctaccgccgtccccccacctccccctccagctatgaatatccctcagcagcagccaccaccacctgcggctccccagcagccccagagcagacggtcaccggtcagcccccagctacagcagcagcatcaagctgcggcagccgctttcttacagcagagaaactcctataaccatcaccagcctctgcttaaacagagtccatggagcaaccatcagagctctggttggggcacaggctctatgagctggggcgcaatgcatggaagagaccataggagaacaggtaatatggggatccctggcactatgaaccagatcagccctctgaaaaaaccctttagtgggaacgtgattgcacctccaaagttcactcggagcacaccatctttgactcccaaaagctggattgaagataacgtgtttcggactgacaataactctaacacgctgctcccactccaggtacgctctagcctgcaactacctgcctgggggagcgatagtctgcaggacagttggtgtacagccgctggcaccagcagaatcgatcaggacaggtcaagaatgtatgacagcctgaatatgcactccctagaaaactctctgattgatatcatgcgagctgagcatgatcccttgaaaggaaggctaagttatcctcacccaggaacggataatcttctaatgctcaatggcagatcaagtttgtttcctatagatgacggcttgctggatgacggtcattcagaccaggtcggggtcttaaattcccctacttgttattctgcgcatcagaacggggagagaattgaaaggtttagtcgcaaagtgttcgtcgggggtctaccaccagatatcgatgaagacgaaataacagctagcttcagacggtttggcccactagtggttgattggccgcataaagcggagagtaagtcctatttccctccgaagggctatgcttttcttctcttccaggaggaaagctctgtccaggcactgatcgacgcctgtattgaggaagacggaaagttatatttgtgtgtcagctcacccactatcaaggacaaacccgtgcaaatcagaccctggaacctgtcagatagcgattttgtcatggacggcagccagcctctagatccaaggaagacaatatttgtcggtggggtgcctagaccactccgggctgtggaactcgctatgataatggatcgactgtacggcggagtgtgctatgccggaattgataccgatcccgagctgaaatacccaaaaggtgcaggcagagtggctttttctaatcaacagtcctacatcgcagcgattagtgctaggttcgtgcagctgcagcatggcgatatcgataaaagagtcgaagttaagccatacgtcttggatgaccagatgtgcgatgagtgccagggagctcgttgcggaggtaaattcgcacccttcttctgtgcaaatgttacatgtctgcagtactactgtgagttttgctgggcaaacatccattcccgcgcaggacgcgaatttcataaaccccttgtcaaggagggcgctgacagacccaggcagatacactttcgatggaactag

SEQ ID NO: 219997 - DNA, 3105 bp, synthetic construct
  misc_feature 1..3105: note = Description of Artificial Sequence: Synthetic coding sequence
  source 1..3105: mol_type = other DNA
atgagagacttcggctttggagtgctgcaaacagcgcctttaaggagtagctcacctggccctctgttttgtggcgaagcttatggcccttatgctgtggggagtgttaatcctcttccatccgccacgccctttggaccacttagcccaccccctctgccagtcaccggttttcttgaggctgcatcaccatttagcgtacctttgggcggaggggctggaagtcccgcagccgcagcgtccagcagttctccatttcttgctcaccagcaaaccatgcaggatgaattgcttctagggctcacacagcagcctgcccgtcctcttagcggggcagctgcaacagagaagttgccggatcatcatcccggtgggggaacaattgcaggcgttacccatctactgccaagccaggattttaagcctagcttacaccatccctcttcctcctccgcttcatcttgttgttgttgccgcacgtcttcccctcaggatttcagcaaaagacagcagcagcaactgagctcccagaagcgcaaagagttcagccctcctcatttgccccacccacctgactccaaacctcctccgcctccccctcctttgcattgccccggtcggtttagcccaccacccccacctgccggtccactgctacagcccgcacagctggcccagaggcagcagcaacaaccgcctcagcaattttccttactgcatcagcaacacctcagcccccaggacttcgcacccagacagagacccgctgatctccccccactcccacagctgccaccgtctccccctgcagcccctcgaaggagacatggcggagcgggaagccccagaaagacccccgctgcaggcgaaggtagcgcggctgagtcaccaaacgccggtctcgcttcctctacgccggtgaatcccgctcctggatcgatggaatcacccaaccatccactgctaaatagtccttcgaacttgttacccggaggagctctgggagccggagcgttctcttccctccagtctcctgacctgccccacccaggtggtggaggcggaggaggaggaggcggtcccccaggaggagggggtggcggaggaagtgccagtcctcccccattgcctggatttggcacaccgtggagcgttcagacggcgtccccgccaccccagccccagcaacccccacccactcagccacagcagcagcctcccccaccccagcagcccccacagcctcagcctcagccgcctggatcatccgctacaacacctggtgggggttccggcggttctctgagcgctatgccacccccatctccggatagcgagaacggcttttacccgggtctcccatctagcatgaatccagccttctttcctagcttctctcctgtctcccctcacggttgtacaggcttgtcagttcctacctctgggggaggtggcggagggtttggaggaccatttagcgccaccgccgtgccccctccacccccacctgctatgaatatcccacagcagcagccacctccgccagccgcaccgcagcagccccaatctcggagatcacccgtctcacctcaactacagcagcaacatcaggcagccgctgctgccttcctgcagcagaggaatagctacaatcatcaccagcccctccttaaacaatccccttggagcaatcatcagtcctctggctggggcaccggatcgatgtcttggggggctatgcatgggagggatcacaggcggacgggaaatatggggattcccggaacaatgaatcaaatcagcccccttaagaagcccttttctggtaatgtgattgcaccccctaaattcacccgctcaaccccgtctctgacaccaaagtcgtggattgaggataatgtgtttcggacagacaacaactctaatactctgctacccctgcaggtccgatctagtctgcagctccctgcttgggggagtgacagcctacaggactcttggtgcaccgccgcaggcacaagcaggatcgatcaagatcggagcagaatgtatgatagtctgaacatgcatagtctcgagaattccttgatagatatcatgagagccgagcatgacccactgaagggccgtttgagttaccctcatcctgggacagacaatttgctcatgctcaatgccagaagctacggtcgaagacgaggacgctctagtttattccccatcgacgacggtttgctcgacgacggccactcagatcaggtgggggtattaaatagcccgacctgctacagcgctcaccagaacggcgagcggattgaaagattctcgcgcaaggtcttcgttggtggcctgccgccagatatagacgaggacgaaattactgccagctttcggaggtttggtccactcgtggtcgattggccacataaggcagaatctaaaagctatttccctcctaaaggctacgcatttctgttgttccaggaagaatcctccgtgcaggcccttattgacgcttgtatcgaggaagatggcaagctgtatctgtgcgtgagctctcccaccattaaggacaaacccgtccagatccgtccatggaacctttctgactctgacttcgtgatggatggcagccagcctctcgaccccagaaaaaccatctttgtgggcggtgtgcctcgacccttacgcgcagttgagctcgctatgattatggatcgactgtatggcggtgtgtgctatgccggaatagacacagatcccgaactcaaataccctaaaggcgctgggagggtagccttctctaatcagcaatcatacatagccgcaatttctgctcggtttgttcagctgcaacatggcgacatcgataaacgggtagaggtaaagccctatgtgcttgatgaccaaatgtgcgatgaatgtcaaggagcacggtgcggaggtaagtttgcacctttcttctgcgccaatgtgacgtgcttgcagtattattgcgaattttgctgggccaatatacactctcgcgctggacgcgaattccacaaacctttagtgaaagagggagctgatcggccacgccagatacattttaggtggaactag

SEQ ID NO: 219998 - DNA, 3081 bp, synthetic construct
  misc_feature 1..3081: note = Description of Artificial Sequence: Synthetic coding sequence
  source 1..3081: mol_type = other DNA
atgcgggatttcggttttggggtgttacaaaccgcccctctccgctcctcaagtcccggaccgttgttctgcggggaggcatacggaccctatgctgttgggtccgtcaatccactcccttctgcaaccccctttggacctctcagccctcctcctctgcctgtgactggttttctggaggccgctagcccttttagcgtgccgctagggggtggggctgggagtcccgctgccgctgctagtagtagttctccctttctggcacaccagcagacaatgcaggatgaactgctgttaggcctgacgcagcagccagcgcgacctcttagcggggctgcagctacagaaaagcttcccgatcatcatccgggaggaggcaccatcgctggtgtgacccacctgctcccgtcccaggattttaagccctcactccaccaccctagcagctcttccgcctcctcatgctgttgctgccgtacctcttctccccaggacttttcgaaaaggcaacagcagcagctctcttcccagaaacgcaaagaatttagcccacctcaccttcctcatcctcctgatagtaagccgcctccaccaccccctccccttcattgtcccggacgcttctccccccctcccccacccgcagggcctctcctccagcctgcacaactggctcaacgccagcagcagcaacctccgcagcagtttagcttactgcatcagcagcacttgagccctcaggattttgctcctagacagaggcctgccgaccttccgccactgccccagctcccaccgtcgccacccgcagcacctagaagacgccacggcggtgcgggaagccctagaaagacgcccgctgcgggagagggctctgccgctgaaagtcccaatgcagggctcgccagtagtacaccagtgaacccggcacctggcagcatggaaagtcccaatcatcccttactgaactcaccctcaaatctcctccccggaggagccctgggagccggagctttctcgagcctgcagtcacctgacctcccacaccccggtggcggagggggtggcggaggaggcggaccacccggtgggggtggcggaggtggctcagcgtctcctccccctctgcccggatttggaacaccttggagcgttcaaactgcaagtccacctccacaaccacaacaaccccctcctacacagcctcagcagcagccccctcctcctcagcagccgccacagccccagccccaacctcccggttcaagcgcaacaactccgggaggcggaagtggtggttccctctccgcgatgccaccacccagcccagactccgagaatggattctacccaggtctccccagcagcatgaatccggctttctttccctctttctctccagtgagcccccatggctgcacaggactgtccgtgcccaccagcggcggaggtggaggtggctttggtggccctttctctgccacagccgttcccccacctccaccacctgcgatgaacattcctcagcagcagccccctccccctgccgctcctcagcagcctcagtctcgtaggtctccagtgtcccctcagttgcagcaacagcaccaggcagccgctgcagcttttctacagcagcgcaattcatacaatcatcaccaaccgctgcttaaacagtctccttggagcaaccatcaatcctctgggtggggtacgggtagcatgagctggggagcaatgcatgggagggatcatcgccgaactggcaacatgggcatacctggcacaatgaaccagatttctcccctgaagaaacctttctccggcaatgtaattgcgcctccgaagtttactcgcagcaccccttcattgacaccaaagtcctggatcgaggacaatgtgttcagaacggataataacagtaatacccttttacctttgcaggtcaggtcatcactgcagctgccagcgtggggcagcgactcgctgcaggactcctggtgcactgcagcagggacttctcggatcgatcaagaccgttcgcgcatgtatgatagtctgaatatgcatagcctggagaattcactgatcgacattatgcgtgccgaacatgatccactcaagggacggctgagctacccacacccaggaactgacaatctgctcatgctgaacggacgctctagccttttccccattgacgatggcctgcttgatgacggacatagtgatcaggtgggcgtactgaattcccccacatgttactcagcgcaccaaaacggtgagagaattgagcggttctcgcgtaaagttttcgtcgggggactgcccccagatattgacgaggacgagattacagcgtcctttcggaggtttgggccactcgtcgtcgactggccacacaaagccgagtccaagtcctattttccaccaaagggctatgcgtttctgttattccaggaggagagcagtgttcaagctctaattgacgcctgcatcgaggaagatgggaagctgtatctgtgtgtgtcctccccaacaattaaggataagccagtacagattcgaccatggaatttaagtgactccgactttgtgatggacggttcccaacctcttgacccccgaaaaacaatctttgtggggggtgtgcctcgccctctgcgcgctgtggaacttgccatgataatggatcgcttatacggcggtgtgtgctacgcaggcattgatacagatcctgaactgaagtatcccaagggcgcagggagggttgcattttctaatcagcagtcctacattgctgccatttccgcaaggtttgtgcaattacagcatggcgacattgacaagcgtgtggaagtgaagccgtacgtccttgacgaccagatgtgcgacgagtgccagggggctcgttgcggcggtaagttcgccccattcttttgcgcgaatgtgacctgtttacagtattactgtgaattctgttgggccaacatccactcacgagcaggcagggaattccataagcccctcgtgaaggaaggtgcagaccggcctcggcagatccatttccgttggaactag

SEQ ID NO: 219999 - DNA, 2097 bp, synthetic construct
  misc_feature 1..2097: note = Description of Artificial Sequence: Synthetic coding sequence
  source 1..2097: mol_type = other DNA
atgcaggacgatctactgatggacaaaagcaagactcaaccacaaccacagcagcagcaaagacaacaacagcagccacagcccgaatcctcagtgagtgaggccccttccactccgctgtcctcagaaacccccaaacccgaggaaaacagtgctgttccagcgcttagtcccgcagctgcacccccagcgccaaatggaccggacaagatgcaaatggaatccccattgctcccaggcctcagctttcaccagcctccgcagcaacctcccccacctcaggagcctgccgctccaggagcctctttgagcccctcctttggatctacttggagcactgggaccaccaacgccgtcgaagattctttcttccagggaatcacccctgtgaacgggacgatgttgtttcagaactttcctcatcacgtgaaccctgtcttcggcggaactttctctccccagattggcctcgcccagacacagcaccaccagcaaccgcctccaccagccccagcccctcagcccgctcagcctgcccagccaccccaggctcagccgccacagcagcgcagaagtcctgctagtccaagccaggccccatacgcacaacgatcagctgcagcagcttacggccatcagccgattatgaccagtaagccgtccagttcttcagcagttgccgcagcggcagcagcagcggctgcctcatctgctagcagtagctggaacactcatcagtctgtaaatgccgcatggagcgcgccatctaatccttggggtgggctgcaagccggacgggacccgaggagggccgtaggggttggcgttggggtcggcgttggcgtacccagtcctcttaatccaattagtcctttaaaaaaacctttttcctcaaatgtgattgctccccctaaatttcccagggccgctcctctgacctctaaaagttggatggaggacaatgcgttcagaaccgacaacggcaacaacctgcttcctttccaagaccgttcacgaccttatgacacatttaatctgcactcccttgaaaatagcctgatggatatgatcaggaccgatcacgagcccttgaaaggtaagcattatccaccctcagggccaccgatgagctttgcggatataatgtggcggaaccacttcgctggacgcatgggaattaatttccaccatcctggtaccgataacattatggcccttaataatgcatttctagatgattcacatggagaccaggccctgtcaagcggcctgagcagtccaacccggtgtcagaatggagaaagggtcgagagatattcacggaaggtttttgtcggaggactcccacctgatattgacgaagacgaaatcacggctagcttccgcagatttggtccgttagtggtagactggccacacaaagctgaaagcaaatcttacttccccccaaaaggctatgcctttctactgttccaggaggaatcctcagtccaggcactgattgacgcctgcctggaggaagatggcaaactgtatttgtgcgtgtcctccccaaccatcaaggacaaacccgttcagatccgcccttggaatctgagcgactcagactttgtaatggatggctcccagccgcttgaccctaggaaaacaatttttgtggggggagtcccacgtccacttcgcgctgtcgaactggcaatgattatggaccgattgtacggaggtgtttgctacgctgggatcgacaccgatccagaacttaaataccccaagggcgctggtcgtgttgctttcagcaaccagcagtcctacatagctgctattagtgcccgtttcgtgcagctgcagcacaacgatattgacaaacgtgtcgaagtaaaaccttatgtgttggacgatcagatgtgcgacgaatgtcagggcacgaggtgcggtggaaagtttgcgccttttttttgcgcaaacgtcacctgcctgcagtactactgtgagtattgttgggcttctatccactctcgggctggtagggagttccacaagcctctggtgaaggaaggcggagaccgaccaaggcacgtgcctttccgctggtcatag

SEQ ID NO: 220000 - DNA, 2055 bp, synthetic construct
  misc_feature 1..2055: note = Description of Artificial Sequence: Synthetic coding sequence
  source 1..2055: mol_type = other DNA
atgcaggatgaccttctcatggataaatctaagacccagccccagccacagcagcagcagagacaacagcagcagccgcagcccgaatccagtgtgagcgaggccccaagtactcctctgtcgtctgagacgccaaagcccgaggaaaactccgccgtgcccgctctcagccccgctgctgccccaccagcccctaatggccctgataaaatgcagatggaatcccctcttcttcctggtctgagttttcaccaacctccacagcagccaccaccgccacaggaacctgccgctccaggcgctagcctcagtccaagttttggctccacctggtccaccggcacaactaacgctgtggaggatagcttcttccaagggataaccccagtcaacggtacaatgctgtttcagaattttcctcatcacgttaaccccgtcttcgggggtacgtttagtcctcagataggtctagctcagacccagcaccatcagcaaccacccccacccgcacccgctcctcaacccgctcagccggcacaaccgcctcaggctcagccccctcagcagcgtagaagcccagcctctccatcccaagcaccatacgcccagaggtctgccgcagcagcttatggccaccagccgatcatgacctctaagccgtcaagcagtagcgcagtggccgcagccgcagcggctgccgctgcttcaagcgcctcctcttcttggaatactcatcagtctgttaatgccgcttggagcgccccatcaaatccttggggagggttacaggctggcagagatccccgacgggctgtgggcgtcggcgtgggggttggtgtgggcgtcccctctccactcaatcccattagcccgttgaaaaagcccttctccagcaatgtgatcgcgccaccaaagtttccgagggcagcgccactcacttcaaagtcttggatggaggataacgcctttcgaaccgataacggtaacaacctgctgcctttccaggataggtccaggccctacgacacgtttaacctacattctttagaaaattctctcatggacatgataagaacagatcatgagcctttgaaaggccgaatggggatcaattttcatcatcctggcacagataatataatggccctgaattcccgctccagcctctttccatttgaggatgcttttcttgacgacagccatggcgaccaggcactgagcagtgggctgtccagccccacacggtgtcaaaacggggagcgagttgagcgctactctaggaaggttttcgtggggggactgccccctgatatcgacgaggacgaaattaccgccagcttccggagattcggacccctggtagtggactggccccataaggcagagtctaagagctatttccctcccaaaggctatgcttttctgctcttccaggaggaaagctccgtgcaggctttgatagacgcatgtctggaggaggacggcaagctctatctttgcgtgtcctcccctactattaaggacaagcccgtgcagattcgcccttggaatctctccgactccgactttgtcatggatggctcacagcctctagacccgagaaaaaccatctttgtgggcggagtaccacggcctctccgcgctgtggaactcgccatgatcatggaccgtctctatgggggtgtctgctatgccggaatcgacacggatcctgaacttaagtacccaaagggagcaggacgagtggcattctctaatcagcaatcctatatcgccgcaataagcgcacgctttgtgcagttgcagcacaacgacatagacaaaagagttgaggtcaagccatacgtcctagacgaccaaatgtgcgacgagtgccaggggaccaggtgtggcggaaagtttgcaccttttttctgcgccaacgtgacttgcctgcagtactattgcgaatactgctgggccagtattcattcacgcgctggcagagaatttcataaacccctggtcaaagagggcggtgaccgacccaggcatgtaccctttcgttggagttag

SEQ ID NO: 220001 - DNA, 2055 bp, synthetic construct
  misc_feature 1..2055: note = Description of Artificial Sequence: Synthetic coding sequence
  source 1..2055: mol_type = other DNA
atgcaagatgatctgctaatggacaagagcaaaactcagccgcagccacagcagcagcaacgccagcagcagcaaccccagcctgagagttctgtcagcgaagccccatcaacccccctgagttccgaaactccaaaacctgaggaaaattccgccgtccccgcattgagtccagcagccgctcccccagctcctaacgggcctgataagatgcagatggagtcccccttgctccccggtctcagcttccatcagcctccacagcagccacccccaccccaggagcccgcagccccaggcgcttcactatccccatcattcggcagcacatggtccaccggtactaccaatgctgtggaagactccttcttccaaggcatcacaccagtgaatgggacgatgttatttcagaactttccacatcatgttaaccccgtattcggaggcactttttctcctcagattggtctcgctcaaactcagcaccaccagcagcctccccctccggcacccgcacctcagcccgcacagcccgctcagccgcctcaagcccagcctcctcaacagagacgttcccccgcaagcccctcgcaggctccctacgcacagcgatcggcagctgccgcttacggacaccagccaattatgacgtctaagccgtcctcctcatcggcggtcgccgctgctgccgcagcagcagcggctagttctgcctcttcctcttggaacacccaccagtccgttaacgcggcatggtccgccccatcaaacccctggggaggccttcaagccggacgggatccgaggagagcagtcggcgttggagttggggtgggggtgggtgtgccctccccacttaaccccatctcgcccttaaagaaaccatttagtagcaatgttattgccccaccaaagtttcccagagccgctcctctcacaagcaaatcttggatggaggacaacgcctttcgtaccgataatggcaacaatttgttgccttttcaggacaggtctcgcccatacgatacatttaacctgcattcactggagaactccctaatggatatgattaggaccgaccatgagcccctaaagggaaggatggggatcaattttcaccaccccggaacagacaatattatggcactcaattccagatcctcgctttttcccttcgaagacgcttttctggacgacagtcacggcgatcaagcactgtctagcggtctttcctcgcccacgcgctgtcagaatggggaaagggtggaacgctactctagaaaagtgtttgtgggtggcttacctcctgatatcgatgaggacgaaatcaccgcttcctttcgacgcttcggcccactcgtggtcgattggcctcacaaagccgagtcaaaaagctacttccctccaaaagggtacgcatttctgctcttccaagaggaatcctccgtccaggctctgatcgatgcatgcctggaggaggatgggaaactgtacctctgtgtgagcagccctacaattaaggataagccagtccagataagaccttggaacctgagcgattcagacttcgtgatggatggctcccagccacttgacccccgtaaaaccattttcgtcgggggagtgccccgtcctctgcgggctgtggagctggctatgattatggataggttatatgggggagtgtgctatgcaggcatcgacaccgaccctgagctcaaataccccaagggagccggtagggtggctttctccaaccagcaaagttacatcgccgcaatttccgcccgtttcgtgcagcttcagcacaatgatatcgataaacgggtggaggtgaaaccctatgtccttgacgatcagatgtgtgatgagtgtcagggaactaggtgtgggggtaagtttgcccctttcttctgtgctaatgtgacttgtctccaatattactgcgaatactgctgggcctcaatccatagccgagccggacgtgaatttcataaaccattggtgaaggaggggggagacagaccgagacacgtgccgtttagatggtcctag

SEQ ID NO: 220002 - DNA, 2190 bp, synthetic construct
  misc_feature 1..2190: note = Description of Artificial Sequence: Synthetic coding sequence
  source 1..2190: mol_type = other DNA
atgggagattacggattcggtgttttggtgcaaagcaacactgggaataaatcagcatttccagttcggtttcacccacacctccaaccgccacaccaccaccagaacgcaacacctagccccgcagcctttatcaacaacaataccgccgctaatggtagttcagcgggaagtgcctggttattcccggctcccgcaacgcataatattcaggacgagatccttggctccgagaaggccaagtcacagcagcaggagcagcaggatcccctggaaaaacagcaactctccccaagcccaggccaagaagctggtatcctgcctgagaccgagaaagctaagtctgaggaaaatcagggcgataattcgtccgagaatggaaacgggaaagaaaaaatccggatcgagagtccagtcctgaccggctttgattatcaggaggcaacgggcctgggtacttccactcaacctctcacgtcctctgccagctctctgacgggattctccaactggtcggcagctatagcaccgagcagttccacgattattaacgaggatgctagcttctttcaccagggcggagtgccagccgctagtgcaaacaatggtgctctattgttccaaaatttccctcatcatgtttccccaggattcgggggatcttttagccctcagattggaccactttcccaacatcatccgcaccacccacattttcagcatcaccactcccagcatcagcagcagaggcggtcacctgcctccccacatcctcccccatttacccatcgcaacgccgcattcaatcagctgccacacttagctaataacctgaataagccgccttctccatggagctcttatcaaagccccagtcctacaccaagcagcagctggtctccgggaggcggaggctacggcggatggggcggatcgcaaggtcgggatcatcgcagagggcttaatggtggaatcactcctttgaatagtattagccccttaaaaaaaaatttcgcctctaatcatatccagctgcagaaatatgcccgtccaagttctgccttcgcccctaaaagctggatggaagactcacttaaccgggcagacaacattttccccttcccagatcgccctaggacattcgatatgcactctctagaatccagcctcattgacatcatgcgggcagaaaatgacaccatcaagggaaggctaaattattcgtaccccggtagcgactcgtccctgctgatcaatgctcggacttacgggaggcgcagaggacagagtagtctgtttcctatggaagacggatttcttgacgatggtcggggagatcagcctctgcatagtggtttgggttctccccactgtttttctcaccagaacggggaaagagtggagcggtactcccgcaaagtgttcgtgggaggcctcccaccggacattgatgaagacgaaattactgcttctttccgacggttcggtcccttgatcgtggactggccccacaaagcagaatccaaaagttacttccctcccaaaggatacgcctttctactctttcaagatgaaagctctgtacaggccctcatcgacgcttgtatagaggaagacgggaaactttatctgtgcgtgagcagcccaaccattaaggacaagccagtccaaattcgtccctggaacctctccgattcggatttcgtaatggatggctcacagcccctcgatccccgaaaaacgatttttgtcggtggggtgccaaggccactgcgcgctgtggagctcgccatgattatggatcgactttacggcggtgtgtgctatgcaggcatcgacacagaccctgagctaaagtatcccaaaggggctgggcgagtggcttttagtaatcagcagagctacatcgccgctatttctgcccgtttcgttcagctccaacatggcgagatcgacaagagggtggaagtgaagccatatgtgctagacgaccagctgtgtgacgagtgtcagggcgctaggtgtggcggaaagtttgccccttttttctgcgcaaatgtgacctgtttacagtactactgcgagtactgttgggctgcgattcattctcgggctgggagggaattccacaagcctctagtaaaagagggaggagaccggcctcgccacatctcattcagatggaattag

SEQ ID NO: 220003 - DNA, 2139 bp, synthetic construct
  misc_feature 1..2139: note = Description of Artificial Sequence: Synthetic coding sequence
  source 1..2139: mol_type = other DNA
atgggggactatgggttcggtgtgctggtacagagtaataccgggaacaaatctgccttcccggtgcgattccatccacaccttcagcctccccatcatcatcagaatgctacccctagccctgcagcttttataaataataacaccgcagctaatggtagcagcgccggatccgcatggctattccctgctcccgctacacacaatattcaggatgaaatactgggcagtgagaaggctaagagccagcaacaggagcagcaggatcctctggaaaagcagcagttatccccatcccctggccaagaggcagggatacttccagagactgaaaaagctaaaagcgaggagaatcagggcgacaactcttcagagaatggcaatggtaaagaaaagatacggattgagagccctgtattgacaggcttcgactaccaggaagccacagggctcggcactagcacacaaccgctaacctcgtctgcatcgtccctgaccggtttcagcaactggagcgctgcgatcgctccttcatcctccactataattaacgaagacgcttcatttttccaccagggcggagtccccgcagcaagcgcaaataatggggctttactgtttcaaaacttcccccatcacgtcagccctggctttggaggatctttttcccctcagattggtcccctcagccagcatcatccccatcatcctcattttcagcatcaccactcgcaacatcagcagcaaaggcggagtccagccagcccgcaccctccgccattcacacaccggaacgccgctttcaaccagctgcctcatttggccaacaacttaaacaaacctccttccccctggagtagttaccagagtcccagccctactccgagctcaagttggagtccgggtggcggtgggtacggaggttggggaggaagccagggccgtgaccatcgcagaggcctcaacggtgggatcactcccctaaattccatatccccgctgaagaagaactttgcctccaaccatatccaactacagaaatacgccaggccaagctctgccttcgcaccaaaaagctggatggaagactctctaaacagggctgataacatctttcctttcccggacagacctcgcaccttcgacatgcacagcttagaatcgtcgctcattgacattatgcgtgctgagaatgacaccatcaaggcaaggacctacggtagacgaagggggcagtctagtctgtttcccatggaggacgggttcctagatgatgggagaggggatcagcctctacattctggattgggtagcccgcactgcttctcacaccagaatggagagcgggttgaaaggtactcaagaaaagtgtttgtcggaggtctcccacccgacatcgacgaagacgagatcaccgcttccttccgtcgctttggtcccctgattgtggattggccgcataaggcagagtctaagagctactttcctccgaaagggtacgcttttctcttattccaggacgagtccagcgtgcaggcgctgatcgatgcttgcatcgaggaagacgggaagctgtatctctgtgtaagcagtccaactataaaagacaaacctgtgcagattcgaccctggaatctaagcgatagtgatttcgtcatggacggcagtcagcccctagaccccagaaaaaccatttttgtgggaggagtcccgcgtcccctcagggcagtggaactggctatgattatggaccggctgtatggaggcgtctgctacgccggaatcgatactgatcccgagctgaagtacccaaagggcgcaggcagagtggccttctccaaccagcagtcctacatcgccgcaatctcagccaggttcgtgcagttgcagcacggcgaaatagacaaacgggtcgaagtcaaaccctatgtacttgatgatcaactgtgcgatgagtgtcaaggggctaggtgtggaggtaagtttgctccatttttttgcgcgaacgtgacctgtctgcagtactattgtgagtactgctgggccgcaatccactctcgggctggtagggaatttcataagccactggttaaggaaggaggggatcgaccccgacatatttcattcaggtggaattag

SEQ ID NO: 220004 - DNA, 2049 bp, synthetic construct
  misc_feature 1..2049: note = Description of Artificial Sequence: Synthetic coding sequence
  source 1..2049: mol_type = other DNA
atgtccacccccgctgtccctcaggatctgcagcttcccccatcacagagagctcagtctgccttcaaggagcagcgcaggcagaagctgaaggaacatctacttagaagaaagactctgtttgcctacaaacaggaaaatgaaatgttgtcatcaagggaccagcgcgtcgttactagcgaagatcaggtgcaggagggcactaaagtcctgaagctgaaaacaaagatggcagataaagaaaatatgaagagaccagccgagtctaaaaacaataccgtcgtgggcaagcactgcatccctctgaagccatctaacgagctcaccaattccaccgtcgttattgatacccataagccaaaagattctaaccaaactccccatttattgttgaccgaagacgatccccagtcccagcatatgactctgtcacaggccttccacttaaaaaacaacagtaaaaagaaacagatgaccactgaaaaacaaaagcaggatgctaacatgccgaagaagccggttctgggaagctatcgtggccaaatcgtccaatccaagattaacagtttccgcaagcccctgcaagtgaaggatgagagttcggcagcaacgaagaaactgtccgcgactatccccaaggccactaagccgcagccagtgaatactagctccgttactgttaagtctaataggtcctccaacatgaccgcaacaacaaaattcgtctccaccacctctcagaacacacagctcgtgcgtccgcctatacgcagccatcacagcaacacccgagatacagtcaagcagggcatctctcgcacttctgccaatgtgaccatccgtaaagggcctcatgagaaagagctgctgcagtcaaagaccgctctgagttctgtaaaaacctcgtctagccagggcataatccgcaataagactctgagtcggagtatcgctagcgaggtgattgccaggcctgccagtctctctaatgataagctgatggaaaaatcagaacctgtcgatcagcgtaggcacacggctggtaaagcaatcgtcgactcccggtctgcccagcccaaagagaccagtgaagagcgaaaggccaggttgtccgagtggaaggctggaaaaggccgagttctcaaaaggccaccaaactctgttgttacacagcatgaacccgctgggcagaatgagaagccagtgggtagcttctggaccacgatggccgaggaagatgaacagcgcctctttactgaaaaggttaacaacaccttctctgaatgtcttaatcttatcaacgagggctgcccaaaggaagatattctagtcaccctcaatgatctcattaaaaatatccccgacgcgaaaaagctggtaaagtattggatctgtcttgcccttatcgaacctattacttcccctatcgagaacattattgccatttatgaaaaggccattctggcaggagctcagcctattgaagagatgaggcacacaattgtggatattctcacaatgaaaagccaggagaaagccaacttaggcgagaacatggagaaaagttgtgcttccaaagaggaggtgaaagaagtgagcatcgaggataccggcgtcgatgtcgaccccgagaaactggaaatggagtccaaactgcatcgcaacctgttgtttcaagattgtgaaaaggaacaggataacaagacaaaagatcccactcacgatgtgaagaccccaaatactgagaccagaacaagttgtctcatcaagtacaatgtgagcacaactccttacttgcagtccgtgaaaaaaaaagttcagtttgatggaacgaatagcgcgttcaaagaactgaagttcctgactccagtgcgcaggtcccggagattacaagaaaagaccagtaaattgccagacatgcttaaggatcattacccttgcgtaagtagtctggaacaacttacggagttgggtcgggaaaccgacgcctttgtgtgtcgtcccaacgcggcactttgtcgggtgtactatgaggccgacacaacctag

SEQ ID NO: 220005 - DNA, 1485 bp, synthetic construct
  misc_feature 1..1485: note = Description of Artificial Sequence: Synthetic coding sequence
  source 1..1485: mol_type = other DNA
atgtccactcccgctgtgccacaggatcttcagctcccaccttcccaacgggcacagtccgccttcaaagaacagcgtagacagaaattgaaggaacacctcctgcggcgtaagacactttttgcctacaagcaggagaatgaaatgctcagcagtcgagatcagagagtggttacctctgaggaccaggtccaggaggggaccaaggttttgaagctgaagaccaagatggccgataaagagaatatgaaacgcccagccgagagcaagaataatacggtggttggcaaacactgcatacccttgaaaccatcaaatgagctcaccaatagcacagtcgtcatagacacccacaaaccaaaggactccaatcagactccccaccttctactgacggaggacgacccccagtcacagcacatgactctcagccaggcctttcatttgaaaaacaacagtaagaaaaaacaaatgacaacagagaagcagaagcaggatgcgaacatgcccaaaaaacctgtcctcggatcataccgcggacagatagtacagtccaagattaatagttttcgcaaacctcttcaggtgaaggacgagtcatctgccgctacaaaaaaactctccgccactatcccaaaagccaccaagccacaacctgttaacacatctagcgtaactgttaagtccaataggtcaagtaatatgaccgctacaactaaattcgtgtctactacatctcagaacactcagctggtgaggcctcctattcgatctcaccactccaacactagagacactgtcaagcaagggatctccagaacatccgcgaatgtgactatcaggaaaggccctcacgaaaaagagctcctccagagcaaaacagccttgagcagtgtcaaaacttctagctcacaggggattatcaggaataaaaccctatcaagaagtattgcttccgaggttatcgctcgccctgccagcctgtccaacgacaagttaatggagaagtccgagccagttgaccagagaaggcacaccgctggaaaggcaatcgtggattctcggtcagctcagcctaaagaaactagtgaagaacgaaaagcccgactatcagaatggaaggcaggaaaggggagggttctgaaacggcctccaaatagcgtggtcacacagcacgagccagctggacagaacgagaagccggttgggagcttctggaccactatggccgaggaagatgaacagagattattcaccgaaaaagtgaacaacactttctctgaatgtctgaatctcattaacgagggctgtccgaaggaggatatcctggtgacactgaacgatctgatcaagaacatcccagacgcaaaaaagttggtgaaatactggatctgcctcgccctaatcgaaccaatcacaagtccaatcgaaaacattattgcaatatacgaaaaagccatcctcgctggggcacaagtaaggtag

SEQ ID NO: 220006 - DNA, 2052 bp, synthetic construct
  misc_feature 1..2052: note = Description of Artificial Sequence: Synthetic coding sequence
  source 1..2052: mol_type = other DNA
atgagcacgccagcggttccacaggaccttcaactccccccatcacagcgcgcacaatctgcttttaaagagcagcggagacaaaagctgaaggaacatctgctgaggaggaaaacgcttttcgcgtacaagcaggaaaatgagatgttgagctcttcccgagaccagagggtcgtgacctctgaggaccaggttcaggaaggaaccaaggtgctgaaacttaaaaccaaaatggctgacaaagaaaacatgaagaggccggcagaatcaaagaacaacaccgtcgtcggaaagcactgcattccacttaaaccatccaatgaactcactaactctactgtagttatcgacactcataagccaaaggattccaaccaaactcctcacttgttgttgaccgaggacgaccctcaatcccaacatatgaccctctcccaggcatttcaccttaagaacaactccaaaaagaagcagatgacgaccgaaaagcaaaagcaggatgcaaacatgccaaagaaaccagtgctaggatcatacagaggccaaattgtgcagagtaagatcaactcctttcggaagccgctgcaggttaaggacgaatccagtgcagcaacaaagaaactgagtgcaaccattccaaaggctacgaagccacaaccagtgaacaccagctccgtaaccgtcaaaagcaataggtcatcaaacatgacagccactaccaagttcgttagtacaacaagtcaaaacacacagctcgtcaggcctccaattaggtcacaccactcaaacacacgggacaccgtaaagcaaggtattagcaggacgtccgcgaacgtcaccattcggaagggccctcacgagaaagaactgctgcaatcaaagaccgcattaagttcagtgaagactagcagcagtcaggggataattaggaacaaaacactctcccgctctatcgcctcagaggtcatcgcgagaccagctagcctaagcaacgataagctgatggaaaagagtgaacccgtcgatcagcggcgacatacagcaggaaaagccatagttgacagcaggtctgcccagcctaaagaaacttctgaagaaaggaaggctagactctccgagtggaaagctggcaaaggacgggtgctgaagcgccctcctaattcagtagttacccagcatgagcctgcagggcagaatgagaaaccagttggaagcttttggaccacaatggccgaagaggacgaacagcgccttttcacagagaaggtcaacaatacattttctgagtgcttgaacctgataaacgagggatgcccaaaagaggatatcctggtgacccttaatgatttgattaaaaacatccccgatgcaaaaaaactggtgaagtactggatctgccttgctcttatcgaacccataacgagccccattgagaatattattgccatttacgaaaaagcgatcctggcaggagcccagccaatcgaagaaatgcgccacacaatagttgatatcttaacaatgaaatcacaagagaaggccaatctgggcgagaacatggaaaagagttgcgcttccaaagaggaagtgaaggaggtgtcaatcgaagacacaggtgtggatgttgatccagagaaactagagatggaatccaagctgcacagaaaccttctgttccaggattgtgagaaggagcaggacaacaaaactaaggaccctacacacgacgtcaagacccctaacacggagaccaggacatcctgcctgattaagtataatgtatctaccaccccatatctccagtcagtgaaaaaaaaagtccagttcgacggcacaaattctgcttttaaagagctgaaatttcttacacctgtcaggagaagccgaagattgcaggaaaaaacttcgaagctaccagatatgctcaaggaccactatccatgcgtgtcctcgctcgagcagcttactgaattagggcgtgagacggacgcatttgtgtgcagacccaatgctgccttgtgtagggtctactacgaggcagacactacgtag

SEQ ID NO: 220007 - DNA, 1488 bp, synthetic construct
  misc_feature 1..1488: note = Description of Artificial Sequence: Synthetic coding sequence
  source 1..1488: mol_type = other DNA
atgtcaaccccagccgtgccgcaagaccttcagcttcccccttcccagcgagcacaaagtgcgttcaaggagcagcggaggcagaaactcaaagaacacctgcttagaagaaagaccctctttgcctacaaacaggaaaatgagatgctgagcagttccagggatcagcgtgtggtcacgtccgaggaccaagtccaggagggaaccaaagtccttaagctgaaaaccaagatggccgataaagaaaacatgaagcgacctgcagagtctaagaacaacaccgtggtgggtaaacactgtatccctctcaagccgtccaacgaactgactaattctacagtagtgattgatactcacaagcctaaggatagcaaccagaccccccacctgcttctgactgaggatgacccacagagccagcacatgactcttagtcaagcctttcatttgaagaataacagcaagaagaagcaaatgaccactgagaagcaaaagcaggacgccaacatgcctaaaaaacccgtgctcggcagctaccggggtcagatcgtacagtccaaaattaactcctttcgcaagcccttacaggtgaaagacgagtcttctgctgctaccaaaaaactctcagccacaattcctaaggctaccaagccacagcccgtaaatacctcctctgttacagttaagagcaatcgttccagcaacatgactgccacaacaaagtttgtctccacaaccagccagaacacccagctggtaaggccaccaattcggagccaccacagcaatacgagagataccgtcaaacaaggtatcagccgaactagcgcaaatgtcaccattaggaagggtccccacgagaaggagttactgcagtccaagactgcattatcatcagtaaagacatccagcagccagggcattatcagaaataagacactgagccgctccatcgcatctgaggttattgcacgcccagcttccttgtccaacgataagctgatggagaaatcagagcccgtggaccagagacgtcatacggcaggtaaagcaatcgttgattcccgcagtgctcagcctaaggaaaccagtgaggaaagaaaagccagactgtctgagtggaaagccggtaagggaagagtactcaagcgtccacccaatagcgtcgttacccagcatgagcctgccggtcagaacgaaaaacccgtcggctcattttggacgacaatggcagaagaagacgagcagcggctattcacggaaaaagttaataacacatttagtgagtgtctgaacctgattaatgaaggctgcccaaaagaggacatcctggtgaccctgaacgatctcatcaagaacatacccgacgcgaaaaagctggtcaaatactggatttgtctggcactcatcgagccaataacttctcccattgaaaatatcattgcaatctatgagaaagcaattctagctggcgctcagcatatctag

SEQ ID NO: 220008 - DNA, 5919 bp, synthetic construct
  misc_feature 1..5919: note = Description of Artificial Sequence: Synthetic coding sequence
  source 1..5919: mol_type = other DNA
atgggtgatgattcagagtggcttaaacttcccgtggaccaaaagtgtgagcataaactgtggaaggccaggctttccggatacgaggaggccctgaaaatatttcagaaaattaaagatgagaagtcccccgagtggtccaaattcctggggctaatcaaaaaatttgtgacggactccaatgctgtggtacagcttaagggcctggaggccgctctggtttacgtcgagaacgcacacgtggcaggaaaaacaaccggtgaggttgtgtctggtgtcgtgtcgaaggtgttcaaccaaccaaaagcgaaagctaaggagctgggaatagagatttgtctaatgtatatcgaaatagaaaaaggggaggcagttcaggaagaattactcaaaggactcgataataagaacccaaagataatcgtcgcctgcattgaaaccctgcgaaaagccctgagcgagtttggaagcaagatcattcttctcaagcctatcatcaaagtcctcccaaagctctttgagtcacgcgaaaaagccgtgagagacgaggctaagctcatcgccgtggaaatctacagatggatcagagacgcactaaggcccccactgcaaaacataaacagcgtacaactgaaagaattggaggaagaatgggtaaagcttcctacttcagcacctcggcctacacgatttctacggagccagcaggagttggaagccaaattggaacagcaacagtccgctgggggtgatgctgaaggcggaggggatgacggagacgaggtgccccaaatcgacgcgtatgaactgcttgaagcggtcgaaatactgagcaaattaccaaaggatttttacgacaaaatagaagccaaaaaatggcaagagagaaaagaggcactcgagagcgttgaggtgctgattaagaatccaaagttggaagccggagattacgccgacctggttaaggcactgaaaaaagttgtggggaaggataccaacgttatgctggtggcgctcgcggcaaagtgtctgacagggttggccgttggccttcgcaagaaattcggacagtacgcaggacacgtggtcccaactattctggagaagtttaaggaaaagaagcctcaggtggtgcaagcactccaggaggctatcgacgcaattttcctgactacaaccttacagaacatctcagaggatgtacttgctgtgatggacaataaaaacccaacgatcaaacagcagacctccttattcatcgcgaggtcgtttagacactgcaccgcttctaccctgccaaagagcctccttaaacctttctgtgccgcactactaaaacacattaacgatagcgcccctgaagtgagagatgcggcattcgaggcattgggcacagctctgaaagtggtcggtgaaaaggctgttaacccctttttagccgacgtcgataagcttaagctcgataagatcaaagagtgttccgaaaaagtggagctgattcacggcaaaaaggcagggttggccgctgataagaaagagttcaagcccctccccggacggactgctgctagcggcgctgccggagataaggataccaaggatatcagtgctccgaaaccaggtccgctgaaaaaagctcctgctgctaaagcaggagggcctcccaagaagggcaagccagcggcaccaggcggagccggaaacactgggacaaagaacaagaagggcctcgagactaaggaaatcgtcgaacccgagctttcaatcgaagtttgcgaagagaaagctagtgcagtgctgccacctacgtgtatacaattactcgatagtagcaactggaaagagcgactggcttgcatggaggaattccagaaggcagttgaactgatggaccgcacagaaatgccctgtcaggccctggttcggatgctagccaagaagccaggatggaaagaaaccaactttcaggtcatgcagatgaagctccacatcgtcgccctgatcgcccagaaaggcaatttcagcaagactagcgcgcaggtggtcctcgatggactggtcgataagataggggacgtgaagtgcggcaacaatgccaaagaagccatgactgccatcgctgaggcatgtatgcttccctggactgctgagcaggtcgtcagtatggctttctcccaaaagaatcctaaaaaccagtccgagacactgaactggctgagtaacgccatcaaggagtttgggttcagcggactgaatgtaaaggcctttatcagcaatgtgaaaacagctctggcggcaacgaacccagccgtacggaccgcagccatcaccctcttaggggtcatgtacttatacgtcggcccatccctgagaatgttctttgaggacgaaaagccggctctgttgtcacagatcgacgctgaatttgaaaaaatgcaggggcagagtccaccggctcccaccaggggtatatctaagcatagcacgtccgggacggatgaaggcgaagacggcgatgagcctgacgatggctccaatgacgtcgtagatctgctcccaaggactgagatctccgacaaaataacaagcgaattggtgagcaagatcggggataaaaactggaaaatccgaaaggagggcttagacgaggtcgccggtattattaatgacgccaagtttattcagcccaatatcggggaactgcccacagctcttaagggccgactgaacgattccaataagattctggtccagcagactcttaacatacttcagcagttagcggtcgctatgggaccaaacattaagcagcacgtgaaaaatctcggcatacccatcataaccgtgctgggtgactccaaaaataatgtgcgtgccgctgccctcgctaccgtcaacgcttgggccgaacagacgggaatgaaggaatggctggaaggcgaagatctgtctgaagagctaaagaaagagaatccttttctccggcaggaactattgggttggcttgccgagaagttgccaaccctacgaagcactccaaccgacctgatcctgtgcgtgccccatctatattcttgcttggaggaccgcaacggagacgtccgtaaaaaggcacaggacgcactcccattctttatgatgcacctcgggtacgagaaaatggccaaagccacagggaagcttaagcctacttctaaagaccaggtcctggccatgcttgagaaagcaaaggtgaatatgcctgcgaagccagctcccccaacgaaggcaacttccaagccgatgggtgggagtgcccctgccaaatttcagcctgccagcgcccctgctgaggattgcatttcgtcatccacagaacccaagccagaccctaagaaggccaaagcacccggattatcaagtaaggctaaatccgctcagggcaaaaaaatgccctccaagacttctctcaaggaagacgaagacaagtccggcccaatctttattgtggtccctaatgggaaggaacagcggatgaaggatgagaaagggttgaaagtgctgaaatggaactttaccacgccacgagatgaatatatcgagcagctgaaaacccagatgtccagttgtgtagccaaatggctgcaggacgaaatgttccattctgactttcagcatcacaataaggctcttgcagtcatggtagatcacctggagtccgaaaaagaaggcgttatcgggtgcctcgaccttattctgaaatggctcaccttgaggtttttcgacacaaacactagtgtgcttatgaaagccctagaatacttgaagttgttgtttactttgttgtccgaagaggagtatcatcttaccgagaatgaagcttcctcttttatcccctatttggtggtgaaagttggagaaccgaaagacgtgattaggaaggatgttagggccatccttaacaggatgtgtctggtctaccccgcttccaaaatgttcccttttattatggagggcaccaagagtaaaaattctaagcagcgcgctgagtgtctcgaagaattggggtgcttggtggagagctatggcatgaatgtgtgtcaacccacgcccggaaaggcgctaaaggaaatcgcagttcacataggcgatcgggacaacgctgttcgtaacgctgccctgaataccattgtgacagtgtacaacgtgcacggggatcaggtgttcaagctcatcggcaacctatcagagaaagatatgtctatgctagaagagaggatcaaacgcagtgctaaacgtcctagcgctgcacctatcaaacaggtagaagaaaagccgcagagggcccaaaacattagtagtaacgccaacatgcttaggaagggtcccgcagaggacatgagcagcaaactgaaccaggctaggtctatgagcgggcaccctgaggctgcccagatggtacgtcgagaattccagctcgacctggacgaaatagaaaatgacaacgggacagtacgatgcgagatgccagagttggttcagcataagctcgatgacattttcgagcccgtcctgatacctgagcccaagatccgcgctgtatctccacattttgacgatatgcacagcaacacagcgagcaccataaacttcattatttcacaggtggccagcggggatattaacacctccattcaggctctgacacagctctttcagattgaatctctggctagggaagcgagtaccggcgtgttgaaagacctcatgcatggcttaatcaccctaatgctggattcacgcatagaggatctcgaggagggccagcaggtgattagatccgtcaacttgctggtcgtgaaagtgctggaaaaatcagatcagactaatatactgagcgctctgctggtgcttctgcaggacagcctgctggccacagccagttcccctaagttttcagaacttgtaatgaagtgtctgtggcgaatggttcgcctgctgcccgatactattaactccatcaatctggaccggatactcctggacatccatatttttatgaaggttttccctaaggagaaacttaagcagtgcaagtcagagtttccaatcagaaccctgaagacactactgcatactctctgcaagttaaaagggcctaagattctggatcaccttactatgattgataacaagaacgaatcagagctggaagctcacctgtgtagaatgatgaaacacagcatggaccaaaccggtagcaagagcgacaaggaaactgaaaaaggagcctctaggatcgatgaaaaatctagtaaggctaaagtgaatgatttcctggccgaaatcttcaagaagatcggctctaaagagaacacaaaagaaggcctggccgagctgtatgagtacaagaagaagtacagcgacgctgatatcgagcctttcctcaagaactccagtcagttttttcagtcttatgtggagcgcggtctccgcgttatcgagatggagcgggaaggcaagggcaggatctccacatccaccgggatcagtccacagatggaggtgacgtgcgtcccaacgcccactagcaccgtgtcgtctatcggcaataccaacggggaagaggtaggtccttctgtctacctggagcgattgaagattctcagacaaagatgtggtctagataacacaaaacaagatgatcgcccacccttgacttccttattaagcaaacctgctgtccctactgtggcgagttccacggatatgctgcactcaaagctctcccagctgagggagtcacgcgaacagcaccagcactccgacctcgacagcaaccagacccacagcagcgggaccgtgacatcctctagcagcacagcaaatattgacgatctgaagaaacggctggagaggatcaaatccagcaggaaatac

SEQ ID NO: 220009 - DNA, 5918 bp, synthetic construct
  misc_feature 1..5918: note = Description of Artificial Sequence: Synthetic coding sequence
  source 1..5918: mol_type = other DNA
atgggtgatgattcggagtggctaaaactccccgtggatcagaagtgtgagcataagctgtggaaggcccgtctgagcggatacgaagaggctctaaaaattttccagaagattaaagacgaaaaatccccagagtggagtaaatttctgggcttgatcaaaaagtttgtcaccgacagtaacgcggtggttcagctgaaaggattggaagcagcactcgtttatgtggaaaacgctcacgtggccggtaaaaccaccggcgaggtggtctctggggtggtgtctaaggtgtttaatcagccaaaagctaaagccaaggagttgggaattgaaatttgtctgatgtatatcgagattgagaagggggaagctgtgcaggaagaattgctgaagggtctggacaacaaaaaccctaaaattatcgttgcttgcatcgagacactgaggaaggctttaagcgagttcggatctaagattatactgctgaaacccattattaaggtgctgccaaagctgtttgagagtcgagagaaggcagtgcgcgacgaggccaagcttatcgccgttgagatctaccgctggattcgtgacgccttacggccacccctgcaaaatataaacagtgtgcagcttaaagagctggaggaggagtgggtgaagctgcccacaagtgcacctcgccctacgagatttctgcgctcccaacaggaactggaggctaaattagaacagcagcaatccgccggaggcgatgctgaagggggtggtgacgacggtgacgaggtgccccagatagatgcttatgaactgcttgaggctgtggagattctctcaaaattaccaaaggacttctatgataagatcgaggcaaaaaaatggcaggagcgtaaggaggccctggagtccgtcgaggtcttaatcaagaatcccaagttggaggcaggagattatgcagacctggtgaaggccctgaaaaaagtcgtcgggaaggatacaaatgtaatgctggtggccctggctgctaaatgcctgaccgggctggccgtgggcctccgtaagaaatttgggcagtacgcaggccatgtcgtgcccacaatcctggaaaagttcaaggaaaaaaaacctcaggtggtccaagcgctacaggaagctattgatgcgatatttctgacaacgacgctccaaaacatctcagaggacgtcttagcggtcatggacaataaaaatcccactattaaacagcaaacgagtttattcatagcacgatctttccgacactgtaccgcgagtaccctgcccaagagcctgctgaagcctttttgcgctgcattgctcaaacacattaacgactcggctccggaagttagggatgccgcattcgaggctctgggcacagccctgaaagttgtcggggaaaaggccgttaatcctttcttagctgacgtggataaactgaaactcgacaagataaaggaatgttccgagaaggtggaattgattcacggtaaaaaggcaggattggcagccgacaaaaaggaatttaagccactccctgggaggactgccgctagcggcgcagctggggataaagataccaaagacatttcagcgcctaaacctgggccactaaagaaagcaccagccgcaaaggcagggggtcctccaaaaaaggggaaaccagccgcaccgggaggcgctggcaacacaggtacgaaaaacaaaaagggactggagaccaaagaaatcgtggaacctgagctgtctattgaggtctgtgaggagaaagcctccgctgtgctccctcccacttgcattcagctgctagactcctcaaactggaaggagagattggcctgtatggaggaatttcaaaaggcagtcgaactcatggatagaaccgagatgccctgccaagcactggtgcggatgctggccaaaaagcctggatggaaggaaacaaatttccaagtaatgcagatgaaactgcatatagtcgctttgatagcacaaaaaggcaattttagtaaaacatctgctcaagtggtgctggacggactggtagataagataggtgatgtgaagtgtggcaataatgcaaaggaagctatgacagctatcgctgaggcttgtatgctgccctggacagcggagcaggtggtctctatggctttttcccagaaaaatccaaagaaccagtctgaaactctcaactggctgtcaaatgccatcaaagagttcggatttagtgggctaaacgttaaggcgttcatttcaaatgtgaaaactgcgctcgcggcaaccaatcctgcagtgcggacagcggctataaccctcttaggggtcatgtatctttatgttggccctagtctcaggatgttttttgaggatgagaaacctgcgcttctgagccagattgatgccgaatttgaaaaaatgcaaggccagtcccccccagcacccacccgcggaatatctaaacacagcacttccggtaccgacgaaggggaagatggcgacgagccggatgatgggtctaacgatgtagtggacctgctgccgcgtacagagatcagtgataaaattaccagtgagctcgtgtcaaagatcggcgacaagaattggaagatcaggaaagagggcttggacgaggtcgcaggcatcatcaatgatgcaaagttcattcagcctaatattggcgaactgccaactgccttgaaggggaggttgaacgacagcaacaagatcctggttcagcagaccctcaatattctgcaacaactggccgtggcgatgggaccaaatattaagcaacacgtgaaaaatcttggcattccaataatcacagtgcttggtgattcaaagaataacgttcgagccgcagccttagcaacagtgaatgcctgggcagagcagactgggatgaaggagtggctggaaggagaagacctcagcgaagaactgaaaaaggagaaccccttcttgcgccaggagctcttgggatggctggctgagaagctgcccacgttaaggtctacgcctactgatcttatcctgtgcgtcccccacctttactcttgccttgaggataggaatggagacgtgcgaaaaaaggcgcaggacgccctgccattctttatgatgcacctgggctacgagaagatggccaaagcaaccggaaagctaaaaccaacgtctaaggaccaggttctggcaatgctagagaaagcaaaagtcaatatgcccgctaaacctgcacctccaaccaaggccacttccaaacccatgggcggtagtgcacctgccaaatttcagcctgctagtgcacccgcagaggattgtattagttcgtccaccgaacctaagcctgacccgaaaaaggcgaaggcacctggcttgagctccaaggctaaatccgctcaggggaagaagatgccatctaagacttcacttaaggaagatgaggacaagtccgggcctattttcattgttgtgcccaacggaaaagagcagcggatgaaagatgaaaaagggctgaaggtgttgaagtggaatttcactacgcctagggatgagtacatcgagcagctcaagactcagatgagtagctgcgtagcaaaatggctgcaggatgaaatgtttcacagtgacttccaacaccacaacaaggctctcgccgtaatggtggatcacttggaatctgagaaagagggcgtgattgggtgtctcgatttgatcctcaaatggttgactctccgtttctttgacacaaacacctcagttttgatgaaagctttggagtacctcaagctgttattcaccctgctttccgaggaggaatatcatctcaccgagaacgaagcctcgagttttatcccctacctcgtcgtgaaagtaggtgagcctaaagacgttatcaggaaggacgtgagggccattttgaataggatgtgtcttgtgtaccctgcatcaaaaatgtttcctttcattatggaagggactaaaagcaagaactccaagcagcgcgctgaatgcttggaggaattggggtgtctggtcgaaagctatgggatgaacgtgtgtcaaccgacacctggaaaagccctgaaggaaattgccgttcacatcggcgacagagataatgccgtccgtaacgccgcacttaatacaatcgtgaccgtttacaacgttcatggcgatcaggtcttcaagctgataggcaacttatcagagaaagacatgtcaatgctcgaagagcgcattaagcgctctgccaaacgaccatccgccgcaccaatcaagcaggtggaagaaaagcctcagcgagcccagaacattagcagcaacgccaatatgctgagaaagggtccggctgaggacatgtctagcaaacttaaccaagccaggtccatgtctggccaccctgaggccgctcagatggtacgacgcgagttccagctggacctggacgagatcgagaatgacaacggaactgtccgttgtgagatgcccgaactggtgcaacacaagctggacgatattttcgagccagtgctcatacccgagcctaaaattagagccgtctctccacattttgatgatatgcacagcaataccgcttctacaattaactttataatcagccaagtcgctagcggcgatattaacactagcatccaggctttgacccagctcttccaaatcgaatctctcgctcgcgaagcctcaactggcgtgttaaaagatctaatgcacggtctgataactcttatgctggatagccggattgaggatctggaggagggacagcaagttatcagaagcgtgaaccttcttgtggtgaaggtgctcgaaaagtccgaccagaccaacatactctctgctctcctcgtattgttacaggattctctgctagctacagcctctagccccaagttctcagagctggttatgaaatgtctgtggcgcatggtgagacttctgcctgacacaatcaattccatcaatctggaccgtattctgttggacattcacatctttatgaaagtgttccctaaagagaagcttaagcagtgcaagtcagaattccctatcagaactctcaagaccttgctccataccctttgcaagctgaaaggtccgaaaatattagaccatctcacaatgatcgataataagaacgagagcgaacttgaggcacacctgtgtcgcatgatgaaacattccatggaccagaccggatctaaatcggataaagagaccgaaaaaggtgcaagccgcatcgatgagaagagctctaaagccaaggtcaatgacttcctggcagagatctttaaaaagatcggcagcaaggagaatacgaaagagggtctggccgagctatacgaatacaaaaaaaagtactctgacgctgacattgagccattcttaaaaaattcctcgcaattctttcaatcctacgtagagcggggtctgcgggtaatcgagatggagagggaaggaaaggggaggatcagcacttcaacgggcatttccccccagatggaagtgacatgtgtgcctaccccgaccagcacagtgagcagcatcgggaacaccaatggcgaagaggtgggcccttcggtgtatctagagcgacttaaaatacttcggcagcgctgtggtctcgacaatacaaaacaggacgacaggccacccctcacgagcctgctctcaaagcctgccgtccccactgtggcaagttctacagatatgctacattcaaaactgagccagctgagggaatcccgcgaacagcatcaacactccgacctggatagcaaccagactcactcatcaggcacagtcacttctagctcaagtactgcaaacattgacgacctcaagaagagactggagcgaataaagtccagcagaaagta

SEQ ID NO: 220010 - DNA, 906 bp, synthetic construct
  misc_feature 1..906: note = Description of Artificial Sequence: Synthetic coding sequence
  source 1..906: mol_type = other DNA
atgggggatgactcggagtggctaaaactgcctgtagaccagaagtgcgagcataagttgtggaaagcgaggctctccgggtacgaggaggctcttaagatctttcagaagataaaggacgagaaatctcccgagtggagtaaatttctcggccttatcaagaaattcgttaccgatagcaatgctgttgtacagttaaaaggactggaggcggctcttgtgtatgtcgaaaacgctcacgtggcaggtaaaactacaggcgaggttgttagtggcgtggtgagtaaggtcttcaatcagccaaaggccaaggcgaaggagctgggcatcgaaatttgcctgatgtatattgagatagagaaaggcgaagcagtgcaggaagagttactgaaaggtcttgacaataagaatccaaagattattgtagcgtgcattgaaacattaaggaaggcacttagtgagtttggctctaaaatcatcctgcttaagcctatcataaaggtactcccaaagttattcgagagtcgcgagaaggcagtgagggacgaggcaaagctgatcgctgtggagatctaccggtggatacgggacgccctgagaccgcctcttcaaaacataaactcagtgcagctgaaggagctggaagaagagtgggtcaaactgcctactagcgcccctagacctacaagatttctcaggagccagcaggagctggaggccaagctggagcaacagcagtccgctggaggagatgccgaggggggaggggacgacggtgatgaggtgccacagatagatgcttacgagctgctcgaggctgtagaaatcctttccaagccaaaaactttcatgaccaagttgcggcagaagaacggaaagcgtgaaaaaaggccatggagtctctag

SEQ ID NO: 220011 - DNA, 6119 bp, synthetic construct
  misc_feature 1..6119: note = Description of Artificial Sequence: Synthetic coding sequence
  source 1..6119: mol_type = other DNA
atgggcgacgacagcgagtggctcaagctcccggttgatcagaagtgtgagcacaaactgtggaaggctcgcctcagtggctacgaggaggctctgaagatctttcagaaaattaaagatgaaaagtctcctgagtggagcaaattccttggcctcattaagaaattcgtgaccgatagtaatgccgtcgtgcagctcaagggcctagaagcagcattagtctacgtagaaaatgctcacgtggctggaaagacaactggcgaggtcgtgtctggtgttgtatcaaaggtgttcaaccaacccaaagcaaaagcaaaggaattaggcattgaaatctgcctgatgtacatcgaaatcgaaaaaggcgaagctgtgcaggaggagctcttgaagggactggacaataagaatcctaagattattgtggcttgtatcgaaaccctccgcaaagcactgagcgaatttggttctaagataattttgctgaagccaatcataaaagtgctgcccaagctgttcgaatcccgggagaaggccgtgcgggacgaagccaagctcattgctgtagagatctataggtggatacgcgacgcactcaggcctccgctccagaatatcaatagcgttcagctaaaggaactcgaagaagagtgggtcaaactccctacatctgcaccgagaccaacgcgattccttcgtagccagcaggagctggaagctaagcttgagcagcagcaatccgcaggcggtgatgccgaagggggaggtgatgacggggatgaagtacctcaaatagacgcatacgagctgcttgaggccgtggaaatcctctccaagctgccaaaagatttttacgataaaattgaagcaaaaaagtggcaagagcgcaaagaggctttagagtccgttgaggttctaattaagaatcccaaattagaagcgggtgattacgcggatctggttaaagctctgaagaaggtggtaggaaaggacaccaacgtaatgctggtggcactggctgctaaatgtctgacaggccttgctgttggccttcgcaagaagtttggccagtacgccggacatgtcgtgcccaccatcctcgaaaagttcaaagaaaaaaaacctcaggtagtacaggccttgcaggaggccatagacgcaattttcctgaccaccactcttcagaacatatctgaggatgtgctcgcagtgatggataacaagaatcccacgatcaagcaacagaccagtttatttattgctcggagttttaggcactgcaccgcaagcacactgcccaagtctctcctaaaacctttctgcgcagcactacttaagcatattaacgattccgcccctgaggtgcgcgatgctgctttcgaagcactgggaaccgccctgaaagtggtaggggaaaaggctgtcaacccattccttgcagatgttgacaagctgaagctggataagatcaaagagtgttctgaaaaggttgaactcatccacggtaaaaaggcagggttagcagcagataaaaaggagttcaaaccactgcccggtaggacagccgcatcaggggcagcaggtgataaagacacaaaggacatctctgccccaaagccaggccctcttaagaaggcccctgctgcgaaggcaggcggacccccaaagaaaggaaagcctgccgctcccggaggcgctgggaacactggaacaaagaataaaaagggactggaaaccaaagagatagtcgaaccagaattatcaatagaagtctgtgaggagaaagcgtcagccgttcttccgcctacatgcattcagctcctggacagcagtaattggaaggagaggctcgcatgcatggaagaattccaaaaggcagtggaactgatggacaggaccgaaatgccttgccaggccttggtgcgaatgctggctaagaaacctggatggaaagaaaccaatttccaggtcatgcagatgaagcttcatatagtcgcactgatagcacaaaagggtaattttagcaagacatctgctcaagtggtccttgacgggttggttgacaagattggcgacgtgaagtgtgggaataatgcaaaagaagctatgacagcaattgccgaggcctgtatgcttccctggaccgctgagcaagtcgtgagtatggctttctctcaaaagaaccccaagaatcagagcgaaacattaaattggctatctaacgcaatcaaggaatttggcttctccggactcaatgttaaagctttcataagcaatgtcaagaccgctctggcagccacaaatccagccgtgaggactgccgctatcacactgctgggcgtgatgtatttgtacgttggaccgagcttgagaatgtttttcgaagacgagaaaccggcactcctgagccagatagatgcggaatttgagaagatgcaagggcaatcccctcccgcacctaccaggggtatctccaagcatagcacatctggaactgacgaaggggaggatggcgatgagccagacgacggcagtaacgacgtggtggacctgctcccacgaaccgagattagcgataagatcacctcggagctggtgtcaaaaattggggataaaaactggaaaattcggaaagaagggctggacgaggtcgctggaattattaatgacgcaaagttcatccagcctaatatcggcgagctgccaaccgctctgaaaggcaggctgaatgactccaacaaaatcctggtccagcagacgcttaatatcctccaacagctggcagtggctatgggcccaaatattaagcagcatgtgaagaacctcggaattccaatcattacggtgctgggcgattcaaagaacaacgttcgtgccgcagccctcgcaactgtgaatgcttgggctgaacagacgggaatgaaggaatggctcgagggggaggatttatccgaggagctgaagaaggaaaatccatttctccgacaggagctccttggatggctggctgaaaaacttcccaccctgcgctcgacgcccaccgacctcatcctctgtgttcctcacctttatagctgtctggaggatcgcaatggagacgtaaggaagaaggcccaggacgcattgccctttttcatgatgcacttgggctacgagaagatggctaaagccactggaaaactcaaacccacaagtaaggatcaggtgttggccatgctggagaaagccaaagtgaatatgccagccaaacctgcccctccaaccaaggcaacgagtaagcctatgggtgggagcgctcccgcaaaattccagcccgcttccgctcccgcagaggactgtattagttcctcgacagagccaaaacccgatccgaaaaaggccaaagctcctggcctgtcctctaaggccaagtccgcccaaggaaagaaaatgcccagtaagacttccctgaaagaggatgaagacaaaagcgggcctatattcatcgttgtcccgaacggaaaagagcaacgcatgaaagacgagaagggattgaaggtcttgaaatggaacttcaccacaccgagagatgagtacatcgaacagctgaagacccagatgagttcttgtgtggctaaatggctgcaggatgagatgtttcacagcgatttccaacaccacaacaaggctctggccgtcatggttgatcatttggagagtgagaaggagggggtcatcggttgtttggatctgatcctgaaatggcttacgcttaggttttttgacacaaacacaagcgtactgatgaaggccttggaatatctcaagctcttgtttaccctactcagcgaggaggaatatcacctgacagaaaatgaggcatcatcattcatcccttacctggtcgtaaaagtgggggaacccaaagatgttattaggaaggacgtgagagctattctgaaccgcatgtgcttagtgtatcccgcaagcaagatgttcccatttataatggagggtaccaaaagcaagaactccaaacagcgagccgagtgccttgaagaacttggctgtctggtggaatcgtacggcatgaatgtatgtcaacctaccccaggcaaagccctgaaagaaatcgccgttcacatcggggatcgtgacaatgcagttcgcaacgctgctctgaacacgatcgtcactgtatacaatgttcacggagatcaggtgttcaagctgataggaaacttgtccgaaaaagatatgtctatgctcgaggaacgtattaagaggtcggctaaacggccaagtgctgcccctatcaagcaggtggaagaaaaaccccagagggcccagaatatctcttctaacgctaatatgctgaggaagggcccagcggaagatatgagtagtaaattgaaccaggccagatcaatgagcggccaccctgaagctgcgcagatggtgcgacgagagttccaactggacctggatgaaattgagaatgacaacggcactgtcaggtgtgagatgcccgagttagtgcaacataaattggatgatatcttcgaaccggtgctaattccagaacccaagatacgtgcagttagcccccactttgacgatatgcattcaaatacagcatctaccattaatttcatcatcagtcaggttgctagtggagacataaacacaagcatacaggctctgacccagatcgatgaagtccttaggcaagaggataaagccgaggcaatgtctggccatatcgatcagttcctgatcgctacttttatgcaactacggctgatatataacacacacatggctgacgagaagctggaaaaggacgagataattaagttgtactcttgtatcataggcaatatgatatcattgtttcagattgaaagtttggccagggaagcatctactggagtgctcaaagatctcatgcacggcctcattaccctgatgctggactctcgaatagaagacctggaggaggggcagcaggtcatccggtcggttaaccttctcgtagtgaaagtactggaaaaaagcgatcagacaaacattcttagtgccttacttgttctcctgcaggactcccttctggctacggcttcaagccccaaattctcagaattggtcatgaagtgcctgtggaggatggtacgcttgctgcctgatactattaattccatcaacctagatagaattcttctggatattcatatcttcatgaaagtgttccctaaggaaaagctcaaacaatgtaagtctgagtttcccattcgtacgctgaaaactcttctacataccctgtgtaaactgaagggtcctaaaagttgcatgtgtcttccacagatcctggaccatctcacgatgatcgacaacaagaatgaaagtgaactggaagcccacctatgtaggatgatgaaacatagcatggaccaaaccggaagcaagtcagacaaagagacagaaaagggagcgtctcggattgatgagaagagttcaaaggctaaggtaaacgacttcctggccgagatatttaaaaaaatcggctctaaagaaaacaccaaggaggggctggcagaactgtatgagtataagaagaagtactccgatgctgatatcgagcccttcctgaaaaattcttcacagttcttccagtcttatgtcgaaaggggactgcgcgtaattgaaatggaacgggagggtaaaggccgaatatctacatctaccgggataagccctcagatggaggtcacctgcgtacccaccccaactagtacagtgagttctatcgggaacaccaacggggaagaagtaggaccgtcagtctatttggagcgtctgaagattttgagacagcgatgtggcctggacaatacaaagcaggatgataggccccctttgacatcattgctgagcaagcccgcagtgcctacggttgcctcatcaacagatatgcttcactccaagctatctcagctcagagagtccagagaacaacatcagcacagtgatttggactcgaatcagacacactctagcggtaccgtgacatcaagtagctcaaccgcgaacatcgatgatctgaagaaaagactggagaggatcaaaagttcccgcaaata

SEQ ID NO: 220012 - DNA, 456 bp, synthetic construct
  misc_feature 1..456: note = Description of Artificial Sequence: Synthetic coding sequence
  source 1..456: mol_type = other DNA
atgggcgatgatagcgagtggctgaaattgccagttgatcaaaagtgcgagcacaagctgtggaaagcgagactgtccgggtacgaagaggccctgaaaattttccaaaagatcaaggacgagaagtcccccgaatggtccaagttcctggggctcataaaaaaattcgtcaccgattcaaatgccgtggtccaactgaagggacttgaggcagccttagtttatgtggagaacgcccatgttgccggaaagaccacaggcgaagtggtctcaggcgtcgttagcaaggtgttcaaccagcctaaagccaaagctaaagaactcggcattgaaatatgcttaatgtatattgagattgaaaaaggtgaagctgtgcaggaagagctgctcaagggcctcgacaacaagaatcctaaaatcatcgtcgcttgcatcgagacactccgcaaggcctag

SEQ ID NO: 220013 - DNA, 6098 bp, synthetic construct
  misc_feature 1..6098: note = Description of Artificial Sequence: Synthetic coding sequence
  source 1..6098: mol_type = other DNA
atgggcgatgatagcgagtggctgaaactgccggtcgatcagaaatgtgaacataagctgtggaaggcacgcctctccggctacgaggaggcattgaagatcttccagaaaattaaggacgaaaagagccccgagtggtctaaattcctgggcctgattaagaagtttgtgacagactcgaatgcagttgttcagttaaagggcttggaggcagctctggtctatgtcgagaacgctcacgtggcgggaaagaccacaggggaagttgttagcggcgtcgtgtccaaagtgtttaaccagccaaaggcaaaggcgaaggaacttggaatcgagatctgcctgatgtatattgagattgagaagggtgaagccgtgcaagaagaacttctgaaagggctcgataataagaaccccaagattattgtcgcatgcattgagaccctccgcaaagctttgagcgagttcggctcaaaaatcatcctattgaagcccatcatcaaggttctgccaaagctgttcgaaagtagagagaaggcggtccgtgacgaggcaaaactgatagcagtcgaaatttaccggtggatccgggatgcactcagacctcccctccaaaatattaatagtgtgcagctgaaggagctagaagaggaatgggtcaagttgcctaccagcgctccgcgacccacaagatttttgcgtagccagcaggagcttgaagcaaagctggagcagcaacagtcagctgggggagatgctgaaggcggtggcgatgatggcgatgaggttccacagatagacgcgtacgaactgttggaagcagtagagattctcagcaagctgccaaaggacttttatgataagatcgaagccaaaaaatggcaagagcggaaagaggctctggagtcggtggaggtgcttattaaaaacccaaagctcgaggctggtgactatgccgacttagtgaaggcgctgaaaaaggtcgttggtaaagacactaacgtcatgcttgtggcactggctgcaaagtgtttgactgggctcgctgtggggctgaggaagaagttcggacagtacgccggtcatgtagtgcccactattcttgaaaagttcaaagagaaaaagcctcaggtggttcaggccttacaggaagctatcgatgctatcttcctgaccacgacactccagaatatcagtgaggatgtcttggccgtaatggataataagaaccctaccatcaagcagcagacatccttgttcatcgccaggagctttcggcattgcacagcctcgacactgccaaaatctcttttgaaacctttctgtgctgcgctactcaagcacatcaatgacagcgccccagaggtcagggatgctgcattcgaagccctgggtactgccctcaaggtggtcggggaaaaagccgtcaacccctttcttgctgatgtggataagttgaaactggataaaatcaaagaatgctctgaaaaagtggagcttattcacggtaagaaagccggactggccgcagacaaaaaagagtttaaacctctgccaggacggacagcggcaagcggtgcagcaggtgacaaggacactaaggacatctctgcccctaaacccggtcccctgaagaaggcccctgcagccaaggcaggagggcctcctaaaaaaggcaaaccggctgccccaggcggagcgggaaatactgggactaaaaataagaagggattggagacaaaagagatcgtggaaccagagttgagcatcgaggtatgtgaagaaaaagcttccgctgtgctgcctcccacctgcatacagctgctggactcctccaactggaaggaaagactggcttgtatggaggaattccagaaagcagtcgagcttatggacaggacggagatgccttgccaggccctggttagaatgctggcaaagaagcctggctggaaggaaacaaatttccaagtaatgcaaatgaagctgcatattgtcgccctgatagctcagaaaggcaacttttcaaaaacctccgcccaggtcgtcttagacggcctcgtagacaagatcggggatgttaaatgcggtaataacgccaaggaagcaatgacggcaattgctgaagcctgcatgctcccctggaccgccgaacaggttgtgtcaatggctttttcacaaaaaaatcctaaaaaccaaagcgagaccctgaattggctgtcaaacgccattaaagagttcgggttcagcggtctcaatgtgaaggccttcatcagcaatgtgaaaaccgccctggccgcaacaaacccagccgtgagaaccgcagcaataaccctcttgggcgtgatgtacctctatgtggggcctagcctccggatgtttttcgaggacgaaaagcccgcactcctcagccaaattgacgccgagttcgagaaaatgcagggacagtcccctcccgcaccaactcggggtatctcaaaacattccacctcaggaactgacgagggagaggacggtgacgaaccggatgacggttctaacgacgtagttgacttgctgcctagaactgaaattagtgataagattacatctgagcttgtgtccaaaattggtgataaaaattggaagattagaaaggagggcctagacgaagtggccggaataatcaatgatgccaagtttattcagcccaacatcggggagttgccgaccgccttaaaaggtcggctgaatgactctaataaaatcctggtgcagcaaacccttaacattctgcagcagcttgccgtggcaatggggcctaacattaaacaacacgtgaaaaatctcggtatcccgattatcaccgtgttgggcgattccaaaaataacgtccgcgctgcagcacttgccactgttaacgcgtgggccgagcagaccggaatgaaggaatggcttgaaggtgaggatctgagcgaagagctgaagaaagagaatccctttctgaggcaggaactcctgggttggctggcagaaaagttacctaccctccgatcgaccccgacagatttgatcttatgtgtccctcacttatactcatgtcttgaggacagaaacggcgatgtccggaaaaaggcacaagacgccctacctttctttatgatgcaccttggatacgagaagatggctaaggctacaggtaaacttaaacccacctcaaaggaccaagttctagccatgctggaaaaggcgaaagtgaatatgcccgctaagccagctcctcccactaaggccacgtccaagcccatgggcggatctgcaccagccaaatttcagccagcatccgccccagccgaagattgcatttcttctagtacagagccgaagccagatccgaagaaagcgaaggcaccaggactgtccagtaaggccaaatccgcccagggaaaaaaaatgccctctaaaacgtctctgaaggaagatgaggataaaagcggcccaatcttcatcgtggtaccaaacggaaaagagcagcgcatgaaagacgagaagggtctcaaggtactgaagtggaattttactaccccgcgtgatgagtatatcgagcaacttaagacacagatgagtagctgcgtcgccaaatggctgcaggacgagatgtttcattccgattttcagcaccacaacaaagccctagcagtgatggtcgaccaccttgagtccgaaaaagaaggcgtcattggctgtctagacctgattttgaagtggttaactctccgtttctttgatactaacacaagcgttctgatgaaggccttagaatacctgaagctcctgttcactttactctcagaggaagaataccaccttaccgagaacgaagcttcatccttcatcccatacctcgtcgtgaaagttggcgaacctaaggatgtgattagaaaagatgtgcgagcaattctgaatcgaatgtgcctggtttatcctgcctctaaaatgttccccttcatcatggagggtaccaaatctaagaattctaaacaaagagcagaatgtctagaagagctggggtgtctggtggaatcttatggtatgaacgtctgccagcccacacccggtaaggctttaaaggaaatcgccgtccacatcggcgatagagacaatgcagtcaggaatgccgctcttaataccattgtgaccgtgtataatgtccatggagaccaggtttttaagttaattgggaatctctccgaaaaagacatgagcatgctggaagaacgcatcaagcgatccgcaaagaggcctagcgccgctccaattaaacaagtagaagaaaagcctcaacgcgctcaaaacatctccagcaacgccaatatgttgcgcaagggtcccgcagaggatatgtcaagtaagctgaaccaggccaggtcaatgagcgggcaccccgaagcggcacagatggttaggcgcgagttccagcttgacctggatgaaatcgaaaatgataatggaacagtgagatgcgagatgcccgaactggtgcagcacaaattggatgatatctttgagccagtgttgataccggaaccgaaaatcagagccgtgagccctcactttgatgatatgcattccaacactgccagcacgatcaactttatcatatctcaagtggcctccggagacatcaatacatctattcaggccctgacccagatagacgaggtgttgaggcaggaggataaggctgaagccatgagcggtcacatagatcagtttctgattgccacctttatgcaactgaggttaatctacaacacccacatggcggacgaaaaactggagaaggatgaaataattaaactgtacagttgtattatcggcaacatgattagtctcttccagattgaatctctggcacgcgaggccagcacaggagtcctgaaggacctgatgcatggattaataactctgatgctggattcccggatagaagatctcgaagaaggccagcaggtgatacgaagcgtcaatctgttagtagtcaaagtgctcgaaaaatccgatcaaacaaatatactttctgccctgttagttctccttcaagactcccttctggcaactgccagctcacccaagttctctgagttagtgatgaaatgcttgtggcgcatggtgagattgctgccagacacgattaattcaatcaacctcgatcgcatcctccttgacattcatatcttcatgaaggtcttccccaaggaaaaactcaagcagtgcaagtctgaatttcctattaggaccctgaagaccctgttacacaccctatgcaagctgaaaggtcctaaaattctggaccacttaacaatgatcgataacaagaacgagtctgagcttgaggcccatctctgcaggatgatgaaacattccatggatcagaccggctcaaagagtgataaggagacagagaagggggcttcaagaatcgatgagaagtcatctaaagctaaagttaatgacttcctggccgaaatcttcaagaaaataggcagtaaggagaatactaaagagggtcttgccgaactctacgaatacaagaaaaaatattctgacgcagacatcgaaccattcctcaaaaatagtagtcagtttttccaatcttatgtggaacgcggtctcagggtcatcgaaatggagcgtgagggcaagggccgtatcagtacctccacaggcatcagccctcagatggaggtaacttgtgtgcctactcctacgagtacagtttcaagtatcggaaataccaatggagaggaggtcggtccaagcgtttatctggagaggcttaaaatactccgtcagcggtgcggtctggataacaccaagcaagatgatagaccccctctgaccagcctgctgtccaagccggctgtgccgacagtggcatcatccaccgatatgctccacagcaagctgagtcagctgcgggagtctagagagcagcaccagcattccgacctggatagtaatcaaacccactccagcgggactgtgaccagctcgtcctctacagctaacatagatgacctgaagaagaggctcgagcggatcaagagcagcagaaagta

SEQ ID NO: 220014 - DNA, 1020 bp, synthetic construct
  misc_feature 1..1020: note = Description of Artificial Sequence: Synthetic coding sequence
  source 1..1020: mol_type = other DNA
atgaaagactctctggtactccttgggcgagttccagcccatcccgattctcggtgctggttcttagcctggaaccctgcaggcaccctccttgcctcatgcggcggagaccgacgtatccggatctggggaaccgagggggattcctggatatgcaaaagtgtgttgagcgagggacaccaaaggacagtacgcaaggtcgcttggtctccttgtggaaattacctagcttctgccagttttgatgccactacttgcatctggaagaaaaatcaggatgactttgaatgcgttaccacactagaaggacacgagaatgaagtaaagtctgttgcctgggccccttcaggtaacctacttgccacgtgcagccgagataaatcagtctgggtgtgggaggtagacgaggaagatgagtacgaatgtgtgtccgtgcttaactctcacacccaggacgtgaaacacgtagtctggcatccctcacaggaactgctggcatctgcttcttacgatgataccgtgaaactctaccgggaagaggaagatgactgggtctgctgcgcaactctcgaaggtcacgagtcgacagtctggtctttagcttttgaccccagtggtcagagactagcttcatgttccgacgaccgcacagtgagaatttggcgccaatatctccctggtaacgaacagggggttgcttgcagtggatcggacccgtcctggaagtgtatttgtactctgtctggattccacagccgaactatctatgacatagcttggtgtcagctcaccggggcattggccactgcctgtggggatgacgccattcgagtcttccaggaggatcctaactctgaccctcagcagccaaccttttcactgaccgcacacctgcaccaggctcactctcaggatgtaaactgcgtcgcatggaacccgaaagaacctggcctcctggctagctgcagcgacgacggcgaggttgccttctggaagtatcagcgccctgaaggcctgtag

SEQ ID NO: 220015 - DNA, 1380 bp, synthetic construct
  misc_feature 1..1380: note = Description of Artificial Sequence: Synthetic coding sequence
  source 1..1380: mol_type = other DNA
atggccgcttccggggctgtagagccaggcccacctggcgctgctgtggctccatcaccagccccagctccaccacctgcccctgatcatctcttccgccctatcagtgccgaggatgaggagcagcagcctaccgaaatcgaaagtctgtgcatgaactgctactgcaacggaatgacccggctgctcttaacaaagatccccttctttagggaaatcatagtctcatcatttagttgtgagcattgtggctggaataacacggagattcagagtgctgggagaattcaggaccaaggggtgcggtacactctttcagtgagagcattggaagatatgaaccgggaggtagtgaaaacggacagcgccgctactcgaattcccgaactcgacttcgaaatccccgcattcagccagaagggtgccttgacaacagtggaaggtttaatcacacgagcaatatccggtctggaacaggaccagccagcacgtcgggcaaacaaggatgcaaccgcggagaggatcgacgagttcattgttaagctgaaggaattgaaacaagtagcttcgccatttaccctgatcatagacgacccttccggtaacagcttcgtcgagaatccccatgctcctcagaaagacgacgccctcgtgattacccactacaacaggaccaggcagcaggaagagatgctaggtctgcaggaagaggcccctgccgagaaacccgaggaagaggacttaaggaacgaagttcttcagttctcgaccaattgtcctgaatgtaatgctcctgcacagaccaacatgaagctcgttcagatccctcacttcaaggaagtaatcataatggcgaccaattgcgaaaactgcgggcatcgaaccaatgaagtgaagtctggcggtgccgtggaaccattgggcactcggattacacttcacatcacagacgcttccgatatgaccagggatctcctcaagtctgaaacatgttctgtggaaattcccgaactggagtttgagttgggcatggctgtcctgggcggtaaattcaccactttggaaggcttactcaaggatatcagggagctggtgaccaaaaatccttttaccctgggggattcaagcaaccccggacagaccgaaagactgcaggaatttagtcagaagatggatcagataatcgaaggaaacatgaaggcccattttatcatggatgatccagccggtaactcctatctccagaatgtctatgcgcctgaagacgaccccgagatgaaagtggagagatacaagcgcacctttgatcaaaacgaagaattgggactgaacgacatgaagacagagggctacgaggcaggcctggctcctcaacgttag

SEQ ID NO: 220016 - DNA, 585 bp, synthetic construct
  misc_feature 1..585: note = Description of Artificial Sequence: Synthetic coding sequence
  source 1..585: mol_type = other DNA
atgtgggtcaagttactgtctatcgtggccgagttttgcttctccccttttctcgtcaccgacgaagagacagcgtcagacgccctggagaggaactctctgtcatcccaagaccctcaacagccaacatctaccgtaagtgtgacagaggattcatctactagtgaaatcgacaaggaggagaaggaacagaccacacaagaccctgacctgacaaccgaggcaaatcctcagtatctgggcctggccaggaaaaagtccgggatcctccttttgactcttgttagtttcctgatttttatcctattcatcatagttcagctgttcataatgaaattgcggaaggcccatgttatttggaaaaaggagaatgaagttagtgaacacactcttgagagttaccgctcacgatcaaacaatgaagagacctcctcagaggagaagaatgggcagtccagccaccctatgagatgtatgaattacatcaccaagctctactccgaagctaagacaaagagaaaggagaatgtccaacatagcaagctggaggaaaagcacattcaggtgcccgagtccatcgtttag

SEQ ID NO: 220017 - DNA, 525 bp, synthetic construct
  misc_feature 1..525: note = Description of Artificial Sequence: Synthetic coding sequence
  source 1..525: mol_type = other DNA
atggcctgcctcggttttcagagacacaaagcccagctgaacttagctactagaacttggccctgcaccctcctgtttttcttgttatttattcccgtgttctgtaaggcaatgcacgtcgcacaaccagcagtggtcctggccagctcccgcggaatagcctcatttgtttgtgagtacgcctccccaggcaaggctaccgaggtcagagtcacagttctgaggcaagctgatagtcaggtgactgaagtgtgtgcggcaacatacatgatgggcaatgaattgacctttttggatgacagcatctgtacaggcaccagctccggtaatcaggtgaacctgaccattcaggggttgcgcgcaatggatacgggcctctacatctgcaaggtggagctcatgtatcccccaccgtattacctgggaattggcaatggcactcagatttatgtcattgctaaagagaagaagcccagctataaccggggtctgtgcgagaacgcacctaatagagccaggatgtag

SEQ ID NO: 220018 - DNA, 672 bp, synthetic construct
  misc_feature 1..672: note = Description of Artificial Sequence: Synthetic coding sequence
  source 1..672: mol_type = other DNA
atggcttgcctgggatttcaacgacacaaggctcaactgaatttagcgacaaggacatggccatgcaccctgcttttcttcctgttattcatccccgttttctgtaaggccatgcacgtcgctcagcccgcagttgtgctcgcaagttctaggggtattgcctcctttgtttgcgaatacgcctcccctggcaaagccaccgaagtgcgggtcaccgtcctgagacaagccgattcacaagtcaccgaggtttgtgcggcaacatatatgatgggaaatgaacttacattcctggacgactctatctgtacaggcacatccagcggcaaccaagtgaacctgacaatccagggcctaagagccatggacacaggactgtatatttgcaaagttgagctcatgtacccacccccatattacctcggaattggtaacggtacgcagatctacgtcatcgatcccgagccatgtcctgattctgatttcctgctctggatactggctgcagtttcctccggcctgtttttttatagctttctcctcacagccgtctctctgtcgaagatgcttaagaagcggtcccctttgactactggtgtgtatgtaaaaatgccccctactgagcccgaatgcgaaaagcagtttcagccatactttatcccaattaattag

SEQ ID NO: 220019 - DNA, 414 bp, synthetic construct
  misc_feature 1..414: note = Description of Artificial Sequence: Synthetic coding sequence
  source 1..414: mol_type = other DNA
atgcacgtggcacaacccgcagtggtcctggcttcctcccgcggtattgcatcctttgtgtgtgagtacgccagccctggaaaggccaccgaggtaagagtaacagttcttagacaggccgatagtcaggtgacagaagtgtgcgcggctacatacatgatgggaaacgagttaactttcctggatgatagcatctgtaccggaacatctagcggcaaccaggtgaatctgacaatccaaggcttaagagccatggacacaggtttgtatatctgcaaagtcgagctcatgtatcctccaccctactacctgggcattgggaatggcactcaaatttatgtaatagccaaggagaaaaagccttcctacaaccgcggactatgcgagaatgccccaaacagagcccgtatgtag

SEQ ID NO: 220020 - DNA, 171 bp, synthetic construct
  misc_feature 1..171: note = Description of Artificial Sequence: Synthetic coding sequence
  source 1..171: mol_type = other DNA
atggcatgccttggattccagcggcataaggcccaactgaatcttgccacgagaacgtggccttgcacactcctttttttcctcttgtttatacctgttttttgcaaagtgccaccaactgaaccggagtgcgagaagcagttccagccctatttcatccccatcaattag

SEQ ID NO: 220021 - DNA, 660 bp, synthetic construct
  misc_feature 1..660: note = Description of Artificial Sequence: Synthetic coding sequence
  source 1..660: mol_type = other DNA
atggcgtcggctggtgacacacaggcaggcccaagagacgcagcggaccaaaattttgattacatgttcaaactcctgttaattggcaatagtagtgtcgggaaaacatctttccttttcaggtatgctgacgactcgttcactccagccttcgtctctaccgtaggaatcgacttcaaagtgaaaacagtgtacagacacgataagcgaatcaaactgcagatttgggacaccgccggacaggaacgttaccgcactataactaccgcctattaccggggagctatggggtttctgctgatgtacgacatcgccaaccaagaaagtttcgctgctgtgcaggactgggctacgcagataaagacttacagctgggataatgcccaggtcatcctagtcggaaacaagtgcgatctagaagacgaacgtgtcgtgccagcagaagacggcagacgtctggcagatgacttgggtttcgaatttttcgaagccagcgcaaaggagaacatcaacgtgaaacaggtcttcgagcgactggtcgacgtgatatgtgaaaagatgaacgagtccctggagccgagttcatccagtggcagtaatggaaagggacctgccgtgggggatgcacccgcaccccagccctcttcctgctcctgctag

SEQ ID NO: 220022 - DNA, 1566 bp, synthetic construct
  misc_feature 1..1566: note = Description of Artificial Sequence: Synthetic coding sequence
  source 1..1566: mol_type = other DNA
atgctgccccgaagacccctagcctggcctgcatggctcctgcgaggggctccaggtgccgctggtagctggggacgtcctgtcggccctctcgcccgtaggggatgctgcagcgccccaggtacccccgaggtaccccttacaagagaacggtatccagtgcggagactgccgttctccaccgtgagtaaacaggatctggcagcgtttgaacgcatcgtgccaggcggagtggtgaccgacccggaggctttgcaagcacccaacgtggattggctgagaacccttcgcggatgtagtaaggtgctcttgcgccctcgcaccagcgaagaagtgagtcatattctgcggcactgccacgagcgcaacctggcagtaaaccctcaaggcggtaacacaggtatggtgggcggaagcgtgccggtgttcgacgaaatcatactgtccactgcccgaatgaatcgggtgctctctttccacagcgttagcggcatacttgtctgtcaagcagggtgtgttcttgaagagctatcacggtacgttgaagaacgtgactttataatgcctcttgatctgggggctaaagggtcctgtcatattggtggaaacgtggccactaatgcaggcggactcaggttcttgcgctatggttctctgcacggcactgtcctggggctggaggtggtcttggctgacggaacggtgctggattgtttgacctctctccgcaaggacaataccggatatgacctgaagcagttgtttatcggatctgaaggaacattaggcatcatcaccacagtctctatattatgccccccaaagccacgcgcagtgaatgtggccttcctcggatgtcctgggttcgcagaggtgctacagaccttttcaacctgcaaagggatgctgggggagatcttgtcggcctttgaattcatggacgcagtctgcatgcagctcgtggggagacatttacacctggcatcccctgtgcaggagtctccattctatgtgctcatcgaaacctcaggctcaaacgccggacacgacgccgagaaactgggtcactttctagagcacgcactgggatctggcctggtcaccgacggcacaatggcgactgatcaacgcaaggtcaagatgttgtgggcactccgggagaggatcaccgaggccctgagccgggacgggtacgtatacaaatatgacctgagtttacccgtggagcgactgtatgacattgtcacagaccttcgggcaaggctgggtccccatgccaaacatgtggtcgggtatggccatctgggagacggaaatctgcatctgaacgttacagccgaagctttttcacccagcctcctagccgctctagaaccccacgtgtatgaatggacagctggccaacagggctctgtgtcggccgaacacggagtggggtttcgaaaaagagacgtgttggggtattccaagccacctggagcccttcagcttatgcagcaactgaaggcactgctggatcccaaagggattctgaacccatataaaacactgcccagccaggcctag

SEQ ID NO: 220023 - DNA, 960 bp, synthetic construct
  misc_feature 1..960: note = Description of Artificial Sequence: Synthetic coding sequence
  source 1..960: mol_type = other DNA
atgctgcccagaagaccactggcgtggccagcctggctcctgcgcggagctccaggcgcagccggatcctgggggagacctgtgggtcccctggctaggagaggctgttgtagcgcgccaggaacacccgaagtgccactcacgcgtgaacgctacccagtgaggcgactgccattttctacagtgtctaagcaggacctagcagctttcgaaaggatcgttcccggtggggtggttacagatcccgaggctctgcaagcccctaacgtggattggctgcgaacccttcggggttgcagcaaagtgctattgcgacccagaacttccgaagaagtgtcacatattttgcggcactgccacgagcggaacctggcagtcaaccctcaggggggtaacaccgggatggtgggtggcagcgtcccagtattcgatgaaattatactgagtacagctcggatgaacagggtcttgtctttccactctgtcagcggcattttggtgtgtcaggcaggatgcgtgctggaggagctttcccgatatgtggaggagagagattttatcatgcctctcgacctgggagctaaagggagttgccacatcggaggaaacgtagccaccaacgctggaggtctcagattcctgcgttatgggtccctccacggcaccgtgctggggctggaggttgtgcttgcagacggcactgtgctggattgcctgacatctctgcgaaaagacaatactggatacgatttgaaacagctgttcattggttcagagggcacgcttgggattatcaccaccgtttcgattctgtgccctccaaaacccagggccgtaaatgtggcattcctagtcacctgcgttcctccagcttgtggaccaggaagccctcggcctgctcgccttcctcacccagctctgcggacgcccggtgtgtgtcctcaacccctaaggctgtag

SEQ ID NO: 220024 - DNA, 1164 bp, synthetic construct
  misc_feature 1..1164: note = Description of Artificial Sequence: Synthetic coding sequence
  source 1..1164: mol_type = other DNA
atggtcggcggaagcgtgccagtgttcgacgaaataatattgagcactgccagaatgaatcgggtcttgtcctttcacagcgtttcagggattctcgtttgccaggccggttgtgtgctggaagaattgtcccgttatgtcgaggagcgagacttcatcatgccccttgatctaggcgctaaagggtcatgtcacataggcggtaacgtcgctaccaacgccggtggtctccggttcctccgatatgggtcattgcatggtacggtcctcggtttggaggtggtgctggcagacggcacagtacttgattgcctgacttctctaaggaaagacaacactggttacgatcttaagcaactgtttattgggtccgagggaactctgggcatcatcactaccgtatcgattctgtgcccccctaagccacgcgcagtgaatgtggcttttctggggtgtccaggattcgctgaagttctccagacattcagcacctgtaagggaatgctcggagagatactctctgccttcgagttcatggacgctgtgtgcatgcagctggtgggcagacatctgcacctcgccagccccgtgcaggagagccccttctacgttctgatagaaacaagcggctctaacgccggtcatgatgctgagaaactgggccattttttagagcacgcattgggcagcggtctagtaactgatgggacgatggcgaccgaccagcgtaaggtaaagatgctgtgggcccttagggagcggattactgaggccctgtcacgagatgggtacgtatataagtatgatctaagcctgcccgtggagaggctgtatgacatcgtaaccgacttgagggccagactcggcccacatgcgaaacacgttgtgggttacggccatctcggggacggcaatttgcatctaaatgtgactgccgaggccttctcccccagcctgttggcagccctggagccccatgtgtatgagtggacagccggtcagcaggggagcgtctctgctgaacacggcgtgggtttcagaaaaagagacgttctcgggtattccaaaccacctggagccctgcaacttatgcagcagctaaaggcgcttctcgaccccaagggaatactcaacccctacaaaactcttccaagtcaggcctag

SEQ ID NO: 220025 - DNA, 978 bp, synthetic construct
  misc_feature 1..978: note = Description of Artificial Sequence: Synthetic coding sequence
  source 1..978: mol_type = other DNA
atgttgcctcggaggccgttggcttggcctgcgtggcttttaaggggggctcccggtgcagctgggtcatggggccgtccagtaggccctctcgctaggaggggttgttgctctgccccaggaacacctgaagtgcctctgactagagagcggtaccccgtgcgcagactcccctttagtactgtatccaagcaggacctggctgctttcgaacggatcgtgcctgggggtgtggtcacagaccctgaagcactccaggctccgaatgttgactggctgcggactttgagaggctgtagcaaggtattattacggcctagaacgtccgaggaggtgagccacatactcagacactgccatgagaggaacctcgctgtaaatccccaggggggtaacacgggcatggtggggggtagtgtacccgtgtttgacgagattattctgtcgacagctagaatgaatagggtgctgtcttttcatagtgtcagcggcatcctggtctgtcaggcaggttgcgtactggaggagctgagcagatatgttgaggagcgggattttataatgccgctcgacctgggcgcaaaaggctcctgccatatcgggggaaacgttgcaaccaacgctggcggactgcgattcctgagatatggctccctccacggcaccgttctgggcctggaagtcgtgttggccgacggaactgtgctcgattgtttgaccagcttgcgcaaggacaatacaggctatgatctgaagcagctgttcataggctcagaaggcactctgggcatcataaccacagtatcgatcctgtgtcccccaaagccaagggctgtcaacgtggcgtttctggttacatgtgtaccaccggcttgtggtcccggaagcccacggccagctaggttaccacaccccgcactgaggactcccggattacgccaggaatccctggcctcctcttgccatgctcacgtgtag

SEQ ID NO: 220026 - DNA, 426 bp, synthetic construct
  misc_feature 1..426: note = Description of Artificial Sequence: Synthetic coding sequence
  source 1..426: mol_type = other DNA
atgctgtgggcccttagagaacgcatcactgaagcattatcccgcgatggctatgtgtacaagtacgacttaagcctgcccgtagagcggctctatgatatcgtaactgatctccgggcaaggctggggccacacgctaagcacgtcgtgggatatggacacctcggcgacggcaatctgcacttaaatgtgactgccgaagccttttcacctagtctgctagccgctctcgagcctcacgtgtatgaatggactgccggacagcagggtagcgtctctgcagaacatggagtcggtttcaggaaacgtgacgtgttaggctatagtaagccccctggtgctcttcagctaatgcagcaattgaaggcccttttagaccctaaaggcattttaaatccctacaagaccctgccctctcaggcctag

SEQ ID NO: 220027 - DNA, 609 bp, synthetic construct
  misc_feature 1..609: note = Description of Artificial Sequence: Synthetic coding sequence
  source 1..609: mol_type = other DNA
atgtctttccctcccttgtggcctacacgccatgtgccggcttcgcaccccacttgcccactgcttcctggcccttgttgttgtccacattgtctctgtgattctgctccacccagcctcccttgtccgaccttagtgcagggcgcttcaagaccaatactgattttgcgagccttcccgggtccttgtcactcagttccttgccatgacttaaagctgcaagtgggagcatctccctttcggcatggttgcccaccaagcgtgcgttgtccatcaagactgatagccggtgtgcccggttgttcagtgttatcatggtcattgggccatagcctgagtggtattgattctagggtgggcgctacccctggtctgggccactccctctcctgggttcgggctcctcccggtctgggacacagcctgagcggtgtgggagccacccctgggcttgggcacctcctatctggggtcggcgcatcaccaggcgaagacaccgaacatgctgccgctctgacaccttgtggcgtgcctcctgttccgggatgtcgctctcatagccagcctctgtctcacttagtgtctagcagccggtgttgtgggccttag

SEQ ID NO: 220028 - DNA, 849 bp, synthetic construct
  misc_feature 1..849: note = Description of Artificial Sequence: Synthetic coding sequence
  source 1..849: mol_type = other DNA
atggcgttgtcctgcagttcctggtgtagaagtccacaatggaagttcgaggcatctaagtcacacgccaatcatcgccctatctgtctttcgcccagaatctggcccggaagcgcaagcgccaccagcaccgtgtgcagctcttcagagtcctttttaccccgaggtccacccgctgtgtcgctgctgctacatggcccacccactgtgagttttccaccaccctggcctacccatcacgtgcttccttcaccagtcgcccatcctccgtgtccctgcttgcctcctgatatgcctctggagctcccaggtccatgctgctgtccacactgtttatgcgatagcgctccaccatccctgccgtgccctacattggttcagggagccagtcgccctatcctcattttgcgggcttttccagggccttgccattcagtcccatgtcacgaccttaagctccaggtgggggcaagcccattcagacatggctgcccaccaagtgtgcgatgcccctcccggttaattgccggagttcctggttgttccgtattgtcctggtctttggggcattctctgagtggcattgattctagagttggagccactcccggactgggacattccctgtcatgggtgcgggcacctccgggactaggccattccttgtcaggggtgggcgctacccctgggttggggcatctgctgagtggcgttggcgcaagccccggagaggacacagagcatgccgctgctctcacgccctgcggggtcccaccggtgccgggatgcagatcccattcacagcctctctcccatctggtgagctcatctaggtgctgtgggccttag

SEQ ID NO: 220029 - DNA, 1245 bp, synthetic construct
  misc_feature 1..1245: note = Description of Artificial Sequence: Synthetic coding sequence
  source 1..1245: mol_type = other DNA
atgggcggtctatctgcgaggccaacggctgggcgaactgatcctgctgggacctgctggggtcaggatcccggtagcaagatggccactgtgattccaggtcctctgtcactcggtgaagatttctatagagaggcaattgaacattgccgttcttataacgcacgcctatgtgccgaaagatccctccgtcttccatttctggatagtcaaaccggcgtcgcgcagaataattgctacatctggatggaaaagacccatcgaggccctgggctggcgcctggacaaatttacacctatcctgcacgatgttggcggaagaagcggagactgaatatcctcgaagaccccagattaagaccttgcgaatacaagattgactgcgaggctccattgaagaaagagggcggactgcccgaggggcctgtgctggaagcactcctgtgcgcggagaccggcgaaaagaaaatagaactgaaggaagaggagactataatggattgccagaaacaacagcttctggagttcccacacgatctcgaggtggaagacctcgaggatgacatccccagacgcaaaaaccgggctaagggaaaagcttacggtatcggcggactcaggaaaagacaggacactgccagcttggaggaccgagataagccctatgtgtgtgacatatgtggcaagaggtacaaaaaccgccctgggttaagttaccactatacacacacacacctcgcagaggaggagggggaggagaatgccgagcgacacgcgctccctttccatcgcaagaacaaccacaagcaattttacaaggagcttgcctgggttccagaggcgcagagaaagcacaccgccaagaaagctcctgacggcacagtcatccccaatggctactgtgacttctgcttgggcggatccaagaaaacgggctgccctgaagatcttattagctgtgcggattgtggacggagtggtcatccgtcgtgtttgcagttcacagtcaatatgacagcagcggttcgcacttaccggtggcaatgcatcgagtgtaagtcctgctccctgtgcggaacaagcgagaacgacgatcagctgcttttttgcgacgactgtgaccggggataccacatgtactgcctgtccccacctatggctgagcccccagaaggctcatggtcatgtcacttgtgtcttaggcacctgaaggagaaggcttctgcgtacatcactctgacctag

SEQ ID NO: 220030 - DNA, 1074 bp, synthetic construct
  misc_feature 1..1074: note = Description of Artificial Sequence: Synthetic coding sequence
  source 1..1074: mol_type = other DNA
atggccaccgtaattcataacccccttaaagcactcggcgatcagttctacaaagaggctatcgaacactgcaggtcctacaactcccgcctgtgtgccgagaggtcggttcgcctgccattcctcgactcccagaccggagttgcacagaacaactgttatatctggatggaaaaacgacacagaggacctggcctggcaccaggccagctttacacgtatcccgcacgctgctggcggaaaaaaaggagactgcacccaccggaggatcccaaactgcgcctgcttgagatcaaacctgaggtggaactgcctctgaagaaagacggcttcacctctgagtcgacaactttggaggccctgcttcgtggcgaaggcgtcgaaaaaaaggttgacgccagagaggaggagtccattcaggagattcagcgtgtccttgaaaatgatgagaacgttgaagaaggaaatgaggaagaggacctagaggaagacataccaaaacggaaaaaccggactcgaggacgcgcacgaggatctgccggagggaggagaagacacgacgctgccagccaggaggatcatgacaaaccgtacgtgtgcgatatctgcggtaaaagatacaaaaacagacccggattgtcttatcactatgcccatacgcatctggcctccgaggaaggtgacgaggcgcaggatcaggagacccggagtccccctaaccataggaatgaaaaccacaggccacagaaggggccagatgggactgtaatccctaacaactactgcgatttttgcctggggggaagcaatatgaataagaaaagcggcaggccagaggaactggtctcatgtgctgactgcggtcgctcagcacacctgggtggagagggtcgtaaagaaaaagaggccgctgccgctgcgaggacaaccgaggacctctttgggtccacatcagaatccgatacgagcacttttcacggcttcgatgaagatgacctcgaggagcctaggagctgtaggggaaggagatccggaagaggttcgccaactgccgataagaagggctcctgttag

SEQ ID NO: 220031 - DNA, 999 bp, synthetic construct
  misc_feature 1..999: note = Description of Artificial Sequence: Synthetic coding sequence
  source 1..999: mol_type = other DNA
atggaaaaaactcacaggggcccaggacttgccccaggacagatttatacgtacccagccaggtgctggcgaaaaaagcgccgtctcaacatacttgaggatccaaggctcaggccatgcgagtacaagatagattgcgaggccccactgaaaaaggaaggcggactgcccgaagggcctgtgctcgaggctcttctctgcgcggaaactggtgaaaaaaagatagaactcaaggaggaggagacgataatggattgccagaaacagcagctgctggagtttccacacgatctggaggtggaagacttagaagacgacattccacggagaaagaaccgggctaagggtaaggcatatggcattggcggattaagaaaaagacaggacacggcctccctggaagaccgcgacaagccctacgtttgtgacatttgtggcaagcggtataagaaccggccaggactgtcctaccactacacgcacacacaccttgcagaggaggagggtgaagagaatgcagaaaggcacgctctgcccttccacaggaagaataaccataaacagttctataaggaacttgcctgggtcccagaggcacagagaaaacacacagcgaaaaaggcccctgacggaaccgttatcccgaacgggtattgcgacttctgtcttggtgggagcaaaaagacaggctgtcccgaggacctgataagttgcgccgactgcggacgtagcgggcatccttcgtgcttgcagttcactgttaatatgacggccgcagtcagaacctaccgatggcagtgtattgagtgtaaatcttgttcgctctgcggtacctcagaaaatgacgaccagctgctcttttgcgacgattgcgaccgaggctaccacatgtattgccttagtccgcctatggccgaaccgcctgagggctcttggagttgtcatctgtgcctacgacatttgaaagaaaaggcttccgcgtatatcacattaacatag

SEQ ID NO: 220032 - DNA, 1143 bp, synthetic construct
  misc_feature 1..1143: note = Description of Artificial Sequence: Synthetic coding sequence
  source 1..1143: mol_type = other DNA
atgggtggtctctcagcaagacctaccgcagggcgtactgatcccgctggtacatgctggggacaagatcctggctcaaagatggctactgtgattcccggacccctttctcttggcgaggatttctaccgcgaggctatcgaacattgtaggtcctataacgctaggctgtgcgcagagaggagcctgagattaccttttctggatagtcagaccggagttgcccagaataattgctacatctggatggaaaagacccaccgtggcccaggattggctccgggacaaatttacacctatcctgccaggtgttggagaaaaaagagacgactgaatatactggaagatcccaggttgcgcccatgtgaatacaagatagattgtgaggcccctttaaagaaagaaggcggattgccagaaggtcccgtcttagaggcactgctctgtgccgaaaccggagagaaaaagatagagctcaaggaggaggaaaccatcatggattgccagaagcaacaactccttgaattcccccatgacctagaggtggaggatctcgaagacgacatcccaagaaggaaaaatcgcgcaaaaggcaaggcttacggtataggcggtctcaggaaacgacaagacaccgcttctctcgaggatcgggacaagccctacgtgtgtgacaagttttacaaggagctggcctgggtgcccgaggcgcagcgtaagcacacagcgaaaaaggcgcctgatggcacggttatacccaacggctattgtgacttctgcttggggggttcgaaaaaaactggatgccccgaggatctaataagctgtgcggattgtggcagatccggccatccctcctgcctgcaattcacagttaatatgaccgccgcagtgaggacgtaccgatggcagtgcatcgagtgtaaaagctgctccttatgcggtacgtcagagaatgatggagcgtcttgggcgggactcacacctcaggatcagctcctgttctgcgatgactgcgaccgcggataccatatgtattgtctttcaccacctatggccgagcctcccgagggaagttggagttgccatttatgccttagacaccttaaggagaaagcctctgcttacattactttgacatag

SEQ ID NO: 220033 - DNA, 612 bp, synthetic construct
  misc_feature 1..612: note = Description of Artificial Sequence: Synthetic coding sequence
  source 1..612: mol_type = other DNA
atggcgacggcaatccagaatcccctgaaaagcttaggtgaggacttttatcgggaagcgatcgagcactgtaggtcctacaatgcgagactgtgcgccgaacgaagcctcagactgccgtttttggactcacagacaggtgtagcacagaataactgttacatctggatggaaaagacccaccgaggacccggactcgcccctggacagatctacacttaccccgcaaggtgctggcgcaaaaagagacggttgaatattctggaagacccgaggttgcgaccctgcgaatataaaatcgattgtgaggcaccattaaaaaaggaggggggtctcccagagggtccagttcttgaagccctgttgtgcgcagagactggcgaaaagaagatcgaactcaaggaggaggagacaattatggattgtcagaaacagcagctgttggagttcccccacgatctcgaggtcgaggatctagaagacgacattcctcggagaaaaaacagagccaagggaaaagcttacgggattgggggtctgaggaaaagacaggacaccgcttcactcgaggatcgagacaaaccctacgtgtgcgacagcgagtcattctag

SEQ ID NO: 220034 - DNA, 1245 bp, synthetic construct
  misc_feature 1..1245: note = Description of Artificial Sequence: Synthetic coding sequence
  source 1..1245: mol_type = other DNA
atgggagggctcagcgccaggccaacagccggaaggaccgaccctgctggcacctgctggggccaggacccgggatccaagatggccaccgtcataccaggcccactctccctgggagaagatttctatcgggaagcaattgagcactgccgtagctacaatgctaggctgtgcgcggagcgcagtctgcggcttccttttctggatagtcaaacgggcgtggcccagaataattgttacatctggatggagaagacccacaggggaccaggcctggcccctggacagatctatacatatccagcccgatgttggcgtaaaaagcgccgtttgaacatcctcgaggaccctagactgagaccatgcgagtacaagatcgactgtgaggccccattgaagaaagagggcggtctgcccgagggcccagtcctggaggcactgctgtgcgccgaaactggggaaaagaaaattgagcttaaagaagaggaaactattatggattgtcagaaacagcagcttcttgagttcccgcacgacctggaagttgaggacctagaggatgacatccctaggcgtaaaaacagagccaaggggaaagcatatggcattggaggactcaggaaaagacaggacacagcctccttggaggacagggacaaaccctacgtatgcgatatctgcgggaagcgatacaagaaccgacctgggttgagctaccattacactcacacccaccttgcggaggaagaaggggaggagaacgctgaaaggcacgctttgccattccatagaaaaaacaaccacaaacagttttataaggaactggcgtgggttccagaagcacagcgcaaacacaccgcgaagaaagcaccggatggaaccgttatccctaacggttactgtgacttttgcctgggcggatctaagaaaacaggctgccctgaagacctcatcagctgtgctgactgtggaaggagcggccacccatcctgcttgcagttcactgtgaatatgaccgccgctgtgcgcacatacagatggcagtgtattgagtgcaaatcttgttcattatgcggaacgtccgaaaatgatgaccagcttcttttctgcgacgactgtgaccgaggctaccatatgtattgcctgagtcctccaatggccgaaccccctgagggatcatggtcttgtcatctatgtctcagacatctcaaagaaaaggctagtgcttacatcacactcacttag

SEQ ID NO: 220035 - DNA, 1167 bp, synthetic construct
  misc_feature 1..1167: note = Description of Artificial Sequence: Synthetic coding sequence
  source 1..1167: mol_type = other DNA
atggccacagctatccaaaatccgctcaagtccttgggtgaggacttttacagggaagcaattgagcattgcagatcttacaatgcacgactatgtgcagagcgctccctgcggctgcctttccttgattcgcagactggagtggcgcagaacaactgctacatctggatggaaaaaacacacagaggaccagggctcgccccaggtcaaatatacacttatccagctcggtgttggcggaagaaacggagactgaacatcttggaggaccccaggttgagaccgtgcgaatataaaattgattgtgaggctccgttgaaaaaagaaggaggattgccagaggggccagtcctggaggccttgctgtgtgcagaaacaggcgagaaaaaaatcgagcttaaggaagaggagacaattatggactgccagaaacagcaactgcttgagttcccccacgacttagaggtggaggaccttgaagacgatattcctcggcgaaagaaccgtgcgaaaggcaaggcgtacggcattgggggacttcgaaaaagacaggataccgcttctttggaggatagggataagccttacgtctgtgacatttgcggcaagcggtataagaatcgaccaggtttgtcttatcactacacccacactcacctggccgaagaggaaggggaggagaacgcagaacgccacgcgctcccatttcatagaaaaaacaatcacaaacaattctacaaggaattggcttgggttccggaagcccagaggaaacacacagccaaaaaggctcccgacgggacagtaattccaaacgggtattgcgacttctgcctaggaggctcaaagaagacaggctgtcccgaggatttaattagctgtgcagactgtggcaggagcggccacccgtcttgcctccagtttaccgtgaacatgactgctgccgtgcggacatatcgctggcagtgcatagagtgtaagtcctgtagcctgtgcgggacgtctgagaacgacgaccaactgttgttctgcgatgattgcgacagaggctatcatatgtactgtctgtcacccccaatggctgagcctcctgaagggtcatggtcttgtcatctgtgtctacgacacctgaaagagaaggcctccgcttatatcaccctcacgtag

SEQ ID NO: 220036 - DNA, 1176 bp, synthetic construct
  misc_feature 1..1176: note = Description of Artificial Sequence: Synthetic coding sequence
  source 1..1176: mol_type = other DNA
atggccgcagtggtagaaaacgtcgtaaaacttcttggagaacagtactacaaagatgcgatggagcaatgtcacaactacaatgcgaggctctgtgctgagcgcagcgttaggctgccctttctcgattcccagacgggtgtcgcacagtccaattgttacatctggatggagaagcggcataggggccctggactggccagcggccaattatatagttatcccgcacgcaggtggcggaaaaaacgacgggctcacccccctgaagatcccaggctgtccttccccagcatcaagcctgacacagaccaaactctcaagaaagagggactgataagccaggatggcagcagtctggaggccctgctaaggacagatcccctcgaaaagagaggtgcccctgatccccgtgtagacgacgactctctgggagagtttcccgtgacaaactctcgagccagaaaacgcatcctggagcccgacgattttctcgatgacctggacgacgaggattacgaggaagatacccccaagcgacgcggaaagggcaaatcgaaaggcaagggagtgggctctgctaggaagaaattagatgcaagtatcctggaagaccgggataagccatacgcctgtgatatatgtggaaagcggtataagaaccgccctgggctttcataccattacgcccattcacacctagccgaggaggagggagaagacaaggaagattctcagcctccgacaccagtgagccagcgctcggaagagcagaagagtaaaaagggccctgatggcctggccctgcctaataattactgtgacttttgtcttggcgactctaaaataaacaagaagaccgggcagcccgaagagctcgtgagctgtagtgactgtgggagatccggtcacccttcttgccttcagttcacacctgtcatgatggcagctgttaaaacgtaccggtggcaatgtattgagtgcaagtgctgtaacatctgtggcacttctgagaacgatgatcagttgcttttctgtgatgattgtgatcggggatatcatatgtactgtctgactccgtccatgagcgaaccccctgagggaagctggtcatgtcatttgtgtctagatttgctgaaagagaaggccagtatctatcaaaatcagaattcaagctag

SEQ ID NO: 220037 - DNA, 1134 bp, synthetic construct
  misc_feature 1..1134: note = Description of Artificial Sequence: Synthetic coding sequence
  source 1..1134: mol_type = other DNA
tcatctattattcagaaccggctcaaaaagctcggagaccagttctataaagaggcgatcgagcactgccgctcttacaatagtagactgtgtgctgaaagatcagtgagactgcctttcttggattcacagactggggtggctcagaacaactgctacatctggatggaaaaacgccatcgtggcccagggctcgcacccggacagttatacacttaccccgctagatgttggcggaaaaaacggaggttgcacccgccagaggacccaaagctacgcctactggagatcaagccggaggtcgaacttccattaaaaaaggacggttttacttccgaatcaaccacattggaagccctgctacgaggggaaggggtggagaagaaggtcgatgccagagaagaagaatccatccaggagatccaacgcgttctcgaaaatgatgaaaacgtggaagaaggaaacgaggaagaagatctagaggaagacattccaaaacggaagaacagaacacgcggtcgcgctcgcggttccgccggaggtaggcggagacatgatgcagctagccaagaggaccacgacaaaccctatgtgtgtgacatttgcggaaagaggtacaaaaacaggcccggactgagctaccactatgcccacacccacttagcttccgaggagggagatgaggcgcaagaccaggaaactcggagccccccaaaccaccgaaacgaaaatcatagacctcagaaaggtcctgatggaacggttatacccaataattactgcgatttttgcctgggcggttctaatatgaacaaaaaatcaggccgtcccgaggaactggtctcttgtgccgactgtggccgtagcggccaccctacttgtcttcaattcaccttgaacatgactgaagcagtcaaaacctacaagtggcaatgcattgaatgtaagtcttgtatcctgtgtggcacttctgagaatgacgatcagctgctcttttgcgacgattgcgacagaggataccacatgtactgtctaaatcctcccgtggctgagccacctgagggatcttggtcatgtcatctctgttgggaactgttgaaagagaaggcgtccgcgtttgggtgccaggcttag

SEQ ID NO: 220038 - DNA, 1074 bp, synthetic construct
  misc_feature 1..1074: note = Description of Artificial Sequence: Synthetic coding sequence
  source 1..1074: mol_type = other DNA
atggcaactgttattcataatccacttaaggccttgggggaccagttttataaggaagcaattgaacattgtcgttcctataacagtagactgtgcgctgagagatccgtgaggctgccatttttggactcacagacaggcgtcgcccagaacaactgctacatatggatggagaagcgtcaccgcggacctggtctggcgcctggccagctttacacttaccccgctcgatgctggaggaagaaaaggcggttgcaccctcccgaagaccctaagctgcgtctattggagatcaagcctgaagtggagttgcctttgaaaaaggacggctttacttccgagtccacaactctggaggccctcctgcgcggtgaaggcgtcgagaagaaggttgatgcacgggaagaggagtcgatccaggagatccaaagggtgctagagaatgatgaaaatgtggaagaggggaacgaggaggaggatctggaagaagacattccaaagcgaaagaacagaaccagaggcagagctcgcggttcagcaggaggtaggcgtcgacacgacgcggcaagccaagaggatcatgacaagccctacgtgtgcgatatatgtggaaagaggtacaagaacagacccggattgagttatcattatgcacatactcacctggctagtgaagaaggtgatgaggctcaagaccaggagacacgatctccacctaaccaccggaacgagaatcaccggccacagaaaggacccgatggaacagtgatcccgaataattattgtgacttttgcctggggggttcaaatatgaacaagaagtccggaagaccagaggagttagtgtcgtgtgctgattgtgggcgaagcgcccatttgggcggtgagggcaggaaagaaaaagaggctgccgctgccgcacgcaccacagaggaccttttcggctctactagtgagtccgacacatctacgtttcacgggtttgacgaagatgacctggaggaaccaaggtcatgccgagggaggcgatccggccgaggctctcctacagctgacaagaagggttcctgttag

SEQ ID NO: 220039 - DNA, 1137 bp, synthetic construct
  misc_feature 1..1137: note = Description of Artificial Sequence: Synthetic coding sequence
  source 1..1137: mol_type = other DNA
atggcaactgtcattcataacccccttaaggccctgggggatcaattttacaaagaggccattgagcactgtcgatcgtacaatagtcgcctttgcgccgaacggtccgtgcgtctgccatttctggactctcagacaggagtggcccagaataattgctatatctggatggagaaaagacacagagggcctggacttgccccaggccagctgtatacgtaccctgcccgatgttggcggaagaaaaggcgccttcatcctcctgaggaccccaaattgagactcctggagatcaagccggaggtagagcttccactgaaaaaggacgggtttacatccgagtcaacaaccctagaagcattgttacggggtgaaggggtagaaaagaaggtagatgcaagagaggaggagtctattcaggagatccagagagtcctcgaaaacgacgaaaacgtggaagagggaaacgaagaggaggacctggaggaggatattcctaagagaaagaaccggacacgagggcgagcaaggggtagtgcgggaggacgcaggagacacgacgccgcaagccaggaggaccatgacaaaccctatgtgtgtgacatttgcgggaagaggtataaaaatcggccaggactctcgtaccactacgctcatacccacctggcctccgaagagggggatgaggctcaagaccaggagactagatctccaccaaatcacaggaacgaaaaccatagaccacaaaagggaccggacggaaccgtgatcccaaataactattgtgacttttgtttgggtgggagtaacatgaacaagaagagtgggcgaccagaggaactcgtgtcatgtgctgactgcggtcggtctggccaccccacctgcctgcagtttaccctcaatatgaccgaagctgttaagacctacaaatggcagtgtattgaatgcaaatcgtgtattctttgcggcacatctgaaaacgacgaccagttattattttgtgatgactgtgatcgagggtatcacatgtactgcctaaatccccctgtcgcagagccaccagagggcagttggagctgccatctgtgctgggagctgctcaaagagaaagcctctgcttttggatgtcaggcctag

SEQ ID NO: 220040 - DNA, 4110 bp, synthetic construct
  misc_feature 1..4110: note = Description of Artificial Sequence: Synthetic coding sequence
  source 1..4110: mol_type = other DNA
atgagcccatgtggtagaaagatgggcgagggaagacagcagcgtcgtgccccagtgggtaaactcctgctgctacccggacgcagggatactccacacgggagaagcggctcctctggtgcgagaacccagcgtagcctgctgtggctgctcgtacatgtgtggctgtgggcagcgagtggaagctctgcccagctcttcaaccttacgctgtcagtggatgagggtctgcctcctgatacactggtgggggatatacgggcaggtttgcctgccgctcaacagcaagagggaagcggcttttttctctctgaggattctgatgactcccctctgttggatgatttccacgtccacccggacacaggtatcatccgaacagctcgtaggctggaccgggaaaggagagatcactatagttttgttgccgctaccctgctgggggcagtggttcaggtggaaattcgggtgaatgatgtgaacgaccatagcccaagattccctctcgactctttgcagctggacgtgtctgaactgtctccacctggcacagcatttcgcctgccagtggcccacgatccagatgcagggctcttcagcactcaaggctacacccttgtccagcctagcgacctgcccaaggacccggcaggacccttctttcaacttagataccggacaccaggaccccttccgtctccattgctcccaggcagctcttcgccattagagcccttggatttggtgctccttcgaagactggaccgggaagaggccgctgctcacagattacaaatcgaagcctgggacggaggcaggccacgcagaactggcttactgtccgtggaactcagggtcctcgacgaaaatgataatcctcccgtctttgaacaagacgagtatcgagccgctgtgagggaggacgcacagccaggcgctgaagtatgccgggtgagggctaccgaccgagatctcgggccaaatggtttcgttcggtactccgttagagcacggcaggtgcccggagcagggtctggtgggggtgctctgggcgacgcagcatactttgcagtggaggagctctccggggtggtacgggtatggcggcctctggatagagaggcacaggcatggcatcaactcgtagtagaggctcgtgacgggggagccgaacctgaagtggctacggttcgggtcagtatcgccgtactcgacgttaacgacaacaggccagctattcacgtcttgtttttgaccgaggggggtgtggccagagttagcgagggggcaaggccgggagactatgtggctagagtctctgtgtctgacgctgacggcgactgggaaaaggaggatgaagccaccggtgagcttggtgtcggactcggagatggtagcattagcctgtcccttgagggaggggagggtgacttcgcactgctgcctggaggcccaccaggagtttttttcctgtgtgtggagggacccttagacagggagtctagggatctgtatgaactgctattagttgctactgatgccggatctccccctttgagtacagaagagactctgctgttgcgagtggcagatttgaacgatcagccccctctgttctctcaacagcactataaagctagcgttagcgaagcggctgcacctgggacagtggtgatgtgggtttcggccagcgacgctgatgaagcgggttcggaccacgcttggctccggtataccgtggtgcagctgtcggcgccttgtaacctgggcagccttcagtccaagatggtgcacactgccgagtgcggtccatctttcgccatagacagtgaatctggtgcaatatctacaatccgcacactggatcgggaggtccaggaagccgtagagctcaaagtcgttgcccaggaccttggagaaccacctcttagtgccacctgcttagtaagtatcaccgtggatgatgtcaatgataatgagccaatcttttggaggcaagtgtataacgcgacaattgctgaacatgcacctgtaggacactgcttcctgcaggttaccgcatctgacgcggactcagggctgtacggcttcattgaatacagtctatacgatggatttctgtcgtatgaggcccctcaagcatttagaattgacccacacgacggtcaaatatgtgtctcccaagacatcgacagggagcgcgatccagcgacatacgatctgcttgttgaagcaaaggatggcggtggtctgagcgcacaggcctttgtgcgcgtggatctggaggatgtgaacgacaatcatcctgtgttcaatcctagtacctatgtgacgtcaatcagcgatgaaacccaaccgggaacagaaattatcaacgtgctcgctaccgaccaggactctggaatctacgggaccgtggcttacgaacttataccgggaaacgtatccagcctgtttactatcgatagcaccaccgggatcatctatttgaccttgcctctcagccatctggagtctaccactctgtccctcatggtttctgcgcaagatggtgggggacttacagcagtcattaatgcagatgtgacgattcacatattccagacgacactcgcccctgccgagttcgaacggccaaagtacaccttcctggtgtacgaagacgtgcctgaagatagcccaatcggcactgtgaaagccagagaaccgcttaattcttcagagcccattttttacaggataagttcaggggatctaggtggcaagttctccatccacccccgtctggggaccatccgcacccgtaagcctttggaccacgaaacacagcccgtcgtggtcctcaccgtgcaggcacaactaggatctgcccctgcatgcagctctactgaggtgaacatcaccgtgatggacgttaacgacaaccaccccgcttttttgaggaccagcgacgagattcggatttctcagaccaccccaccagggacagctttatatctcgccagagcagaggaccgggacagcggacgtaacggtcttattagatacagtatagcgagtccccaacccggagtgtttgctatagatcgggctcttggggtgctgttcctgaacgggtccctcggcgcaggagagcaacgagaactgactctgactttgagagccgaggaccaaggagtacatccacaggctgctctacttgtgttgacagtagtcatcgagaaaagggagcacagtccatcctggacatttgaacatctggtttaccaggtagaggtgtctgaaagtctgtccccaatgactcagatgctacagacccaagctcacccccttgggcctcagcgagccgcatcccctctacggtactccctggagccatccgttgattccgctatgtttggaatccggccatacacaggttggatctaccttaggagacagttcgactatgagtccacccaaacttacaattttcgcgtgtttgcttggatacctgaggacggattcctgcagaatgtgagcactaccgttatagtccgagtctgggatgagaacgacaattcacccactttcctccacgatgtcctgtttctaaaagtggaggagtctcctgtcccccaaggcgtaatagggaagattaccgctatcgacatggactccggcaagaatgggcagctactctattttctgttaagcgacggaaaatttttcaagatgaatcccaacaccggggagcttatcaattgggtggccctggacagagaacaccgtggacatcatgagatgaccgtgctggtgacggatcgtggatcccctcccaggaacgctacaatggccgtgtacgttagcgtgactgacattaatgataatcgtcccttctttccacagtgcttacccggaaaggagcttcacgtcaaggtcctggaagggcagcccgttaatatgcttgtgactaccgtctttgccaaagacccagatgagggtaataatgctgaagtcacctattcggtttcttccgctaggccaatgccactgaaaggcaaaactgccttcgggaagcaaagttgcaaaaagcagacaaataaacagaccaataagattttgacttag

SEQ ID NO: 220041 - DNA, 8750 bp, synthetic construct
  misc_feature 1..8750: note = Description of Artificial Sequence: Synthetic coding sequence
  source 1..8750: mol_type = other DNA
atgaggctggatgagatcaccaaatccgaaaacgaggacggagaaaaaaagatgttcacacagcagttcgagtcaacagacgcctgcgtgtatgaggtttatgttaaaattaattctatagttaaatcacagagtcagtgtggacttaagagggggtctcccgaaaccgaattgtggggcgcaattgttttccgctcccaggaagagaacgcaaagcccgtcaaagagacagaggtcaccgcttccgatgccgactccggactgtatgggtttatcgagtattccctgtatgatgggttcttgagttacgaggctccgcaagcattccgaatcgatccccacgatgggcagatctgcgtaagccaagatatcgatcgggaacgcgaccctgctacttacgacctgctcgttgaggccaaggacggggacgaacagcggatgacccacctggccctggtgaaagggggactctccgcccaagccttcgtccgggtagacctggaggacgtgaatgataaccacccagtgtttaatccttctacctatgtgacttccattagcgatgaaactcagccaggtaccgaaattatcaacgtcttagctacagatcaggactctggcatttacggcacagtggcctacgagctgattccagggaatgtcagttcgctctttacaatcgatagcacaaccgggctgtacagccctgaagtggagatcctctctgctgtgaatttcagcgcagacaaggaggtgatgaactcgcttgaaatgtttctcccattacttagacattttaaaaaagttgagcgcgatgaggaagccgcagaaaaaaagttcgaagctagcagggggtggtttatgcgctttaaaggcaggcgccatctccactacctgaaggtccaggatgaagccgctagcgccgatggtgaggccgcagccaggtatgtagctaatctggcgaagatcctgggagaggggattatttatctcacattgcccctgagtcacctggagagtaccactctaagccttatggtttctgcccaggacggcggtggcctaaccgccgtgatcaatgccgatgttaccatccatattttccagactacactagcccctgccgagttcgagaggcccaaatacacttttctggtatacgaagacgttccagaggattcccccataggcactgtgaaggctcgtgagcccctcaacagcagtgagccaatcttttaccgcatctcttcaggcgacctcgggggaaagttctcaattcacccacggcttgggactatcaggactaggaagccactagatcacgagacccagcccgtggttgttctgacagtacaggcccagctgggatcagctccagcatgttccagcaccgaggtcaatataactgtgatggatgtcaatgataatcatcctgcgtttctccggacatcagatgagatccgcatctctcagacaacccctccaggcacagccttgtaccttgctagggctgaggaccgggacagcggtaggaatggattgatacgttatagcattgcgtccccccagccgggagtcttcgccattgatagagcgctgggagtcctgttcctgaatggatcgctgggagccggagaacagcgggaactcacgcttaccctgcgcgctgaggaccagggcgtccacccacaggccgcactgctggtcttaactgtggtgatcgaaaagagggagcattcccctagttggacatttgaacacctcgtctaccaggtcgaagtaagcgaatctctgtcacctatgacccagatgctccagacacaggcgcatccattggggcctcagcgggctgcgagcccacttaggtacagtctcgagccttccgtggactcggcaatgttcgggataagaccctataccggatggatataccttaggagacagttcgattacgagtccacccaaacatataactttcgagtattcgcttggattcctgaggatgggttccttcagaacgtgagcacgacagtgatagttcgcgtgtgggatgagaatgataatagcccaacattcctccatgacgttttgtttttgaaggttgaagaatcgccagtgccacaaggggttatcgggaagatcactgctattgacatggactcagggaaaaacggccagctgctgtactttctactttcggacggaaaatttttcaaaatgaacccgaatacaggtccggcaggcactatctacgtgattacctgggcggatggcgctgccgcattctcaggtaccgactttgccttctcaagtgatgagctgcaggctttcgtgttgaagagtttattctgtgaactgggtgaaggcgagttgattaactgggtcgcgcttgaccgcgagcacaggggtcatcatgagatgactgtccttgtgacggacagaggatcgccccctagaaacgcaaccatggcagtgtatgtgagtgtgaccgacatcaacgataatcggccattctttccacagtgcctgcccggaaaggaactccatgtgaaagtgttagaagggcaaccagtgaacatgctggttaccaccgtttttgcaaaggatccagatgaaggtaacaacgcagaggtgacatattcagtatccagtgaggacagcagtgatcactttaaaattgatgctaacaatggtgagatccgtactacgacaatcctgagctacgattatcgtccatcttatcgcatgagtgtgattgccactgaccaaggggtcccccctctgcagggacaggcagttgtcaatatccaggttatccctctgagtaaggggcgagcgattatgagccagaatatcaggcacctcattattcctgagaacctgaaacccaccaagattatgtcgctcattaaatcttctgaccatctgcagcaacactacaacggcaagttgcatttttccatcgtggccgacgacaaggatggacacttcgagattgactcttcaacaggggacttgttcctatccaaggagttggactacgaaaccactagccattatctgtttagagtgataaccactgaccattcgaagaatctctccctgagttcgacagtcttcctgagcatcgacgttgaggaccagaatgatcatagcccatcattccaggatgagttgatcgtgatttccgtcgaagaaaacgtgccaataggcaccttagtgtatgtatttaacgctaaagatgacgatgggtctttcttgaacagccgaatccagtattacatcgaatcccataaccccggaactaatccttttctcattcacccctctttcggtaccctggtcactgtgagcaggctggaccgtgaaagcatacctacagtcatcctcactgtgactgcctccgatcaggcagttaacgtgacggataggcgactgcggtcactgacagcacagatcgtcatccttgacgttaacgaccataatcctacattcattagctttcctaatgctcacgtgaaggaggatgttaccgtaggctccctcgtgcatcatattacagcccacgaccccgatgaaggccgtaatggtaaggttacatactcaatacttagtggcaatgaaaatatgacttttatgttggatgaatcctcaggcctgctaaccacaacctgccccctggactacgagatgaaaacacagcatattctgaccgtactggccctggacgatggtacacccgcactgagctcatctcaaacccttaccgttaccgtgttggatgtcaatgatgaggcccctgtattcaaacaacacctgtatgaagccagcgtgaaggaaaaccagaatcccggagaatttgtgacccgcgtggaggcattggacagggactctggcgtcaacagcaagctgcagtttgaaatcatgcctggagcaagtttcgaactctttgagattaactctgacacaggagaagtggtgaccaccacgatactggatcgggagatccaggaggtgtttacgctcagggtcttggtgagagacggcggtttcccaagcttatcgagtacgaccacaatcctctgcacagtggaggacgagaacgaccacgcccctgagtttatcgtgagttcctatgatatcgaagttcttgagaatcaggagccagaggtcgtatatactgtgctggctagcgatatggatgccggaaataatcgagccgtagagtaccatatcatcgacggcaacaccgacgagtgtttcacaatcaacgagatgtccggggagttatcaactacgagggccttggaccgtgagcagatctccaactttaccctcgtgatactttgcagcgacctgggtgatccccctagatccagcgttatccatctccaggtccgcgtcctggacgccaacgatcatagccctagctttccaaccctctattatcagtccagcgttcgcgaagatgccgaagttggcaccgtggtcctagtgctatccgctgtagataaagacgaagggctgaacgggcagaccgagtactttctgactgatgaggcatccggggctttcacaattgaccctatgtctggaaccctgaaaacctctaacaccctggatagagaggcccgaagtcagcatacattctctgctgttgccagggactgctcaatccaagggtcccgaagtacaactgtgattattaaagtttacgtaactgacgtaaacgataacgatcctgtattggagcagaatccctttgatgttttcctgtcaccagagagccctacaaatcaaaccactgtgattgtgcgcgcagatgatttagacctgggaccaaacggcacggtcgtgttttcctttgctgaaacccaaagcatgttttctatcgacaaatatacaggtgaaatccagttccaacagaatcccagttctgaatattttccgatatggctgcaactcaaggtcacagatcagggcatacctgccaggactactacgggcctactggtcattcacatggagggtgaagacgtcaagatttccttcagccaccacctgtataagggactggtaacagagaactgtgaggccggtaccagtattgttaccgttaaggcgttcgcacccgattctattcaggacagcatgaaatactcgatcttttctggcaacgaagatggcgtgttgtctctctgttccaaaagcgggcagttgactgttaaggagccaaaatttctggattttgaggtgaggaacgaggtacagctgattgtactggctgaatcgtccggccaccgggcatactgcaaggtggctgtccttatccaggatgagaacgacaatagcccatgttttgagcagagtatctatcaagcttccgtttcagagagccagttgtacaacgcacacgtgatacaggtgtttgctaccgaccttgattccggtctgaatgggctgattgagtactccatcctgtctggcaaccaggaggaggcctttcagatagacgctctttctggcgtgatcactaccaaagctatcctcgattacgaacttacctccagctatagcctcatcgtccaagccactgataaaggaatgcctagactcagcaacaccaccgtgattaaggtgcaggttacagatatcaatgataatgcacctgccttcctcccaagcgaggctgtcgagatcactgaagacagtttaccaggtgtcattgtcacacatgtttccgtgcatgatgttgaccttaattcagcattcatctttagttttgccaaagagtctaatcccggaactaagtttgctattgaccagaacaccggtgtcgtcgtcctggtcaaaacattagatttcgaggaaatgacagagtacgaactgctgatccaaattagcgacagcgtccattacaccgaaggtgctctcgtggtgcgcgtactagacgtgaacgacaacccacccgtgtttagtcaggacttctaccaggtaacagtgcctgaaagcatcccagtgggatactctgtgttgacacttagcgcgaccgacctggagtctaacgaaaatatctcctatcggatactgtccagttccaaggaattttccattgatccaaaaaatgggacgatctttaccatctcaccagtgctgctgctggacaccatcagcaccacacaatttttagtagaggcttccgacggagggaatccggatctaagagccttaactcttgtagagattggcatcgaagatatgaacaattatgcgcctgagttcactgttaagagctataacctgtccttaagtgaagacgccctcgtgggaagtacactggtgactttctccaacatcgaccatgattggacaagggagaacacctatgtggaatactctattatctccggcaacagccagaataacttccatgtcgagacgaaattctttcatagcgaatacccttacaagcaggtgggctatttggtcttattgcattctctagatcgagaggcaagtgcttctcatgaactcgtaatcctggccagcgattccggctgtcctcccctcagcagtaccgctgtaatttccatacaggtgctggacgtcaatgataatccgcctaacttctcgagtttatcttaccacacacacgtcaaggagtcaacgcccttgggtagccatatcacagtagtaagcgctaacgatcgggataccggtagccacgctgaaatcatttataacattatttccgggaacgaaaaaggccatttctacttggaagagaacaccggagtcctctacctcatcaagccccttgactatgagaagatgactaaatttactctgacggtccaggcatccgacgctgagaagaagcacttctcattcgcagttgtgttcgtgtcagtgctggatgataacgaccacgccccacaatttatgttcagctctttctcctgtattgtgcctgaaaacctccccatcagcagtactatatgcagtataaatgcacttgactttgatgccggtccctacggtgagctgacctacagcattgtgagcccctgtttccttactcacgggatgtcctacgaccatgatctttttctgatcgaccccttgaccggcgacatccacgcaaagcaaattttggactatgaaaatggtaataagtattgcttaacggtgcaagctaaggacaaaggcgacgcaaccgccagtctggtggtatgggtcgacattgaaggaatcgatgagttcgaacctatctttacccaggatcaatattttttcaccctccctgagaagaataaagaccggcagcttattggaagagttgaggcctccgacgccgatgcaggtattgacggggtgattttgtattctctgggcacatcctcacccttctttagtgtaaataagactaatgggaacatatatctgattcgagccctgccgctcattaaaagtcagttaaacaaggaagataccctggaaatgaaaattatcgctcattcacctaaatcggactccaaatttgcctcctgcacagtattcgtcaatgtatcgttctctagcgaagggactccccttgcagtttttgcttcttccttttctatcagtcttgttgtgagctttctcgttttccttatcctgatctgcatcctgattgtcatgattctgaggcataagcagaaggacaccatcaacaactacgaagaaaaaaagacgagcagtctggatgccgatctgcgcgtgaccagggacgcttctgtactgaaggccttccagaaaacggacgactgtagcaatgaagtcgtgccagtggacgctactcccgaatggctcagtctcatctctatcatggagaaagatatagtgaacttgtacagacactctaattcttcgggacattgtagcgttgagggagaaacagcagaagacaaagagatacagaggattaacgagcatccgtaccgtaaatgctctgattctgctctgtctgatcatgagtcaagagtgccggactccggcatccccagggactccgatcagctgtcttgcctctcaggggagactgacgtcatggtcacagctgaaacagccgaggcaagtcagaccttcggagagggcgaccaaggcgaggggtgctcaactacctgcgcccagaacaacgtcctgcctcaaacagtgcagaaacgggaagcaaaggagtctatcctggctgacgtgcggaaggagtcggtctttattagcggcgaccaggaagtccgatgtgccgctcttagtactcaaacaacctcagaccacgacggtaaggataactaccattggaattacttgctgtcttgggagcctaagttccagcctctggcctcagtgttcaacgacattgccaaactaaaggacgaacatctgcatatgcccggaatccctaaagagaagaaatcattcgtgttccctccaccattgattaccgctgtagcccagcccggaatcaaggccgtgcctccacggatgcccgctgtcaacttggggcaggtaccacctaagcacccacgcagccccatcccatatcacctgggctccctccctgaaggaatgaccccaaacttttccccttccctttctctgctcactatgcaaccgccagctctgtctcctctgctgagagagggcgaactcttaggtacgcatatcagtggcacgtgtcacgaactgaaagctgaagacgaggtacagattta

SEQ ID NO: 220042 - DNA, 2130 bp, synthetic construct
  misc_feature 1..2130: note = Description of Artificial Sequence: Synthetic coding sequence
  source 1..2130: mol_type = other DNA
atgagcccttgtggacgaaaaatgggcgaaggccgtcagcagagacgcgcacctgtcggtaaattactgctgctccctgggagaagggacacaccacatggtcggtctggttccagcggcgcacgaacacagcggtcccttctatggctgctggtccacgtttggctctgggctgcatctgggagctccgcccaattatttaatctgaccctcagtgtcgacgagggactgccacccgacacgctcgtgggagacattagggctggcctgcctgctgcacagcagcaggaaggctccggcttttttctaagcgaagacagcgacgacagtccacttctggatgattttcacgttcatcctgacactggtattatcagaactgcccgacgcttagacagagagagacgggatcactatagtttcgttgctgctacgttgttgggcgctgtggtacaggtagagatccgggtcaacgacgttaatgaccacagtcctcgttttccacttgatagtcttcagctggatgtgtcagaactgtctccgcctgggacagcatttagactgccggtggcacacgaccccgatgccggactgttcagcacgcagggctacaccctggtgcaaccgtccgacctgccgaaggacccagccggacctttctttcagctgaggtaccgtacaccaggaccactgccatccccactgttgccagggagcagctctcccttagagcctctggatttggtcctcttgcgcagactcgatcgcgaggaggccgctgcccaccgtctgcagatcgaggcttgggatggaggccgtcctaggcgaaccggccttctgtcagtggagctgcgagttctggacgaaaatgacaacccccctgtgttcgagcaggacgaatacagagctgccgtacgggaggatgcccagcctggcgcagaagtgtgccgcgtcagggctacagatagagatctgggtcccaacggattcgtcagatatagcgtaagagccaggcaggtgccaggcgctgggtccggcggaggcgctctgggcgatgcagcctacttcgctgttgaggagctgagcggggtggtgagggtttggagaccgctggatagggaagcccaggcctggcatcagctggtggtggaggctcgggatggcggagccgaaccagaggttgccacggtgcgggtttccatcgcggtgctcgacgtgaacgataatcggccagctattcacgtgctgttcctgaccgagggtggcgtggcacgggttagcgagggagctagaccaggtgactatgtagccagggtttctgtttcagatgctgacggcgactgggagaaggaagatgaggccactggagaattgggggtaggcctcggtgatggctcaattagcctgagcctggaaggtggagagggggatttcgcgctgctccccggaggccctccaggggtgttcttcctgtgcgtcgaaggccctctcgatagggagtccagggatctttatgagcttctcctggtggccacagacgcagggagtcctcccctgagtactgaggagactctgttgctgagagtcgcagacctaaatgaccagccaccacttttctcacagcagcattacaaggcttcggtgagtgaggccgcagccccaggcactgtggtcatgtgggtctctgctagcgatgcagacgaagccggaagcgatcacgcctggcttcgctatacagtcgtgcagctttcagctccctgtaatctcggttcactgcaaagcaagatggtacacacagcagagtgtggaccatcatttgccattgactctgagtctggtgccattagcacaattaggaccttagacagggaagtgcaggaggccgtggagctcaaggtggtggcccaggacttgggggaacctcccctctcagccacatgcttagtttcgattacagtggacgatgtaaacgataacgaacctatattctggaggcaggtttacaatgcaactatcgccgaacatgctccagtgggccactgtttcctgcagctgatttctgcccaagtagccttcgttaaaatcaagcagaaacagaaagagatccaggaaaagcaaaaccttgcctag

SEQ ID NO: 220043 - DNA, 2109 bp, synthetic construct
  misc_feature 1..2109: note = Description of Artificial Sequence: Synthetic coding sequence
  source 1..2109: mol_type = other DNA
atgggggaaggcaggcagcaaaggcgggctcccgtcgggaaattactcctgctgcccggaaggcgtgacacgcctcacggcaggtcgggcagcagtggggctagaactcagcgttctttgctgtggctacttgtacatgtctggctctgggccgcttctggatcctccgctcaactgttcaatctgactctgagtgtcgacgaaggcttgcctcctgatactttggtgggggatatcagagcgggtctgccagccgctcagcagcaggaaggctccgggttctttctttcagaagattctgacgacagtccacttctggacgacttccacgtgcaccccgacactgggattattcgcactgccaggcggttggaccgagaaagaagagaccattactcattcgtcgccgctactctcctcggggctgtcgtgcaggtagagatccgtgtcaatgatgtaaacgaccattcaccccgttttcctcttgactccttacagttagatgtgtctgagttgagccctcctggaactgcctttcgcctgcccgttgcccacgatccggacgcaggcctcttctcaactcaaggttatacactagtgcagccctccgacctgccaaaagatccagctggtccttttttccagcttcgctaccggactcccggtcctctcccctctcctttattaccgggaagcagttcacctctggagccgctggacctggtattgttgaggcgtctcgatcgcgaagaggctgccgctcatcggctgcaaatagaagcctgggatggcggaagaccccgtagaacgggactgctgagtgtggaactgagggtgttggacgagaacgataatccaccagtctttgagcaggacgaatatcgcgctgccgtgcgcgaagacgcacagcctggtgcggaagtctgtagagttcgcgctaccgatagggatctcggccctaatggcttcgttcgctactcagtgcgcgcaagacaggtgcccggagccggatctggcggtggggctctaggtgatgcagcctattttgccgtggaagaactcagcggagtcgtgagggtctggcgcccactcgatcgggaagcgcaggcctggcatcaactcgtggtagaagcacgggatgggggtgctgagccagaagtggctactgtgagagtgagtattgctgttcttgatgtcaatgacaaccggcctgccattcacgtgctctttcttacagagggtggggtcgcgagggtgtccgaaggcgctcgcccaggcgattacgtggcacgggtgagtgtgtccgacgcagacggagattgggagaaagaggacgaggctaccggggaactaggagtgggcctcggtgacgggtcaatctcactttccctggagggcggagagggggattttgccctactgccaggtgggcctcccggagtgttttttctttgcgttgagggtccactggaccgtgagtcccgagatctatacgaactgctgctggtagcaactgacgctggaagcccccctctgtccaccgaagagaccctgctcctgcgcgtggctgacctcaacgaccagccaccattgtttagtcagcagcactacaaagcctccgtttccgaggccgcagctcccggaaccgtggtgatgtgggtgagtgccagtgacgctgatgaggctggttctgaccatgcctggctgagatataccgtggtccagctctccgccccttgtaatcttgggagcttgcagagcaaaatggttcatacagccgaatgtggaccatcatttgctattgatagcgaaagtggcgctatcagcacgattcgaacccttgatagagaggtgcaggaagccgtggagctcaaggtggtggcacaggatctaggagagccacctcttagtgccacatgtctggtcagcatcaccgtggatgacgttaatgataacgagcctatcttttggcgccaggtgtataatgctaccatcgcagaacatgccccagtgggtcactgcttcctccagctcatatctgcccaggtcgcttttgtcaaaattaagcagaagcagaaggagattcaggaaaagcagaatctggcctag

SEQ ID NO: 220044 - DNA, 4101 bp, synthetic construct
  misc_feature 1..4101: note = Description of Artificial Sequence: Synthetic coding sequence
  source 1..4101: mol_type = other DNA
atgagcccatgtggccgtaaaatgggtgaaggccgtcagcagcgccgagcccctgtgggcaagctgctgctgctgcccggaagaagggatacccctcacggcaggtccggatcctctggggcacgcacccagagaagcctgctgtggctcctcgtgcatgtgtggctttgggcagcctcgggctcttccgcacagctcttcaatttaacactgtcggttgacgagggcctacctccagatacccttgtgggcgacattcgagctgggctgcccgcagctcagcagcaagaaggcagcggttttttcttgtcagaagactctgacgattccccactgttggatgacttccacgtccatccagacacaggcataatcaggaccgccagacgcttggatagggagagacgcgaccactactcttttgtggctgcaacgctgctgggcgcagtcgtccaggtggagattagggtgaacgacgttaatgaccacagccctaggtttcccctcgacagcctccagctggacgtgtccgagctttctccgcctggtaccgccttccggctgcctgtggcccacgatccagacgccggactcttcagcactcagggatacacactggtgcagccaagtgacttacccaaggatcctgctgggcctttttttcaactccgctatcgaacccctggcccattgcctagtccgcttctgcctggatcttcgtccccgcttgaacccctggatctcgtgctacttcgcaggctcgatagagaggaggcagctgcccatagacttcagatcgaggcctgggacggagggaggcccaggcggaccggtttattatccgtggaattaagagtgttggatgaaaacgataacccccctgtgtttgagcaagatgagtatagggcagccgtccgcgaggatgcacagccaggagctgaggtgtgcagagtgcgggcaacagatcgcgatttagggcctaacggcttcgtgcgatattccgtgcgggcacgccaggttcccggtgccggatccgggggtggggctctgggagatgccgcatactttgcagttgaggagctctcgggagtggtacgggtgtggaggcctctagaccgcgaagctcaggcctggcaccagttagttgtggaggcccgagatggaggggcagaacccgaagttgcgacggttagggtctcaatagcggtcctggatgtgaatgataaccgcccagccatccatgtactgtttcttacggaggggggtgtggcaagagtctctgagggtgcccgtccaggcgactatgttgctcgagtaagcgtcagcgatgccgatggagactgggaaaaggaggacgaagccactggagagctcggtgtagggctcggcgatggcagcatttcactgagtttggagggcggagaaggcgatttcgccctgctgccagggggaccaccaggcgttttcttcctgtgtgtggaaggccctctcgacagggagagcagagacctgtatgaactgctcttggtggcgacagatgctgggtcgcctccactttcaaccgaggagactcttctgctgcgcgttgccgacctgaatgatcagccgcctctcttctctcagcagcactataaagcctctgtcagcgaagcagcagccccaggcaccgtcgtgatgtgggtctctgcttctgatgctgatgaggccggttcagatcacgcttggttgcgctatacagttgtgcaattatccgctccttgtaacctagggtccctccaatctaagatggttcacaccgctgaatgcggaccctcatttgctatagacagcgagtctggtgccatcagcaccatccggactctggatagagaggtacaagaagccgtcgaactgaaagtggtagcacaggacttgggggagccccctctgtctgctacctgcctcgtgagtattaccgtggatgatgtaaatgacaacgaacctatattctggcgccaagtgtataacgcaacaattgcagagcatgcacccgtggggcattgcttcctacaggtaacagcctccgacgccgactccggactgtatggcttcatcgaatattccctgtacgatgggttcctatcttatgaggctcctcaggcatttcggatcgacccccacgatgggcaaatttgcgtcagtcaggacatcgaccgcgaacgcgaccctgctacatatgacctgctggtggaggccaaagacggaggtggcctctctgcacaggctttcgtaagggtcgacctggaagatgtgaatgataaccaccccgtcttcaatccgtccacgtacgtgacgtctatttccgatgagacccaacctggtacggaaatcatcaatgtgctcgccaccgaccaggactctggcatctacggaaccgtggcctatgagcttatcccaggaaacgtgtcttcgctgtttaccatcgattctaccacgggtatcatctacttaacgcttcctctctcccatttggagtccaccactctgagcttgatggtaagcgctcaagatggaggcggattgaccgctgtaattaacgccgatgtgactattcacatcttccagaccacattagcgcctgctgaattcgagcgcccaaaatacaccttcctggtttacgaggacgtacctgaggacagccctattggtacagtcaaagcgagagagcccctgaattcgtccgaacctatcttctacaggattagctctggggatctcgggggaaagttcagcattcaccccagacttgggaccatccgcactcggaagcccttagatcacgaaactcagcctgttgtggtcctgactgttcaggcccagctaggatctgcaccggcatgcagttcaaccgaggtgaatatcaccgtgatggacgtgaacgacaaccacccggcattcctaaggacctctgatgagattcgtatctctcagactacccctcccggtactgccctataccttgcaagggctgaggatagagactctgggaggaatgggctgatcaggtactctattgccagtccccagcccggagtgttcgcgatcgatcgtgccttgggagtcctcttccttaacggatctttaggcgctggagagcaacgggaactcacattgacattacgagcagaagaccaaggcgtgcacccacaggcagctcttctggttctcacggtcgtgatcgagaaacgcgagcacagtccgagctggacattcgaacatctggtctatcaggttgaggtttccgaatccctttcccctatgacacagatgctacagacgcaggcacacccgttaggacctcaacgcgctgctagcccactgaggtacagcttggaaccctcagtggattctgccatgttcggcatccgcccttataccggttggatctatttgcgtaggcagttcgactacgaaagcacacagacatacaatttcagagtattcgcgtggatccctgaagacgggttcctccagaacgttagcactaccgttatcgtcagagtctgggatgagaacgacaacagccccacgttcctgcatgacgtgctctttttgaaagttgaagagagcccagtgcctcaaggcgtcattggaaagattactgctattgacatggactcggggaaaaacgggcagctcctctattttttgttgtccgacggaaaattcttcaagatgaatcccaacaccggcgaactcatcaactgggtggccctcgaccgcgagcacaggggccatcacgaaatgaccgtgttggtcaccgatcggggtagcccgccacgcaacgcaacgatggccgtgtacgtgtcggtaactgacatcaacgataatagacctttttttcctcagtgtcttcctggcaaggagcttcatgtgaaggtgctggagggccaaccagtaaacatgctggttaccacagtttttgcaaaggacccggacgaaggcaacaacgccgaggtaacatactccgtgagttccgcacgtcctatgcccctcaaggggaagacagcgttcggaaagcagagttgcaagaaacagaccaataagcaaaccaagagctag

SEQ ID NO: 220045 - DNA, 462 bp, synthetic construct
  misc_feature 1..462: note = Description of Artificial Sequence: Synthetic coding sequence
  source 1..462: mol_type = other DNA
atgctggagaagctcatgggtgctgacagtctccagctctttcgatctagatacaccttgggcaagatctacttcataggcttccaacggagcatcctcctcagcaaatccgagaattctctgaatagcatcgcaaaggagactgaggaggggagggagactgtcacccgtaaagaaggctggaaacgccgacatgaagatggttatctggagatggcccagcgacacctgcaacggagtttgtgcccctgggtctcctacctccctcagccctacgcagagctcgaggaggtgtcttcacatgtagggaaggtgtttatggcacgcaattatgagtttctggcctatgaggcctccaaagaccggaggcagccgctcgagaggatgtggacttgtaattacaatcagcagaaggatcagtcctgcaaccacaaagagattacctctaccaaggcagagtag

SEQ ID NO: 220046 - DNA, 249 bp, synthetic construct
  misc_feature 1..249: note = Description of Artificial Sequence: Synthetic coding sequence
  source 1..249: mol_type = other DNA
atggcccagagacacctgcaacgcagtctctgcccctgggtcagctaccttccccagccttacgccgagctcgaagaggtcagtagccacgttgggaaagtcttcatggccaggaactacgagttcttagcatacgaagcctctaaagacaggcggcagcccctggaacgcatgtggacctgtaattataaccagcaaaaagaccagtcatgtaaccacaaagagataacatccacaaaagctgaatag

SEQ ID NO: 220047 - DNA, 378 bp, synthetic construct
  misc_feature 1..378: note = Description of Artificial Sequence: Synthetic coding sequence
  source 1..378: mol_type = other DNA
atgcggaccgccatatggaaatggcatagggggatttacagggaccactacgttctgggttccctgacttttctgtccccaatgcaacgagccggtacgtccaatcagtggaatatgggcaaggtgatgaccctcgatagcggggatgaggtgacttttcataagacttggccaaccgaaacggggagcccgtataggctcgaggaggtcagcagccacgtgggcaaggtctttatggctagaaactatgagttcctcgcatatgaagcatctaaggacaggaggcagccactcgaacgcatgtggacatgtaattataaccagcaaaaggaccagtcctgcaatcataaggaaattacctccacaaaggctgagtag

SEQ ID NO: 220048 - DNA, 1725 bp, synthetic construct
  misc_feature 1..1725: note = Description of Artificial Sequence: Synthetic coding sequence
  source 1..1725: mol_type = other DNA
atggaactcaaagcagaagaggaagaggtggggggagtccagccggtgtcaatccaggccttcgcgtccagttctactttacatgggctggcccacattttttcctatgagagactctctctgaaaagggccctttgggccctgtgcttcttgggatctctagccgtgttgctgtgtgtgtgcacggagcgcgtgcagtactatttccactaccaccacgtcaccaagctcgacgaagttgccgcatcacagctgacatttcctgccgtgacactatgcaatctgaatgagttccgtttctctcaggtgtctaaaaacgacctgtatcacgcaggtgaacttctggcgttgctgaacaataggtacgaaatccccgatactcaaatggccgacgagaaacagctagaaattctccaagacaaggctaacttcagaagctttaagcctaagccattcaatatgagggaattctacgacagagcgggacacgacattagggacatgctgttgtcctgccactttcgaggcgaagtgtgttccgccgaggattttaaagtggtctttacgaggtatggcaaatgttatacctttaacagcgggagagacggccgtcccagactcaaaaccatgaagggagggacgggtaacgggctggaaattatgctggatattcaacaggacgagtatcttcccgtgtggggggagaccgatgagaccagttttgaagccggaattaaggttcagatccactctcaggatgaacccccttttattgatcagctcggctttggggtcgcgccagggttccaaaccttcgtcgcctgccaagagcagcgcctaatttacctgcctcccccttgggggacctgtaaagccgtgaccatggacagcgatctggatttttttgacagctactcgattacggcctgtcgaattgactgtgagactagataccttgtagaaaattgcaattgcagaatggtccacatgcctggggatgctccttattgcacgcccgagcagtacaaggaatgcgcggaccccgcactggacttcttggtggagaaggaccaagagtactgcgtctgtgagatgccatgcaatctcacccggtatggcaaggaactgtcaatggtcaagataccaagtaaagcatctgccaagtaccttgctaagaaattcaataagtcagagcagtatattggcgagaacatcctggtactggatatcttcttcgaggtattgaactacgagacgatcgagcaaaaaaaggcttacgagatcgccggtctgcttggcgaacttctgatgaccccagtgcccttttcatgccacggccatggggtagccccatatcatcctaaagccggttgcagcctcttgtcacacgaaggcccaccaccccaaaggcccttccccaaaccttgttgcctaggagacattggcggacagatgggactctttatcggagcaagcatcctgacagttctggagttgttcgactacgcctacgaagttatcaagcacaagctttgtcgcagaggaaaatgccagaaggaagccaaaaggtcctcagccgataagggagtggctctgtccctcgacgacgtgaagaggcacaacccctgcgaatcacttcggggacatcccgcaggcatgacctatgcagcaaacattttacctcatcatccggcaagggggacttttgaagacttcacatgctag

SEQ ID NO: 220049 - DNA, 594 bp, synthetic construct
  misc_feature 1..594: note = Description of Artificial Sequence: Synthetic coding sequence
  source 1..594: mol_type = other DNA
atgagagtggtggtcatcggagcaggagtcatcggcctatccacagctctctgcatccacgaacggtatcactctgtgctgcagccgctcgatattaaggtgtacgcagaccgcttcaccccgcttaccactaccgatgtagcagcagggctctggcagccctatctaagcgaccccaataacccccaggaagcagattggtctcagcagacctttgattacctcctatcacacgtccatagcccaaatgccgagaatctgggtctgttcctcatctccggctataatctctttcacgaggcaatccctgatcctagctggaaggacacggtgcttggatttaggaaactcacacccagggagctcgacatgtttcctgattacggctatggctggtttcacactagcctcattctggaaggtaaaaactacctgcagtggttgactgagaggctaacagaacgcggagtgaagttctttcagagaaaagtggagagctttgaggaggtggctcgggaaggggcagacgtgatagttaactgcacgggagtttgggcgggagctctgcaacgggacccccttttgcagccttag

SEQ ID NO: 220050 - DNA, 2400 bp, synthetic construct
  misc_feature 1..2400: note = Description of Artificial Sequence: Synthetic coding sequence
  source 1..2400: mol_type = other DNA
atgaaaccgtcgccagccggtaccgccaaggaacttgagccccctgccccagctcgaggcgagcagagaacagcagagccggaaggccgatggagggagaaaggggaagctgatactgagaggcaacgaacacgtgagaggcaagaggcaaccctggccggtctcgctgaactagaatacctccgtcagaggcaggaattgctggtccgaggcgcactgagaggagctgggggtgccggagcagctgccccacgcgctggagaacttcttggcgaggctgctcagcggtccaggctggaggagaagttcctggaagagaacattcttttactgaggaagcagctgaactgcctgcgtcgacgagatgctggccttttaaaccagctccaggagctagacaagcagatctctgatctgcggcttgacgtggaaaaaacttctgaggagcaccttgagaccgattcaaggccaagttctgggttctacgagctgtctgacggagccagtggaagcctgtccaactccagcaattctgtgttcagtgaatgtctttctagttgccattcttccacatgcttctgtagcccacttgaggctaccctatctctgagcgatggctgtccaaaaagcgccgacgtgaacccgaaataccagtgcgatcttgtatccaagaacggaaacgacgtatatcgctatccttccccgctgcatgccgtggccgtccagagccctatgtttctgctgtgcctgacgggaaaccccttgcgtgaggaggaccgcctcggaaatcacgcgagcgacatatgcgggggatcagagctcgacgccgtcaaaaccgacagtagccttccttctccttcctcattatggagcgcatctcacccaagcagcagcaagaagatggatgggtatatactgagtctcgtccagaaaaagacccatcctgtgcgaaccaacaaaccacggacaagcgtgaacgcagaccccacaaaaggactgttgagaaatgggtccgtgtgtgtgagggcgccagggggtgtgtctcaggggaattcagtgaacctaaagaactccaagcaggcctgtttgccctccgggggtatcccaagtctgaataatggtactttctcaccccctaagcaatggtccaaggagtccaaggccgagcaggccgaatcaaagcgagtgcccctacctgaaggatgcccttccggggcagcttcagatctgcaatctaagcacttgcccaagactgctaaaccagcttctcaagaacacgcccgatgcagcgcaatcgggactggggaatcccccaaagaatctgcacagctttctggtgcctcaccaaaagaatcccctagcagaggcccagcacccccacaggagaataaggtcgtccagcccttgaagaaaatgtctcagaagaattcacttcagggcgtgcccccagccaccccacccctgcttagcactgctttccccgtggaagaaaggccagctctggacttcaagtccgaagggagctcccagtcactggaagaagcccacctggtgaaggctcagtttattccaggacagcagccatctgttcggcttcaccggggacataggaacatgggtgtggtgaaaaacagttctctgaagcatcgaggcccagcgctccagggtttggaaaacgggttacctactgtccgcgaaaaaactagagcaggaagcaaaaagtgccggttccctgatgacttagacacaaataagaagcttaagaaggcgtctagcaaaggtcggaaatctggaggtggtcccgaagccggtgtgccaggtcggccagctggtggagggcacagggccggttcccgcgcacatggacacggaagagaagccgtagtggccaagcccaagcacaaaaggactgattatcgtagatggaagtcttccgccgagatctcctacgaagaggccttgcgacgggctagaagaggcagaagagaaaacgtgggattgtatcctgctcccgtcccacttccgtatgcctccccatacgcgtacgtcgcttctgactccgagtattcagcagagtgtgaatctctgttccattctaccgtcgtggacacctcagaagacgaacagtcgaactacacaaccaattgctttggcgacagtgagtcgtctgtcagcgagggcgaatttgtaggagagagtactaccacctccgactccgaggaatcaggcggtctgatttggagtcagtttgtacaaaccctgccgatccaaacagtcacggccccagacctccataatcacccagctaagacatttgtgaaaatcaaagccagccacaacctcaaaaagaagatcctcagattcaggagcggttcactaaagctaatgacgactgtgtag

SEQ ID NO: 220051 - DNA, 2511 bp, synthetic construct
  misc_feature 1..2511: note = Description of Artificial Sequence: Synthetic coding sequence
  source 1..2511: mol_type = other DNA
atgaaaccgtcccctgcgggtacagctaaggagctggagcccccagctcctgcccgaggggagcaacgtactgccgagcctgaaggccgatggcgcgagaagggagaggctgacaccgagagacagaggacacgtgaaaggcaggaggccacgctggccggactggcagagcttgagtatctacgtcagcgccaggagctgctcgtgaggggtgcgctgcggggagccggaggagcgggagccgctgcacctagggctggggagctgctgggggaggcagcacagagaagcaggctcgaggagaagttcctggaggagaacattctcctgttgcggaagcagttaaattgtcttagacgacgcgacgccggactgttgaaccagctccaagagttggataagcagatctcagatctgcggctggacgtcgagaaaacctccgaggagcatctggaaaccgatagccgtcctagctccggcttctatgagcttagtgacggtgctagcggcagtttgtccaatagctccaacagcgtttttagcgagtgtctcagttcttgccacagctccacatgtttctgttcgcccttggaagctactctgagcctgagcgacggctgtccaaagagtgccgacctgataggactgcttgagtataaagaagggcattgcgaggatcaggcttccggcgcagtctgccgctcgctgtctacgcctcaattcaattctcttgatgtcatagcggacgtaaacccaaagtatcagtgtgacctggttagtaagaacgggaacgacgtgtatcgctacccgagtccactacatgccgtagctgtccaaagtcccatgtttctgctgtgcctgacggggaatcctctcagggaggaggataggctagggaatcatgcctcagacatatgtgggggatccgaactcgacgccgtgaaaacagactcatctctccccagccccagcagcctgtggagtgcttctcacccgtcaagctctaaaaagatggatggctatatcctatcgctcgttcagaaaaaaacccacccagtgaggaccaataagccgagaacttccgtaaacgctgaccccacaaaaggattactgcggaacgggtccgtatgtgttcgggctcccggtggcgttagccaaggaaatagtgtgaacctgaaaaattccaaacaggcctgcctccctagcgggggtataccaagcctaaataatggcaccttctccccgcctaagcagtggtctaaagagagcaaagctgagcaggcagaaagcaaacgcgtacccctgccagagggttgcccttcaggcgctgcctcagacctacagtctaaacacctccccaaaactgcaaagccagccagtcaggaacatgccagatgttctgctatcggaaccggtgaatctcccaaggagagtgcacagctgagcggggctagtccgaaggaaagtccctcaagggggcctgctcctccccaagaaaacaaggtcgttcagcctctgaagaagatgtcacagaaaaactccttgcagggcgtgcctccagcgaccccccctctgctgtctactgcctttcccgtggaagagaggcctgctctggacttcaagagtgaaggcagctcacagagcctggaggaggcccacctggtgaaggcacagtttatccccggacagcaacccagcgtcagactgcaccgtggccaccgtaatatgggtgttgtgaagaactcaagcttgaagcacaggggtcccgctttacaagggttagagaatggcctgcccacagtgagggaaaagacccgagcgggttccaaaaagtgtcgctttcccgatgacctcgataccaacaaaaaactgaagaaggccagctcaaagggcaggaaatctggaggcggtcccgaggcaggggtgccaggaagaccagcgggaggaggccatagggcaggttcgcgggctcatggccatggcagagaagccgttgtggccaagcccaagcacaaaagaacagattatagaaggtggaagagttccgcagaaattagttatgaagaagcactccgaagggctagacgcggtcgtcgggagaacgtggggctgtaccctgctccggtcccacttccatacgcttcaccctatgcatatgttgccagcgactcagagtattccgccgaatgtgaaagcctgtttcactcgacagttgttgatacctctgaggacgaacaatctaattacaccaccaattgttttggcgactccgaaagctccgtgtccgagggggaattcgttggcgaaagcacaacgacatcggactctgaagagtcaggaggattaatttggtcccaattcgtacagaccctccccattcaaactgtcacagcccctgacctccataaccatccggctaaaacatttgtgaagattaaggccagccataatctcaagaagaaaattctgcggttcaggagcggaagcctgaaattaatgaccaccgtgtag

SEQ ID NO: 220052 - DNA, 2325 bp, synthetic construct
  misc_feature 1..2325: note = Description of Artificial Sequence: Synthetic coding sequence
  source 1..2325: mol_type = other DNA
atgtggacccccggtggtccaccaggttcggccggttgggaccgcagacgcttaggggctcgactgcgggctgcctttgccggtctccaggaactgcaggggctgcgagccactcagcaggagagagtgaggggagccctggctctccagcctcctcccgcacccgcagcgccatgcggtccccacggtctgcacggccctgagcagcaattggaggccgctttagcagcactgcaagaacagctgagcagattaagacagcaggacatcggactgaagacacatctcgatcagttggacctgcagatcagtaaattgcagcttgatgtaggtaccgctagcggcgaggccctggactccgactctagaccctcctcaggattctacgaaatgtcagacgggggttcttgtagcttaagtacatcatgtgcttccgtatgttcagaccatatttctcctagcttaggatccctgttacccgtcgcccaggcccataaagccaggccgagcatgggtgattggcggcctagatccgtggatgaaacaacggtgccagcatggaggcctcaagcaaccgaggagggggctcgcccacctggtagcgtggaagatgccggtcagccgtggggcactttctggccacgcccagtgagcaccggagacctggatcgtgcgctgcctgccgataccggcctccagaaggcttccgcggatgctgaactcctcggcctgttgtgccaaggggtggatatccctttgcacgtccccgatcccaagtatagacaggacttagtttcgcaggggggacgggaggtctacccttatcctagccccctccacgctgtcgctctgcaatcaccactgttcgttctgactaaagagaccccccagcgcggaggaccgtcattccctagggagagcccaaggggccctgcgggtcttaatactatccaaactggaccagtcctcgaagccggtcctgcacgcgcacgagcgtatatcgatcgtctgctgcacctctggggcagagagacccccgcaaaaggtagtgagggggaacagggcccactgcgccatgcagcctcgccaagcccgcagcgacaggggggatggagtacagatggcggaggcagattgcttgtgttcgcccctgggcgtgaagatgaaggcggacctgcccagagtcgaggcgctggccgaggaggaccgcagcagcaaggatatatgccactcgaaggacctcagcagtcgggcagcctgccagaagagggtagcaagccatccaattcctgtgtgttaagagaaacgatggtccaggcctccccctccagcaaggcgcaacagactccatccgctcaggactatggtcggggtaacattatctcaccaagccgcatgctggacaaatctccttctcccgcaagcggccacttcgcacatccttccttcgccgcttcactcaagatgggtcctccgaagtcgaaagcagagaaaatcaagaggtctcccatggacaaagtgttaagattcgccagacagcccttgttgctccttgaccgcccagagggagctcatgcggctcctcagccttcgctggaatgggaccctgcacactggccaaccgggcgtggaggacttcagcgccgaccagcacttgcctgggaggccccaggacgttcctgctccgaatcaactctctatccaatgccagtcctcgtccccctggcagttgcccctcaggaatcgcaccgaacgtctgcccaggcactattcccatttgaggcctcacttctcacgagcgttgccaggcgtaaacaccgcagatggcagtctacagtggagatctctgctcgggctagactcgcttcatgccccgaatcaaacctcggaccaccacggcctgtagcgcgtcgcgcaggcggtcccctggcccgagggcgtcctagcctcgtgagacaggacgcgtacacccggagtgactccgaaccgtccaaacactctgctgagtgcgaccctcgcttcccgtccgtgattccggaaactagcgagggggagagctccgatcatacaacaaatcgtttcggcgatcgcgagtcgtcaagctcagatgaagagggtggcgctcagtctagagactgtgacctggcgctgggatatgtggctgctggtcacgccgagttggcctggacacaagaggctcccgtcagcagcgggccactgctatcacctgttccaaaactctgccgcatcaaggcgtctaaggccttgaagaagaagatcagacggtttcagcccacagcattgaaagtcatgaccatggtgtag

SEQ ID NO: 220053 - DNA, 843 bp, synthetic construct
  misc_feature 1..843: note = Description of Artificial Sequence: Synthetic coding sequence
  source 1..843: mol_type = other DNA
atgtggacccctggcggacccccagggtccgcaggctgggaccggaggcgactgggcgcacgtctcagggcggctttcgccggattacaggaactgcagggcctgagagcaacacagcaggaaagggtcaggggtgccctagctctgcagccccctccagcaccggcagcaccatgtggccctcatggtcttcacggtcctgaacaacagttagaagctgctcttgcggcactccaagagcagctttctcggttgagacagcaggacatcgggctgaaaacgcatctggaccagctggacctgcagatcagtaagcttcaacttgatgtgggtactgcgtccggagaagcacttgattcggattcacgcccatcatccgggttttacgaaatgtctgatggcggtagctgcagcctgtcaacatcctgcgcatcagtgtgctccgaccacatcagccccagcctgggaagccttctgccggtcgcccaggcgcacaaagcgaggccatccatgggcgattggcggccaaggtctgtcgacgaaacaacggtccccgcttggcgccctcaagcaacagaagagggtgcgcgaccccctggctcagttgaggatgccggacagccctggggtacattttggccccgacctgtaagcaccgagctgtgtaacgcgcctggcgagctggacatgcacgctcccccagctggttgcaccagcagctcgttgaccggggtgggtagcgggctgcgaggaaaatgcggactctgcggttgccaattgcccttttgcagtgtgaacacgtcctctaaaactaaatctagtggcatctcgcggcagcagtag

SEQ ID NO: 220054 - DNA, 1890 bp, synthetic construct
  misc_feature 1..1890: note = Description of Artificial Sequence: Synthetic coding sequence
  source 1..1890: mol_type = other DNA
atgatacgggcatttagtttcccagtgagtccagaacggggtagactcaggggttggctggagggctcacttgctgggctgtgtgagctccactggcttcgagagaggcaggagtatcgagtgcaacaagccctcaggctggcccagccaggcatggggggagctgaggcagaggacgaggaggatgccgatgaggacgaggatgcagccgctgcaagacgagccgcagcggctctggaggaacagctggaggccctgccgggactggtctgggacctcgggcagcagctcggagatttgagtcttgagtctggagggttagagcaggagagcggacgatcaagcggattctacgaagatccaagcagtaccggaggtcccgactctcctccctcaacattctgtggcgactcaggattctccggatcatcatcttatggacgtctcggtccctctgaaccgagaggtatttacgcttctgaaagaccaaagtccctgggagacgctagcccttctgcccctgaggtcgttggagccagggccgctgtgccacggagcttcagtgcgccttatcctaccgccggaggctctgctggccctgaggcttgctcctccgctgagcggagggctcgtgctggcccatttctaacacccagcccgctgcacgctgtggccatgagatccccaaggccctgcggacgcccacctactgactcacctgatgccggtggcgctggcagaccgttagacggatatatctctgcactgctccggagaagacgacggaggggtgccggacagccccgaacatcaccaggcggagctgatgggggacctaggcgccagaatagcgtgaggcagagacccccagacgcttctccctccccgggatctgctcgcccagccagagaaccctccttagaacgggtcggcggacatcctacttccccagcagcgctctctagggcgtgggcctctagctgggagtctgaggccgctcccgagcccgcagccccacctgctgccccatcccccccagactcgcccgcagaaggcaggttggtgaaggcacagtacatacccggagcacaggccgctacccggggtctccccggtcgcgctgcacgccgaaagccgccacccttgacgcggggacgatccgtggagcagagcccgcctcgcgagcgacctagagcagctggacgccgagggagaatggccgaagcatctgggcgacggggaagcccaagagcgaggaaggcctccaggagccagtctgaaactagccttctcgggcgagcttcagctgtgcccagcggcccaccgaagtatcctaccgccgagcgcgaggaaccccgacccccaaggcccaggagggggccagctcccaccctggccgcacaggccgcaggtagctgccggcgttggagatctactgcggagatagacgccgctgacggccgtagggttcggcctagggcaccggcagcgcgagtccccggacctgggccatctccaagcgctccacagcgtcgattgctctacgggtgtgcaggtagcgattctgagtgtagcgccggacgcctgggccctcttgggaggcgcggaccagcgggtggagtgggaggcggatatggtgaaagcgagagctcagcatcagaaggcgagagccctgctttcagcagcgcatcctccgactcagacggcagcgggggactggtatggccacaacaattggttgctgctaccgctgccagcgggggaggcgcaggagctggtgcacccgctggacctgcaaaggtctttgtgaagatcaaagcaagtcacgccttgaaaaagaaaattttacgcttcaggagcggctcactcaaggtgatgaccaccgtgtag

SEQ ID NO: 220055 - DNA, 2025 bp, synthetic construct
  misc_feature 1..2025: note = Description of Artificial Sequence: Synthetic coding sequence
  source 1..2025: mol_type = other DNA
atgaacagtggggctatgcggattcactctaaagggcactttcagggcggaatccaggtgaaaaacgagaaaaatagaccctctctcaagagcctgaaaaccgataatcgtcctgagaagtccaaatgtaagccactctggggcaaagttttctacttggatctcccatccgttaccataagtgaaaagctccagaaggacattaaagacctgggcggacgcgtagaagaatttttgtccaaggatatatcctacctcatctctaacaagaaggaggctaagtttgctcagacactaggtcggatctccccggtgccttctcccgagtctgcctataccgcagagactacttccccccatccatcccacgacggtagctcttttaaatcccctgataccgtttgcttaagtcgtgggaaactgctggtcgaaaaggcaattaaagaccatgattttataccatcaaactcaattctctctaatgcacttagctggggtgtgaaaatacttcatatcgacgatattcgctattacatagagcagaagaagaaggagctctatctgctgaaaaagagtagcacatctgttagggacggcggaaagcgagtaggctccggagcccagaagactcgaactgggagactgaagaagccattcgtgaaggtggaagacatgtcccagctgtaccggcctttctatcttcagttgactaatatgcccttcatcaattactccatccagaagccctgcagtccgtttgatgtcgataagccatcaagcatgcagaaacagacccaggttaagctcaggatacagacggacggggataaatatggaggtacctcaattcaactacagctcaaagaaaaaaaaaaaaaggggtactgcgaatgctgtctacaaaagtatgaagatctggaaacccaccttcttagcgagcaacacagaaattttgcccaatctaatcagtaccaggttgtggacgatatcgtgtctaagttagtctttgactttgtggagtacgaaaaagacacacccaagaaaaagcgaataaagtattctgtgggctccctctcgcctgtgtcagcttctgtgctgaagaagacagaacagaaagaaaaggtggagttgcagcacataagccagaaggactgtcaggaggatgatactacggtaaaagaacagaatttcctgtataaagaaacacaggagacagaaaagaaattgctcttcatcagtgaacccatcccgcaccctagtaatgagctaagaggccttaacgaaaagatgagcaataagtgctcaatgctgagtacagctgaggatgatattaggcagaacttcacacagctccccctgcataagaataagcaggaatgtatcctcgacatctccgagcacacgttgtctgaaaacgatctcgaggagctgcgtgtggaccactataaatgcaacatacaagccagcgtgcatgtgtccgacttttccactgacaacagcggatctcagcctaagcagaagagtgatacagtgcttttcccggctaaagatctcaaagaaaaggacctccattccattttcacgcatgactccggactgatcaccattaacagttcccaggagcatctcaccgtacaagcaaaggctcccttccatactccccctgaggagcccaacgagtgcgactttaaaaatatggatagcctgccttcgggaaaaatccatcggaaggtcaagattatactggggcgtaaccgcaaagaaaatttagaacccaatgcggagtttgataagcggacagaattcatcactcaggaggaaaacaggatctgcagtagccccgtccaatcactactcgacctctttcaaacttctgaggaaaagagcgaattccttggatttaccagttacaccgaaaagagtgggatctgcaatgttctggatatctgggaagaggagaactccgacaatctcctcaccgctttttttagttctccatccacgtctacttttacggggttctag

SEQ ID NO: 220056 - DNA, 654 bp, synthetic construct
  misc_feature 1..654: note = Description of Artificial Sequence: Synthetic coding sequence
  source 1..654: mol_type = other DNA
atgaactctggcgcaatgcgcattcattccaaggggcattttcagggtggcatccaggtcaaaaacgagaagaaccggccaagcctcaaatctcttaagactgataacaggcccgagaagagcaagtgcaaacccttgtggggaaaagtcttctacttggaccttccatcagtgaccatatctgaaaagctgcaaaaagatatcaaagacttaggcggtagggtggaggaattcctctccaaagatatctcctacctcatcagcaacaagaaggaggcaaagtttgcccaaaccttggggaggattagtcctgtgccttctcctgagtctgcttacaccgccgagaccacatccccccaccccagccacgatggatcctctttcaagtcccctgacacggtttgtctgagtcggggaaagctgctcgttgagaaggctatcaaggatcacgactttatcccaagcaatagcattctctcgaacgctcttagttggggcgtaaagattctccacattgacgacatacggtactacatagagcagaagaaaaaagaactttacctgcttaagaaatcctctacctccgtgcgagacggaggcaaacgggtgggttccggcgctcagaagaccagaaaagccctacagtccatctag

SEQ ID NO: 220057 - DNA, 1848 bp, synthetic construct
  misc_feature 1..1848: note = Description of Artificial Sequence: Synthetic coding sequence
  source 1..1848: mol_type = other DNA
atgagtgagcccggaaagggggatgattgtctggaattagagtctagcatggcggaatcgcggctgcgagcacctgatctgggagtcagccgctgtctgggaaaatgtcagaaaaacagcccaggggctcgcaagcacccattttcaggtaaaagcttctacctggacttgccagccggaaaaaatctgcagtttttgactggcgcaattcagcaactgggaggggtaatagaaggcttcctcagtaaggaagtctcctacatcgtgtcatcgagacgggaggtgaaagccgagtcttccgggaagtctcatcggggatgcccttcaccatcaccgagcgaagtcagggtggagaccagtgcaatggtcgatcctaagggaagccacccaagaccttcccgtaagcccgttgacagtgtgccactgtcaagaggcaaggagctccttcaaaaggccattcggaaccagggatctatatcaggagggggatcaggcggatcttcatcccttcttacgaacgcaaggtcatggggcgttagaatcctccatgtcgacgaaatgatgatgcatgtccagcagctgtcacttgccagcctgtgtgtgaagaaacagcagccgaagaagcccgagggaacctgcccagctgcggaatctagaacccggaaagtggccagacttaaagcgccttttctaaagattgaggatgagagccgaaaatttcgtccttttcaccaccaatttaaaagttttcctgagatctccttcctgggccctaaggacgccagcccctttgaggcccctaccacacttggcagcatgcaccacacacgggaatccaaggacggggagccttctcctcgcagcgctgctcataccatgccacgcaggaagaaggggtattgcgaatgctgccaggaggcttttgaggagctgcatgtacacttacagtctgcacagcaccgaagctttgctctggaggctcacctgtacgccgaggtggataggatcatagcccagctgtcacacagcttcgccgacatcccctttcaagccggactcccaaggtggtcggggtcaccggcatctgattgtgacccactgtgtcctgaaaccctccacccacatcagccatctcaccctagggccgctagcccccgaattcgtaaagaggactcctgccaggctagcgtcacccagggcagagcagccggacaacaaagatggacggaaagcctagacggtgtgatgggaccccctgcctctcatacctgtgtaagtgccactacactcctaccagccctccctaagggatctcgggagcagggttgcctctgcccctgcccagcctccttcacccagtctcaccttgtgacaagcctggcattgcttcctggagagtggtcccccgctgaagacatgcccctccacccctcacaggagaactcattcgccccagcagatatccccgtgaaggggccacttctgttcccagaggctaggccttggctaatgtctgctcgatgttgggtgaggccattccccttcgtgacctggggttgcctcatacctcacgacactacccctctgcacgaggaggtgtcaccatgtccttgccttagattgggatacctgtacttactgttgacccagtcactgtggtgccgggtgcgtgttcccagcttgagtacagccggacccataccaagaaccagccatccatgtaccctggccttcccaagttacctgaatgaccacgatctggggcacctgtgtcaggcaaagccacaggggtggaacaccccacagcctttcctgcactgcggattcctggcagtcgactccgggtag

SEQ ID NO: 220058 - DNA, 1296 bp, synthetic construct
  misc_feature 1..1296: note = Description of Artificial Sequence: Synthetic coding sequence
  source 1..1296: mol_type = other DNA
atgagtgaaccgggtaaaggcgacgattgtctggaacttgaatcatccatggccgagtcgcgactgcgggcaccagacctgggagtgtcaagatgtctagggaagtgtcaaaagaactctccaggggctaggaaacaccccttttctggcaagagtttttatttggacctgccagctggtaaaaaccttcagtttctgacgggggcaatccagcagctggggggagttattgagggtttcctgtcaaaggaggtgagctatatcgtgtcgtctagacgcgaggtgaaggcggaatcatctggcaaaagccatcggggatgtccgtccccaagccctagcgaagtacgggtagagacaagtgccatggtggacccaaagggctctcatcctcgaccatcacggaaacccgtggactctgttcccctctcacgagggaaggaacttcttcagaaggctatacgcaaccaggggtccatctctggaggtggctctgggggaagctctagcttgttgacaaacgcgaggtcctggggggtccggatattgcacgtcgacgaaatgatgatgcacgtccagcagctttcccttgcgtctctctgcgtcaagaaacaacagccgaagaagcccgaaggcacctgccctgcggctgaaagccgaacaagaaaggttgcccgactgaaagccccattcctcaagatcgaggatgagtctcgaaagttccggccttttcaccaccagtttaagtctttcccagagattagcttccttggacccaaagatgccagccccttcgaggccccaaccactctgggttccatgcaccataccagagagtctaaagacggtgagcctagtccacgctccgccgcacacactatgccacgacggaagaaaggatattgtgagtgctgtcaagaggctttcgaggaactgcatgtccacctccagtcagcacagcacaggtctttcgccttagaggctcatctctacgcagaagttgaccgcataattgcacaactgtctcactcctttgccgatatcccattccaggctgggttacccaggtggagcggaagtcccgcatcagactgtgatcctctttgccccgagacgctgcatcctcatcaaccttcccaccctcgcgcagcgtcgcctcgaattagaaaggaagattcctgtcaggcatccgtcacacaaggccgagcggcaggccaacagcggtggacagaaagtttagacggcgttatggggcctcccgctagccatacttgccacaggccctgcagactgccatag

SEQ ID NO: 220059 - DNA, 474 bp, synthetic construct
  misc_feature 1..474: note = Description of Artificial Sequence: Synthetic coding sequence
  source 1..474: mol_type = other DNA
atgtctgaaccgggaaagggggacgattgtcttgaattagaaagttcgatggcagagagtcgactgcgagcaccggacctgggcgtctctcggtgtctcggcaagtgccagaaaaacagtccaggggcacggaagcaccccttttcaggcaagtccttctatctagacctgcctgccggtaagaatttgcagttcctgacaggggctattcagcagctgggaggcgtcattgaggggttcttatctaaagaagtttcctacatcgtgtctagccggagagaggtgaaggcggagagtagtggaaagtctcacaggggctgtccatctccgtcgccatcagaggttagagtggagactagcgctatggtggatcctaaaggcagccacccccgaccaagccggaagccagttgacagtgtaccattatcgagaggaaaagagcttctccagaaagctataagaaatcagaaatag

SEQ ID NO: 220060 - DNA, 570 bp, synthetic construct
  misc_feature 1..570: note = Description of Artificial Sequence: Synthetic coding sequence
  source 1..570: mol_type = other DNA
atggtgggtggcggacagccttgcggacctaacatgagtgaagtgagctgtaaaaagagggatgattatctcgaatggcccgagtactttatggcggtcgcattcctctcagcacagcggtctaaagacccgaattcccaggtaggtgcctgcatcgtcaattcggagaacaagatcgtagggatcggctacaatggcatgccaaatggctgtagcgacgacgttctgccctggaggaggactgcggaaaacaaattggacaccaagtacccatatgtctgtcacgccgagctgaatgccattatgaacaaaaattccaccgatgtcaaggggtgcagcatgtatgtagcgctgttcccatgcaatgaatgtgcaaaactgattatccaggccggaatcaaagaagtgattttcatgtcagacaaatatcacgatagcgacgaagccaccgctgcacgcctgctttttaacatggccggagtcactttccgaaagttcatcccgaagtgttcaaaaatcgtaatcgactttgatagtatcaattctcggccttcacagaagctgcagtag

SEQ ID NO: 220061 - DNA, 537 bp, synthetic construct
  misc_feature 1..537: note = Description of Artificial Sequence: Synthetic coding sequence
  source 1..537: mol_type = other DNA
atgtcagaggtgtcttgcaaaaaacgggacgactacctggagtggcccgagtactttatggcggttgcctttctgagcgcccagcgctccaaggaccccaactcccaggtgggcgcttgcatcgtaaattccgaaaataaaatagtcggtatcggctacaacggcatgccaaatggctgctccgatgatgtcctgccctggcgacggactgcggagaacaagctggacacaaagtacccttacgtatgtcacgcagagttaaacgctataatgaacaagaattccactgatgtgaaggggtgctcgatgtacgtggctttattcccatgtaacgaatgcgcaaaactgattatccaggccggaatcaaagaagtgatcttcatgtcagacaaataccatgattccgacgaggctactgccgctaggctgctgtttaacatggccggagtgactttcagaaagtttattccgaagtgcagcaagatcgtaatcgatttcgactcaataaactcacgcccttctcagaagttgcaatag

SEQ ID NO: 220062 - DNA, 510 bp, synthetic construct
  misc_feature 1..510: note = Description of Artificial Sequence: Synthetic coding sequence
  source 1..510: mol_type = other DNA
atgagtgaggtttcttgtaagaagcgcgacgactacttagagtggccagagtacttcatggctgtcgcctttctatcggcacagagaagcaaggatcccaacagccaagtcggtgcttgtatcgtgaactctgaaaataaaatagtggggattggctacaatggaatgccaaatggatgttcagacgatgtgctgccctggcgtcggaccgccgaaaacaagctggacactaagtatccctatgtgtgtcacgccgaattgaatgccatcatgaataagaactccaccgatgttaaggggtgctctatgtacgtggcgctgttcccctgtaatgaatgcgctaaactaatcatccaggccggtataaaggaagtgatttttatgtctgacaaatatcatgactcggatgaggccacagctgccagactgttatttaatatggcgggagtgacttttcggaagttcattcctaaatgttccaagattgtgattgatttcgactccatttag

SEQ ID NO: 220063 - DNA, 222 bp, synthetic construct
  misc_feature 1..222: note = Description of Artificial Sequence: Synthetic coding sequence
  source 1..222: mol_type = other DNA
atgtcagaggtgtcgtgtaagaaacgtgacgactacttggaatggccggaatacttcatggccgtcgcctttttaagcgcgcagcggtcaaaagatcctaattcccaagtgggtgcctgcatagtgaacagcgagaacaagattgttggcatcggttataacggaatgccaaacgggtgttccgacgacgtcctcccttggcgacgaacagcagaaaactag

SEQ ID NO: 220064 - DNA, 180 bp, synthetic construct
  misc_feature 1..180: note = Description of Artificial Sequence: Synthetic coding sequence
  source 1..180: mol_type = other DNA
atgtctgaagtgtcttgtaaaaagcgggatgattacctggaatggccagagtacttcatggccgtggccttcctctcagcacagagaagcaaagatcctaatagccaggtgggcgcttgcattgtcaatagcgaaaacaagatcgtcggcatcgggtacaacggcatgcctaacggctag

SEQ ID NO: 220065 - DNA, 72 bp, synthetic construct
  misc_feature 1..72: note = Description of Artificial Sequence: Synthetic coding sequence
  source 1..72: mol_type = other DNA
atgtctgaagtctcctgtaagaagagagatgactacctggaatggcctgaatatttcatggcagtcgcgtag

SEQ ID NO: 220066 - DNA, 363 bp, synthetic construct
  misc_feature 1..363: note = Description of Artificial Sequence: Synthetic coding sequence
  source 1..363: mol_type = other DNA
atgtcagaagtttcctgcaaaaagcgggatgattatctcgagtggcccgaatattttatggccgtggcattcctcagtgctcaaagaagtaaggacccgaatagtcaagtgggggcatgtatcgtgaatagcgagaacaaaatcgtgggtattggctataatggcatgcccaacggatgttccgacgacgtactcccttggcgacgcacagccgagaacaaactcgacaccaagtatccctatgtgtgccacgctgagctgaacgccattatgaacaaaaacagcacggatgtcaagggctgttccatgtatgtcgccctgttcccatgcaatgagtgtgctaagctgattatccaggcatag

SEQ ID NO: 220067 - DNA, 537 bp, synthetic construct
  misc_feature 1..537: note = Description of Artificial Sequence: Synthetic coding sequence
  source 1..537: mol_type = other DNA
atgtctgaagtgagttgcaagaagagagatgactatctggagtggcccgaatatttcatggctgtggctttcctatccgcccaaagaagtaaggatcccaatagccaggttggtgcatgcatcgtcaatagtgaaaataagatcgttggcatcgggtacaatggcatgcccaacggatgcagcgatgacgtcctgccttggaggcgcaccgctgaaaacaaacttgacacaaagtacccttatgtgtgccatgcggagctgaatgccataatgaacaagaatagcacagacgtcaagggctgttcaatgtatgttgccctgtttccctgcaacgagtgcgctaagctcataatccaagccggtatcaaggaggtgatatttatgagtgataagtaccacgattccgacgaggcgactgctgccaggttattattcaacatggcaggggtcactttccggaagtttatacccaagtgttcaaagatcgttatcgacttcgacagtattaattcccggccatcccaaaagctccagtag

SEQ ID NO: 220068 - DNA, 360 bp, synthetic construct
  misc_feature 1..360: note = Description of Artificial Sequence: Synthetic coding sequence
  source 1..360: mol_type = other DNA
atgagcgaggtttcatgcaaaaaacgcgatgattacctggagtggccagagtattttatggcagtggctttcctttccgcgcagagatcaaaagacccaaacagccaggtgggggcatgtatagtgaatagcgagaataagattgtggggatcggctataatggcatgcctaatggctgttctgatgatgtcttaccttggaggcgtacagcggagaataaactggatacgaagtacccatacgtgtgtcacgcagagctcaatgcgattatgaacaaaaatagtacggacgtaaaaggttgctcaatgtacgttgccttgtttccctgcaatgagtgtgctaagcttataatccagtag

SEQ ID NO: 220069 - DNA, 297 bp, synthetic construct
  misc_feature 1..297: note = Description of Artificial Sequence: Synthetic coding sequence
  source 1..297: mol_type = other DNA
atgtcagaagtgagttgtaaaaagcgtgatgactatttagaatggccggaatatttcatggccgtggcctttttaagtgctcagcgcagcaaagacccaaactcccaagtgggggcttgcattgtcaactctgaaaacaagatagtgggaatcggttacaacggcatgcccaatggatgctcagacgacgtgctcccgtggaggcggactgccgagaacaagttggacaccaaatatccctacgtttgtcacgcggaactcaacgccataatgaataagaattcgactgacgtgtag

SEQ ID NO: 220070 - DNA, 780 bp, synthetic construct
  misc_feature 1..780: note = Description of Artificial Sequence: Synthetic coding sequence
  source 1..780: mol_type = other DNA
atgaacaagctgaagagttcccagaaagacaaagttcgacagttcatgatctttacgcagagtagcgagaagacagcggtatcttgcctttcacaaaacgattggaaattggatgtggctaccgacaattttttccagaatcctgagctctatatccgtgagtcagtgaaaggatccctcgatagaaaaaaactggaacaactctataacaggtataaagatccgcaggatgaaaacaaaattggaattgatgggatccagcagttctgtgatgacttggcgcttgaccccgctagcatttcagtgctgatcatcgcctggaaatttagagcggcaacacagtgcgagttcagcaagcaagaattcatggacggcatgaccgagcttggttgtgactccattgagaagttgaaggctcagattcccaagatggagcaagagctcaaggagccaggccgtttcaaagacttttaccagtttacctttaattttgccaaaaatcctggtcagaagggtttagacctggagatggccatagcctactggaatctcgttctcaacgggaggtttaagttccttgatctatggaataagttcctgctggaacaccacaaacggtccattccgaaagatacttggaacctgctgctggacttctccactatgattgccgacgacatgtccaattatgatgaggagggagcatggcctgtgctgatcgacgactttgtagagtttgctcggcctcaaattgctggaaccaagagtaccaccgtttag

SEQ ID NO: 220071 - DNA, 660 bp, synthetic construct
  misc_feature 1..660: note = Description of Artificial Sequence: Synthetic coding sequence
  source 1..660: mol_type = other DNA
atgaataagctgaagtcctcccaaaaggataaagtacggcagttcatgatcttcacacagagcagcgagaagaccgccgtcagctgtctgagccagaatgactggaaactagatgttgccacagataacttcttccagaatccagagctgtatatccgggaaagcgtgaagggatcactggaccgaaagaaacttgaacagctgtataacagatacaaagacccccaggatgagaataaaattgggatcgacggaatgactgaactggggtgcgactctatcgaaaaactgaaggcccaaatcccaaagatggaacaggagctcaaggagcccggaagatttaaggacttctaccagtttaccttcaactttgccaagaaccccggtcagaaaggattggatttggagatggctatcgcctactggaacctggtgttaaatggtcgcttcaagttcctggatttatggaataagttcttgctcgagcatcacaagagatccattccaaaagacacatggaatctcctcttggacttcagcactatgatcgcagatgacatgtctaattatgacgaggagggcgcatggcccgtgttaattgatgacttcgttgagttcgctcggcctcaaattgcagggacaaagtcaaccaccgtctag

SEQ ID NO: 220072 - DNA, 387 bp, synthetic construct
  misc_feature 1..387: note = Description of Artificial Sequence: Synthetic coding sequence
  source 1..387: mol_type = other DNA
atgatctttacccaaagcagcgaaaagacagccgtgtcctgtcttagccagaatgactggaaactggacgtcgctacagataatttcttccaaaatcctgaactgtacatacgggagagcgtgaagggcagcctggacagaaaaaaactcgagcagctctataaccgctataaggatccacaggatgaaaacaagatcgggatcgacggaattcagcagttctgcgatgatctggcgcttgacccggcaagtatctctgtcctaatcattgcttggaagttccgtgccgctacccagtgcgagttttcaaagcaggagttcatggacggcatgacagagctgggctgtgactctattgagaagctcaaggcccagatccctaagtag

SEQ ID NO: 220073 - DNA, 879 bp, synthetic construct
  misc_feature 1..879: note = Description of Artificial Sequence: Synthetic coding sequence
  source 1..879: mol_type = other DNA
atgcactctgacgctgcggcagtcaacttccagctgaacagccatctgtctactctggctaacatccataaaatttatcacactctgaacaagctgaatctgaccgaggatatcgggcaggacgatcaccagacaggctcccttagatcttgttcctcgagcgattgtttcaataaggtgatgccacccagaaaaaaaaggcgtcctgcatctggggatgacttaagtgctaaaaagtcacggcacgacagcatgtacaggaagtacgactccacaagaattaaaacagaggaggaggccttcagcagtaagcgctgtctcgaatggttttacgagtacgcagggactgacgacgtggttggtccggaaggaatggagaagttctgcgaagacatcggggtggaacccgaaaacgttgtcatgttggtacttgcttggaagctcgatgcgcagaatatgggttacttcacattacaggaatggttgaagggcatgacgtccctgcagtgtgataccactgaaaaactgcgcaacacactggactacctacgctcattcctgaacgactccaccaactttaaattgatttacagatacgcctttgacttcgccagagaaaaagatcagcggtcactcgatatcaacactgctaagtgcatgctgggcctgctcctgggcaaaatttggccgctgttcccagtttttcaccagtttcttgaacaatcaaagtacaaagtgattaacaaagaccagtggtgtaatgtgttggaattcagtcgaactatcaacctggatctcagcaattacgatgaagacggggcatggcccgtactgttagatgagttcgtggaatggtacaaggacaagcagatgtcatag

SEQ ID NO: 220074 - DNA, 699 bp, synthetic construct
  misc_feature 1..699: note = Description of Artificial Sequence: Synthetic coding sequence
  source 1..699: mol_type = other DNA
atgccgccaagaaaaaagcgacggcctgcttcaggagacgacctgagtgctaaaaagtcacggcatgacagcatgtaccggaagtatgatagtacacgtattaagaccgaggaagaggctttcagcagcaaacgttgcctggaatggttttatgagtatgctgggactgacgacgtggtcggtccagagggaatggagaagttctgcgaggacatcggtgtggagcccgaaaacgtagtaatgcttgtgctggcctggaagcttgacgcgcagaatatgggatatttcacactgcaagagtggctcaaggggatgactagcttgcaatgcgacacaaccgaaaagctgcgaaacacactggactatttgagatccttcctcaatgactctactaactttaagctaatctacaggtatgcttttgattttgccagggagaaggaccagcgctccctggatataaatacagctaagtgtatgcttggcctcctcctcggtaagatttggcccctgttccctgtctttcatcagttcctggagcaaagcaagtacaaggtcataaataaggatcagtggtgtaacgtactggaatttagtaggacaattaatctcgacctgagcaattatgatgaggacggtgcctggcctgtcctgctggatgagttcgtggagtggtacaaagataaacaaatgtcatag

SEQ ID NO: 220075 - DNA, 774 bp, synthetic construct
  misc_feature 1..774: note = Description of Artificial Sequence: Synthetic coding sequence
  source 1..774: mol_type = other DNA
atgcattctgacgctgcagctgtgaattttcagctgaactctcacctttctacgctggccaacattcataaaatctaccacacacttaacaagcttaacctgactgaagatatcggccaggacgaccatcaaaccggaagccttcggagttgttctagctctgactgctttaataaagttatgcccccacggaagaaacggagacctgcgtctggcgatgatctgtccgccaaaaaatcaagacacgactccatgtacaggaagtacgactcaacacgaatcaaaacggaggaggaggccttttccagcaagcggtgcttggaatggttctacgagtatgcaggtactgatgatgttgtgggccctgagggcatggagaaattctgcgaagacatcggcgtcgagcctgaaaacgtggtgatgctggtcctggcatggaaactggatgcacaaaatatgggttatttcactttacaagagtggctcaaagggatgacgtcactgcagtgtgacacaacggaaaagctccgcaacacccttgattatctacgtagtttcctgaatgattccacgaacttcaagctcatttatcgctatgcctttgatttcgccagacagtccaaatataaggtgatcaacaaggatcagtggtgcaatgtactggagtttagcaggacgattaatctcgacctgtcaaattacgacgaagacggtgcctggccagtcctgttggatgaatttgtcgagtggtacaaagacaaacagatgtcttag

SEQ ID NO: 220076 - DNA, 1011 bp, synthetic construct
  misc_feature 1..1011: note = Description of Artificial Sequence: Synthetic coding sequence
  source 1..1011: mol_type = other DNA
atggaagtggaagccgctctgggatgctctggccaaggaagggggtgtggcggtgttgccccagctggcaggggaagggaaagagcaagcgaaagaggcacccgcgtgagaatctctaaaggactcagcggcgcagggggaagcgtcaggaaagccgacttccagctgaattcccatctgtctacacttgctaatattcacaaaatctaccataccttaaacaagctgaatcttacagaggatatcgggcaggacgatcatcagacaggcagcctgcgctcctgctcttcaagtgactgtttcaacaaagttatgccgccacgcaaaaagaggaggcccgctagcggcgatgatctgtctgctaagaaatcacggcacgactccatgtacaggaagtatgattctaccagaatcaaaaccgaggaagaggccttctcttccaaacgatgcctagaatggttttatgagtacgcaggaacggacgatgtggtgggacccgaggggatggaaaagttctgtgaagacattggcgtggagcctgagaatgtcgtgatgttggtactagcctggaagctggacgcgcaaaacatgggatatttcacactgcaggagtggctcaagggcatgacctctctccagtgtgacaccactgagaagctccggaacacacttgactatttacggtcctttcttaatgactcaacaaatttcaagctgatttacagatacgcctttgacttcgcaagagagaaagaccagaggtccttggatatcaatacagctaaatgcatgctaggcctgttgctaggcaagatttggccgctgttcccagtttttcatcagtttttggagcagagtaaatacaaggtaatcaacaaggatcagtggtgtaatgtcctcgaattctctcgcacgatcaacttagacttgtcaaattatgatgaagacggtgcttggccagtgcttctcgacgagtttgtcgaatggtacaaggataagcagatgtcatag

SEQ ID NO: 220077 - DNA, 1854 bp, synthetic construct
  misc_feature 1..1854: note = Description of Artificial Sequence: Synthetic coding sequence
  source 1..1854: mol_type = other DNA
atggctgctgttgcagctgggggactggtgggaaagggcagggacatcagcttggctgctctgcagcgacatgacccatatatcaatcgaatcgtagacgtggcttctcaggtcgctctgtacacctttggacatagggccaacgaatgggaaaagactgatgttgagggcacactttttgtgtacacaaggtctgcgtcaccaaagcacggcttcactattatgaaccgcctatccatggagaacaggacagagcccatcacaaaggatctcgatttccaattgcaggatcctttcctcctataccggaacgccaggctttctatttatggcatatggttttatgataaagaggaatgtcagcgcatcgctgagctgatgaagaatttgacacagtatgaacagctcaaagcccaccaggggacaggcgcaggcatttcccctgtcatccttaactctggcgagggaaaagaagtggacatcctacggatgttgattaaggccaaagacgaatacacaaagtgtaaaacatgttcagaaccaaagaagattacaagcagtagtgccatttatgataaccctaaccttattaagccaatccctgtcaaacctagtgagaatcagcagcaacggatcccccagcctaaccaaacattagatcctgagccccagcatttgtcgctgaccgcactgttcggcaagcaggataaggctacatgccaggaaaccgtagaaccccctcagacacttcatcaacagcagcagcagcaacagcagcaacaggagaagctgccaatacgccaaggagtcgtgaggtcgctgagctatgaagaacctcggagacacagtccccctattgagaaacagctttgccctgctatccagaagctcatggtgcggtcagccgatctgcaccccttgagcgaattacctgaaaatcgaccttgtgagaatggctcaacacacagtgctggagaattttttaccggtccagtgcagcctggctccccccacaatattggaacctcgcgtggggtgcaaaacgcgagtcgcacacaaaatctcttcgagaagctacagtcaacaccgggagctgctaacaaatgcgatccttctactcctgcccctgccagcagtgccgcacttaacaggagtcgggctcctacaagtgtgactcccgtagcccctggcaaaggccttgcgcagccaccccaggcatattttaatggatctctgccaccccagaccgttggtcaccaagctcatggtagggagcagtccactctccccagacaaacccttccgataagcggatcgcagactggctcttccggcgttatttccccacaagaactcctcaaaaaactacagatagtacagcaggagcagcaactgcacgcctccaaccgacccgctcttgctgccaagttcccggtgctagctcagagctccgggaccggcaaaccactcgagtcatggattaataaaacaccaaacacagaacagcaaacacctttattccaggtcatctcgccccagcgaatcccagctaccgcagccccatcactgctgatgtctcctatggtgtttgcacagcccacatccgtgccacccaaggaaagagaatccggtttgctcccagtgggcggacaagagcctcccgctgccgctacaagtctgttgctacccatccaatcgccggagcctagcgtgattacttccagccccctgaccaagttgcagctccaggaggccctcttgtatctcatacagaatgacgacaattttcttaatatcatttatgaagcgtacttgtttagcatgacacaggccgctatgaaaaagaccatgtag

SEQ ID NO: 220078 - DNA, 1548 bp, synthetic construct
  misc_feature 1..1548: note = Description of Artificial Sequence: Synthetic coding sequence
  source 1..1548: mol_type = other DNA
atgcaaattaaggtaagcatttatggaatatggttttacgacaaggaagagtgccagcgaattgccgagctgatgaagaatctcactcaatacgaacaattgaaggctcaccagggcacaggtgccggtatttctcctgtgattttgaacagtggggaagggaaggaggtggatatcctgcgtatgctgatcaaggccaaagacgagtataccaagtgtaagacttgtagtgaacccaagaagattacatcatcctctgccatctacgacaatcccaatctgattaaacctattcccgtgaagcccagcgaaaatcaacagcagagaataccacagccaaaccagaccttagaccccgaaccccagcacttgtcactgacagctctgtttggcaagcaggacaaagcgacctgtcaagaaactgtagagccaccacaaacactccaccaacagcagcagcaacagcagcagcaacaagaaaagcttcctatccgccagggagttgtacggtctctctcctatgaggaaccacgtaggcactccccccctattgagaaacagctgtgtcctgctattcagaaactgatggtgagaagtgcagacctacatcccttgtccgaactgcccgagaatcggccatgtgagaatgggagtacccacagtgcgggtgaattctttacgggaccagtccagccaggatcgccgcacaacattgggacctctcgcggtgtgcaaaatgccagtcgaacccaaaaccttttcgaaaagttgcaatcaacaccgggagcagccaataagtgcgacccctcaactcctgcacctgcctcttccgcggctctgaataggtcccgagcccctacaagcgttacacctgtggctcccggaaaaggtctggctcagccccctcaggcatattttaatgggtccctgcccccacagaccgtaggacaccaggcacatggcagggagcagagtaccctcccccgtcagacgttacccatctctggctctcagactggaagcagcggcgtgatttctcctcaggaacttcttaagaagctgcagattgtgcagcaggaacagcagcttcatgcctcaaataggcccgcactggctgctaagttcccagttctcgcccaatctagtgggactggcaagcctcttgaatcatggattaacaagaccccgaatacagagcagcagacacctctgtttcaggtgatttcaccacaacgcatcccagcgaccgctgcacccagtctcctgatgtcccctatggtgtttgctcagcccacttccgtcccaccaaaggagagagaatccggccttttgcccgtagggggtcaggaaccacctgccgctgcaacttcactactgttgccaatccagtcgcccgagcctagcgttatcactagttccccgctgacgaaattgcagttgcaggaggctttactgtatctgattcaaaacgatgataactttctcaatattatctatgaagcttatttgttctccatgacacaggcagcaatgaagaagactatgtag

SEQ ID NO: 220079 - DNA, 1263 bp, synthetic construct
  misc_feature 1..1263: note = Description of Artificial Sequence: Synthetic coding sequence
  source 1..1263: mol_type = other DNA
atggagacaaagcgcgtagagatcccaggctcagttttggacgatttctgttctcggtttatcctgcacataccctccgaagaaagggacaatgccattagggtttgcttccagatcgaactggcacattggttctacctggacttttacatgcagaacacgccgggacttccacagtgcgggattcgggatttcgccaaggcagtattttcgcactgtccattcttactgcctcagggcgaagacgtcgaaaaggttctggacgagtggaaagaatataaaatgggagtacccacttacggggcaattattctggatgagaccctggaaaacgtcctgctggtccaaggctatttagcaaagagtggttgggggtttcccaagggcaaagtgaataaggaggaggccccacacgactgcgccgcacgagaagtgttcgaagagacaggcttcgacatcaaggattatatctgtaaagatgattacatcgagctgagaattaacgaccagctggccagactgtacatcattccagggatccccaaggatacgaagttcaacccaaagactaggcgggagatccggaacatcgagtggttttccattgaaaaactcccctgccatcggaatgatatgacccccaaaagcaagctgggtctggcccctaacaagtttttcatggcaatcccctttataagacctcttcgcgattggctgtctcggcgttttggcgacagctccgactccgacaatggattcagctcaactggctctacgcccgctaaacctacagtggaaaagctgagcagaaccaaattccggcactctcagcagctgtttcccgatggctcccccggagaccagtgggtgaagcacagacaaccgttgcagcagaagccgtacaataatcacagcgaaatgagtgacttactgaaagggaagaatcagagcatgcgcggaaatggaaggaagcagtatcaggactcacccaatcaaaaaaaaagaacaaatggactgcaacctgcaaaacaacagaactccctgatgaagtgcgagaaaaagctgcatcccagaaaactgcaagataatttcgaaactgacgccgtgtatgatctgcctagctcttcggaggatcagctgctggaacatgccgaaggccagcccgtggcctgtaatggacactgtaaatttcccttcagctccagggcctttctgtcgttcaaattcgaccataacgccatcatgaagattttggatctgtag

SEQ ID NO: 220080 - DNA, 1158 bp, synthetic construct
  misc_feature 1..1158: note = Description of Artificial Sequence: Synthetic coding sequence
  source 1..1158: mol_type = other DNA
atggaaactaaaagagtggaaatccctggctcagtgctcgacgacttttgttcacgctttatccttcatattccctctgaagaaagggataatgcaattcgggtctgttttcaaatcgaattggcccattggttctaccttgacttctacatgcagaacactccaggacttccccagtgcggcatccgcgactttgcaaaggcagtgttcagccactgcccctttcttttgcctcagggggaagatgttgaaaaggtgctcgatgaatggaaagagtacaagatgggtgtccccacatatggcgctatcattctggacgagaccctggagaatgttttgctggttcagggctatctggccaagtctggctggggtttccctaagggtaaagttaacaaagaagaggccccacatgactgcgcagctagagaggtgttcgaggagactggctttgacatcaaagactacatttgcaaggatgactacatcgaactaaggattaacgatcagctcgccagattgtacatcattccgggaatccctaaggacactaaattcaaccctaagactaggcgcgagattagaaatatagaatggttcagcattgagaaattaccttgtcatagaaacgatatgacaccaaaaagcaaactcggattggctccaaacaaattcttcatggcgattccatttattaggcctcttcgagactggctgagtcgcagatttggtgatagctctgatagcgacaacggcttctcgtctacaggttcaacacctgccaagcccacagtggaaaagctaagccggacgaaatttagacactctcagcagctgttccctgacgggagcccaggcgaccagtgggtgaaacaccggcaaccgctacagcaaaaaccatataacaaccattctgagatgagtgacttactcaagggcaagaagtgtgagaaaaagcttcaccctcggaagttgcaggacaacttcgagaccgatgccgtctacgacctacccagttcaagtgaggatcagcttcttgagcacgcagagggacagccagttgcctgcaacggccactgcaagtttcctttctcatctagagcttttctatcatttaagttcgaccacaacgctatcatgaaaatactggatctgtag

SEQ ID NO: 220081 - DNA, 630 bp, synthetic construct
  misc_feature 1..630: note = Description of Artificial Sequence: Synthetic coding sequence
  source 1..630: mol_type = other DNA
atgacacccaaaagcaaactgggcctcgcccctaacaagtttttcatggcgataccgtttatcaggccccttagggattggttgtccagacggttcggggattccagtgacagtgacaatggctttagcagtactggaagcactccagctaagcccaccgtcgaaaagctatcaagaaccaagttcaggcattcccagcaattgttccccgacggatctcctggcgaccagtgggttaagcacagacagcccctccagcagaaaccatacaacaatcatagcgagatgagcgatcttctgaagggtaagaatcagtcgatgagaggcaatggcagaaagcagtaccaagacagcccaaatcagaaaaagcgaaccaatgggctgcaacccgctaaacagcagaactctctcatgaaatgcgagaaaaaactgcacccaagaaagttacaggataacttcgaaaccgatgctgtgtacgacctgccgtcttctagtgaagaccagctgctggaacacgcagaagggcagcccgtggcatgcaatgggcactgtaagtttcccttctccagtcgggcatttctgagtttcaaatttgaccacaacgccatcatgaagattttagacctttag

SEQ ID NO: 220082 - DNA, 1341 bp, synthetic construct
  misc_feature 1..1341: note = Description of Artificial Sequence: Synthetic coding sequence
  source 1..1341: mol_type = other DNA
atgacagaactggggatggtcgtgttgggcatcgacaccactcatctgtggatgctgcccctgactccaggatcatggaacagcatgaggtcaaggcacaagtggaactggccacagggcagttggggcttagggggtcctcctagaagcacggcttttttagaatgttgtacatcattccttcccaatgaccttggtttcaccgactcttactcgcagaaggctttctgtggtatttatagcaaggatgggcaaatctttatgagtgcttgccaggaccagacgatcagattatatgactgcaggtacgggcgattcagaaaattcaaaagcattaaggccagagatgttggatggagtgtgttggacgtggcgttcaccccagatggcaaccattttctgtactcctcctggagtgactacatacatatctgtaacatctacggtgagggggatacccacaccgcactcgacttgaggcccgatgaacgccgatttgccgtttttagtatagccgtgtcttcagatggacgtgaggttctcgggggagctaacgacggctgcctatacgtgttcgaccgggaacagaatcgaagaactctccagattgaaagccacgaggatgatgtcaacgctgtcgcctttgccgacatctcgtctcagatcctgttctccggaggtgacgatgctatctgcaaagtgtgggacagaaggaccatgagggaggatgatcccaagcctgtgggggctctggccggtcaccaggacggcatcactttcattgacagcaagggagatgcaaggtacttgatttcaaacagcaaggatcagaccatcaaactctgggacatacgacggttctctagccgagagggaatggaagcctctagacaggcagctactcagcaaaactgggactataggtggcagcaggtgcccaaaaaggcctggagaaagctaaaactccccggagattcctccctgatgacgtacagaggccacggggtcctgcacactctcatacggtgtcgctttagcccaattcactcaacagggcagcaattcatctattccggttgtagcaccggtaaagtagttgtgtatgacctgctgtcaggacacattgtgaagaagctcacaaaccacaaagcttgcgtgcgggatgttagctggcacccctttgaggaaaagatagttagctcctcgtgggatggaaatctgcgcctatggcagtaccgccaagctgagtactttcaggatgatatgcccgagagcgaggaatgtgcatctgctccggcacctgtgcctcagagttcaacaccctttagctcccctcagtag

SEQ ID NO: 220083 - DNA, 1563 bp, synthetic construct
  misc_feature 1..1563: note = Description of Artificial Sequence: Synthetic coding sequence
  source 1..1563: mol_type = other DNA
atggggtccagaaactcatcaagcgctggctcgggctctggcgacccctccgaaggcctccccagacgcggagctgggctgaggcgtagtgaggaggaggaagaagaagacgaagatgtggatcttgcccaggcactgctggacagcgaggaggagaacgaccgcgcttgggacggcaggttgggagacagatacaaccctcccgtggacgcaacacccgatacgagagagcttgagttcaatgaaatcaagacccaggtcgagctggccactggccaactcgggctccggagagccgctcaaaagcactccttccccagaatgttacatcagcgcgagagaggcctgtgtcatagaggaagcttttcgttgggtgaacaaagcagagtcattagccactttttacctaatgatcttggatttactgactcctatagccagaaagccttttgtggcatctatagcaaggatggtcagatttttatgagcgcgtgccaggatcaaaccatcaggctgtacgattgccgatacgggcgatttagaaagttcaagtctatcaaggctcgagacgtaggttggtccgtactggatgttgcgtttactccggacggtaaccattttctgtatagctcctggtctgattacatccacatctgcaacatctacggggaaggtgacacccacactgcactggacctacgccctgacgagaggcggtttgcagtcttttctattgctgtgtcttcggacggacgcgaagtcctcggcggagccaacgatggatgcctgtatgttttcgaccgggagcagaatagaaggacactgcagattgaatcacacgaagatgacgtcaacgcagtggctttcgccgacattagttcccaaatactcttttccgggggagacgacgcaatttgtaaagtgtgggaccgacggaccatgagagaggatgatcccaagccagtcggcgctctggcgggacaccaggatgggatcactttcatagactctaagggcgacgcacggtatttgattagcaatagcaaagaccagactataaagctgtgggatatccgccgattttccagtagggagggtatggaggcctcccggcaggccgctacccagcagaactgggattacaggtggcagcaggtacccaaaaaagcctggagaaagctgaagctgcctggggattcctctctgatgacctaccggggtcacggcgtactccacactctgataagatgtcgcttttcgccaattcactccacagggcagcagttcatatatagcggctgtagcactggaaaggttgtcgtgtacgatcttctgagcgggcatatagtgaagaagctcaccaaccacaaggcctgcgtaagggatgtgtcttggcaccctttcgaggagaaaatcgtctcaagttcatgggacgggaacctgcgtctgtggcagtaccggcaggctgagtatttccaggatgatatgcccgaaagtgaggaatgcgcgtccgccccagcacccgtgccccagtcttcaactcctttcagttctccacagtag

SEQ ID NO: 220084 - DNA, 1641 bp, synthetic construct
  misc_feature 1..1641: note = Description of Artificial Sequence: Synthetic coding sequence
  source 1..1641: mol_type = other DNA
atgggttctaggaattcttctagcgccggttctggcagcggcgaccccagcgaaggtctacctagacgcggagctgggttacgtcggagcgaggaggaagaagaggaggacgaggacgtggatctggctcaggtgctggcctatctcctgcgtcgcggacaagtgcgacttgtccaagggggaggggctgcaaacctgcagtttattcaggccctgttggattcagaagaggaaaatgaccgggcatgggatgggcgactgggggaccggtacaatcctccagttgatgctacccccgacacccgcgagcttgaatttaatgaaataaagacccaggtggagttagctacaggacagctggggctgaggcgcgcagcccagaagcactcatttcctagaatgcttcatcagagagagcgtggattatgccaccgaggatccttttcgttgggtgaacagagcagggtcattagtcactttctccctaacgacttgggcttcaccgactcttactcccagaaggctttttgtggcatctactcgaaggacggacaaattttcatgtcggcttgtcaggaccaaaccattagactctatgattgccgatatggaaggtttaggaagttcaagagtattaaagcgagggacgtcggctggtctgttttggatgtcgctttcacgcccgatggcaaccacttcctttactctagttggtccgattacatacatatctgcaacatctatggagaaggtgacactcacacagccctggacctgaggccagatgaaagaagattcgccgtcttcagcattgccgtctcctctgacggccgtgaagtcctgggaggagcaaacgatggctgtctttacgttttcgatcgagaacaaaatcgaagaacattgcagatcgaaagccacgaggacgatgtcaacgctgttgccttcgccgacattagtagtcagatcctgttcagtggcggtgatgatgcgatttgcaaagtttgggatcggagaactatgcgggaagacgatcctaagcctgtgggcgcactcgctggccaccaggacggaatcacatttatcgacagcaagggggacgcaaggtatctaatttccaattccaaagaccagaccatcaaactctgggacatccgacggtttagctcacgtgaagggatggaagctagcagacaggccgcaacccagcagaattgggattatcgctggcagcaggtgcccaagaaggcttggaggaaacttaaactgcccggagactctagccttatgacatacagaggccacggcgtattacatactctgatccggtgtcgcttcagtcccatacactcaacaggtcagcaatttatatattctggctgctcaaccggcaaggtcgtcgtctatgacctcttgagcggccatatagtcaaaaaactcacaaaccacaaggcttgcgtgagagatgtatcatggcatccgttcgaagagaaaattgtcagtagctcctgggatggaaacttgcgcctctggcagtaccgccaggctgaatacttccaggacgatatgccagagtctgaggagtgtgcctccgcccctgctcctgtgccccaatctagtaccccttttagctcccctcagtag

SEQ ID NO: 220085 - DNA, 369 bp, synthetic construct
  misc_feature 1..369: note = Description of Artificial Sequence: Synthetic coding sequence
  source 1..369: mol_type = other DNA
atgggttccagaaattcatctagtgccggttctggatccggggacccttccgagggcctgcctcggaggggcgcaggcctgcgcagaagcgaggaggaggaggaagaggacgaagacgtagatctcgctcaggtcctggcctatctgttgaggagggggcaggttcgtctcgtgcaggggggaggcgcagccaacttgcagtttatccaggccctcttagacagtgaagaggagaatgaccgggcttgggatgggaggcttggggatcggtacaaccctccagtcgacgccacaccagacacacgggaactggagtttaacgagatcaagacccaggtggagcttgccacaggtcaattagggctgtag

SEQ ID NO: 220086 - DNA, 222 bp, synthetic construct
  misc_feature 1..222: note = Description of Artificial Sequence: Synthetic coding sequence
  source 1..222: mol_type = other DNA
atgggtagtaggaactcttcatccgccggatccggctcaggagacccatccgaaggcctgccgaggaggggagccggtctccgccgttcggaagaggaagaggaagaagacgaggacgtggacctagctcaagtgctcgcctacttgctcagacgcggacaagtgcggcttgtccagggtggcggagctgcaaatctgcaatttatacaagcactcctctag

SEQ ID NO: 220087 - DNA, 282 bp, synthetic construct
  misc_feature 1..282: note = Description of Artificial Sequence: Synthetic coding sequence
  source 1..282: mol_type = other DNA
atggggtcgaggaactctagttccgcaggcagcgggtccggagaccccagtgagggattgccccgtcgtggggcagggcttcgcagatctgaagaggaagaagaagaggacgaggatgtggacttagcgcaagtgctagcctacctactccgcaggggccaggtcagactggtgcagggaggaggagccgcaaacttacagtttatccaggctcttctggactctgaagaggagaacgacagagcctgggacgggagacttggagacagatataatccctag

SEQ ID NO: 220088 - DNA, 327 bp, synthetic construct
  misc_feature 1..327: note = Description of Artificial Sequence: Synthetic coding sequence
  source 1..327: mol_type = other DNA
atgggttcccggaattcctctagcgccggttctggaagtggagacccctctgagggactaccgaggcggggagcaggcctgcgccgaagcgaggaggaagaagaggaggatgaggatgtcgacctggcccaggttctggcgtacctgttacgtagaggacaggtgcggttagtgcagggagggggagcggctaatctccaatttatccaggctctactggatagcgaggaggaaaatgaccgcgcttgggatggaagactgggggaccgatacaacccccctgtcgacgcgacccctgataccagagaactcgaattcaacgaatag

SEQ ID NO: 220089 - DNA, 1641 bp, synthetic construct
  misc_feature 1..1641: note = Description of Artificial Sequence: Synthetic coding sequence
  source 1..1641: mol_type = other DNA
atgggctctaggaactcatcctccgctggatcaggctccggtgatcccagcgaggggctgcctcggagaggcgcaggtctgagaaggtcagaggaggaggaggaggaggatgaagatgtagacctggcccaggtactcgcctacttacttaggcggggacaagtacgcctcgtgcaggggggtggggctgctaacctgcagttcattcaggctctcctggatagtgaggaggagaatgacagggcctgggacggtaggctcggagaccggtacaatccccctgtggacgcaacccccgacacccgggagttagagttcaatgaaatcaaaacccaagttgaacttgccactggtcagctaggcttgagacgggctgcacagaaacactctttccctagaatgttacaccagagggagagaggactgtgccatcgcggttccttttccctgggcgaacagtccagagtgatctctcacttcctgccaaacgatttggggttcacggactcatattctcaaaaggctttctgtggcatttatagcaaagacggccagatctttatgtcagcttgtcaggatcagaccatcagactgtatgattgtcggtacgggcgttttcggaaattcaaaagcattaaagcaagggacgtggggtggtctgttcttgatgtcgccttcaccccagacgggaaccacttcctttacagttcttggtccgactatatccatatctgcaatatttacggggaaggggatacacacacagctcttgacttgcgtcctgatgaacggcgatttgcagtcttttccattgccgtatcctcagatggcagagaggtactggggggagctaacgacggttgtctatacgtctttgaccgggaacagaaccgccgaacacttcagatcgagtctcatgaagatgacgttaatgccgttgccttcgccgacatttcaagccagattttatttagcggcggtgacgatgccatctgtaaagtgtgggaccggaggacaatgcgagaggatgatcctaagcccgtcggcgcactcgcaggccatcaggatggcatcacgttcatcgactccaagggagacgccaggtatctgatcagcaacagcaaagatcagacaatcaaactgtgggacattcggcgattttcttctagggaggggatggaggcttctcggcaggcagctacccaacagaactgggattaccgctggcagcaggtgcctaaaaaggcctggaggaagctcaagctgccaggagactccagcctgatgacctaccgcggacacggtgtcctgcacacattaattcgctgccgattcagtcctatacactccactggccaacagtttatctacagtggatgctctacagggaaagtcgtggtttacgacctgctctctggccatatagtgaagaagcttaccaatcacaaagcttgtgtccgcgatgtgtcttggcatccatttgaggagaagattgtgtcctcttcttgggatggcaacctgcgcctttggcaatacaggcaggcggagtactttcaagacgacatgcccgaaagtgaggagtgcgcgtccgcccctgcaccagtgccacagagcagcacaccgttttctagcccccagtag

SEQ ID NO: 220090 - DNA, 273 bp, synthetic construct
  misc_feature 1..273: note = Description of Artificial Sequence: Synthetic coding sequence
  source 1..273: mol_type = other DNA
atgggtagtagaaactcgtcatccgcagggtctggttccggtgatccttccgaggggctgccacggcgtggtgctggtctgcgccgatccgaagaagaagaagaggaagacgaagacgtagacttagcccaagcactgcttgatagcgaggaagagaacgatcgggcatgggatggaaggctgggggatcgatacaaccctcccgtggatgctacgccagacacacgcgagcttgagttcaacgaaatcaagacacaagtcgagttagcgtag

SEQ ID NO: 220091 - DNA, 93 bp, synthetic construct
  misc_feature 1..93: note = Description of Artificial Sequence: Synthetic coding sequence
  source 1..93: mol_type = other DNA
atggggtccaggaatagtagcagtgccggtagtgggtctggcgaccccagcgaggggctgccccgacggggagcaggactgcggaggtcttag

SEQ ID NO: 220092 - DNA, 429 bp, synthetic construct
  misc_feature 1..429: note = Description of Artificial Sequence: Synthetic coding sequence
  source 1..429: mol_type = other DNA
atgggcagtcggaactcatccagcgctggctctggatcaggcgacccatcagagggactacctcggaggggagccggtcttaggaggagtgaggaggaggaggaggaagatgaagatgtcgatttggctcaagtactagcttacctacttcgcagaggccaggtacgcctggtgcagggaggaggcgcagccaatttgcagttcattcaggctctgttagactccgaagaggaaaatgatcgggcatgggacggcaggctaggtgatagatacaaccccccagtcgatgcgacccctgacacccgggagctggaatttaatgagatcaaaacacaagtcgagttggccacagggcagttgggcctgcgtcgagccgctcaaaagcattctttccccaggatgctgcatcagagagaacgcggactttag

SEQ ID NO: 220093 - DNA, 204 bp, synthetic construct
  misc_feature 1..204: note = Description of Artificial Sequence: Synthetic coding sequence
  source 1..204: mol_type = other DNA
atggggtcccgcaactcttcttcggcgggttccggcagcggcgacccttctgagggccttccccgacgaggtgccggactgagacgttccgaggaagaagaagaagaggacgaggacgtggatctggcccagcggccatccgaggtgggagccggtaggcgatgcagcaagtttacgatccactcggggccattggggctttag

SEQ ID NO: 220094 - DNA, 321 bp, synthetic construct
  misc_feature 1..321: note = Description of Artificial Sequence: Synthetic coding sequence
  source 1..321: mol_type = other DNA
atggggtctcgcaatagctcatctgctggatccggaagtggggacccctccgagggcctgcctcgtcgtggcgctggactgagacgcagcgaagaagaagaagaggaggatgaggatgtcgatctagctcaagtgctggcatatcttctgcggagaccgagttggactcaacgaaagcgtatgacagaactgggcatggtagtgctgggaattgacacgacccatctctggatgcttcccttaactcccggtagctggaattctatgcgcagccgacacaaatggaactggcctcagggcagctggggcttggggggatag

SEQ ID NO: 220095 - DNA, 387 bp, synthetic construct
  misc_feature 1..387: note = Description of Artificial Sequence: Synthetic coding sequence
  source 1..387: mol_type = other DNA
atgggcagtcggaactcatcctcagccggatcagggtccggcgacccatctgaggggctcccccgaagaggagccggactgaggcggagcgaggaagaagaggaagaggacgaggacgtcgacttagcccaggccctgctggattccgaggaagaaaatgaccgcgcttgggacggaaggctgggggatcgctataacccgcctgtcgatgctacccccgatacccgtgagctcgagttcaacgaaattaagacacaagtggaactcgcgacaggccagctgggactaagacgtgccgctcagaagcacagttttcctcggatgttacaccagcgcgaacgtggactgtgccacagagggtcctttagcttgggggagcagtcttag

SEQ ID NO: 220096 - DNA, 465 bp, synthetic construct
  misc_feature 1..465: note = Description of Artificial Sequence: Synthetic coding sequence
  source 1..465: mol_type = other DNA
atggggtccagaaacagttcctcagcaggttctggatccggggatccgtcagaaggattgccccgacggggagccggactgcggagaagcgaggaggaggaagaggaagatgaagacgtcgatctcgctcaagttctcgcctacctgttacgaaggggacaagtcagactcgtgcaaggagggggagctgccaacctgcagtttattcaggccctgcttgattcagaagaggagaacgaccgagcttgggatggcagactgggtgatcgctacaacccccctgtcgacgccactcccgatacaagggagctggagttcaacgaaattaaaactcaggtggagctggccactggacaactcggcctgcgaagggccgctcagaaacacagttttccacgtatgctgcaccagcgggagagagggctttgtcaccgagggtctttctccttgggtgagcagagttag

SEQ ID NO: 220097 - DNA, 2829 bp, synthetic construct
  misc_feature 1..2829: note = Description of Artificial Sequence: Synthetic coding sequence
  source 1..2829: mol_type = other DNA
atgaagcggagagccggactgggtggctcaatgcgctcagtggtggggtttctatcacaaagaggtcttcacggagatccattacttacccaggattttcagcggagacggctgcggggatgtcgcaatttatacaagaaagatctcttaggtcactttggatgcgttaacgctatcgagttctccaacaacggcggtcagtggctcgtcagtggcggtgacgatagaagagtcttgctgtggcacatggagcaggccatccacagcagagtgaaaccaattcagctgaaaggtgagcatcacagcaacattttttgcctggctttcaacagcggaaacactaaggttttttcaggtggcaatgacgagcaggtcatcctccatgacgtggagtcaagtgaaaccctagatgtttttgcccacgaggacgctgtgtatgggctctccgtgtcgcctgtgaacgacaacattttcgccagcagctctgatgacgggcgagtgcttatctgggacatccgcgagagtccgcatggtgaacctttctgtttggctaactacccatctgcttttcattccgtaatgtttaatccagtcgaaccaaggttgcttgccacagcaaattccaaggaaggtgtggggctgtgggacatacgaaaaccacagtcttccttgctccggtatggaggtaacctttctctgcaatccgcgatgtcagtgaggttcaacagcaatgggacacagttgctcgcgttgaggagaagactaccacccgtcttatatgacattcactctcggcttccggtgttccaattcgataatcagggttactttaactcgtgcaccatgaagtcttgctgctttgctggggaccgcgaccagtatattttgtccggaagcgacgactttaatttatatatgtggagaattccggcagaccctgaagccggaggtatcgggcgagtggtcaacggcgcattcatggtcctcaaaggacatcggagcattgtcaaccaggtaaggtttaacccccatacatatatgatttgttcaagtggcgtggagaagatcatcaaaatatggtcaccttataagcaaccagggtgcactggggatcttgacgggcgtattgaggacgactcaaggtgtttatacacccatgaggagtacatcagtctggtgctcaattctggcagcggcctgagccatgactacgcaaatcagtccgtgcaggaggatccaaggatgatggctttctttgacagtctggtccgtagggagatcgaaggatggagcagtgattctgattctgatctcagtgaaagcactatcttacagctccatgcaggcgtctccgagcgctcaggatacacagattccgagagcagcgcatctcttcccaggagcccccctcccaccgtggacgaatccgctgataatgcatttcacctgggtccactgcgagtcaccactaccaacacagttgcatctaccccccctacaccaacttgcgaagacgcagcatctaggcagcagcgactgtctgctctaaggagatatcaggataagcgccttttggccctgagcaatgaatcagattcagaggagaatgtttgcgaggtggaactcgacaccgatctgtttcccaggccgcgttctccaagtccggaagacgagagcagttcatcgagttcgtcatcctcttccgaagatgaagaagagctgaacgaacggagagctagtacctggcagagaaacgcgatgagacggagacaaaagaccacacgggaggacaaacccagcgcccctataaagcctactaacacatatattggggaggacaattatgattatccccagatcaaagtggatgacctgtcttcatctccaacctctagccccgagaggtccactagcaccctggagattcagccctcccgcgctagccccacaagtgatatcgaaagtgtcgagcggaagatttataaggcgtataaatggctgcgatatagttatataagctactcgaacaataaagacggcgagacatcattggtgactggagaggccgacgaagggagggctggcactagccacaaggacaacccagcccctagttcatcaaaggaagcctgtctaaatatcgctatggcacagagaaaccaagaccttccccctgaaggctgcagcaaagatacttttaaggaggagaccccccgtaccccctctaatggcccaggccatgagcactcttctcatgcatgggccgaagtccccgagggtacatcacaggacacagggaactccgggagcgtggaacacccttttgaaacaaaaaaattaaacgggaaggccttgtcttcacgcgctgaggagccacccagcccaccggtacccaaagccagtggcagtactctcaattcaggcagcggtaattgcccacggacccaatcagatgatagtgaggagcgcagtttggaaacaatttgcgctaaccataacaacggacgactgcacccccgacctccccatcctcacaataacggccagaatttgggcgagctggaagtcgtggcatactcaagccctggccattctgatactgatcgggataactcatcgctgactggaacccttttacacaaagactgttgcgggtcggagatggcatgtgagacgcctaacgccggtactcgcgaagatcctactgataccccagcgaccgactcaagcagagctgttcacggccacagtggacttaagaggcagcggattgagctggaagatacggatagcgagaacagtagctcggagaagaagcttaaaacatag

SEQ ID NO: 220098 - DNA, 2583 bp, synthetic construct
  misc_feature 1..2583: note = Description of Artificial Sequence: Synthetic coding sequence
  source 1..2583: mol_type = other DNA
atggaacaggccatccattcccgtgtgaagcctatccagcttaagggtgagcaccactccaacatattctgcctcgctttcaattccgggaatacgaaggtcttctctgggggtaatgatgaacaggttatcctccacgatgtcgagagctcagagacgctggatgtctttgcccatgaggatgcggtgtacggtctttcagtgtcacccgttaacgacaatatttttgcctccagttcagacgacggaagagtactgatctgggacatacgggaatcaccgcacggtgaacctttctgcctggccaattatcctagtgctttccactcagtgatgttcaatccagttgaaccgaggctgcttgccacagccaattctaaggagggtgtcggactgtgggacatccgaaagcctcagagctcacttctgcggtatgggggaaacctatctttgcagtctgccatgtccgtgcgattcaactccaacggcactcagctcctggccctgcgtcgtagattacctcctgtactttatgatatccattctcgcctccctgtatttcagttcgacaaccagggatatttcaactcatgcacaatgaagagctgctgtttcgccggagatcgagatcaatatattttgagtggtagtgacgacttcaacctgtatatgtggcgaatccccgctgacccagaggccggaggcattggcagagtggtgaacggagcgttcatggtgttaaaaggccacaggtctatagttaaccaggttcgatttaacccccatacctacatgatctgttcctctggagtggaaaagatcattaaaatctggagcccctacaagcaacctggttgcaccggagatctggacggtcggatcgaagacgattcccggtgcctgtacacacacgaggagtatattagcctggtgctgaattccgggtccggcctcagccatgattatgcgaatcagtccgttcaggaagaccccagaatgatggcattctttgattctcttgttcgtcgcgagatcgaaggctggtcatctgattccgactctgatctttcggagtccaccatactccaactgcatgcaggagtaagtgagcggtcaggttatactgacagtgagagttccgcctctctccctaggtcaccacccccaacagtcgatgagagcgctgataatgcatttcacctgggtcctcttcgtgttactacgaccaatactgtggctagtacccctcctaccccaacttgcgaggacgcggcaagccggcaacagcgtctatctgctttgagaaggtaccaggacaaacgccttctcgccctgagtaacgagagcgacagtgaggagaatgtttgtgaggtcgagctggatacggacctgttcccaagacctagaagcccgtcacctgaggacgagtcttcctcatcttcaagctcctcttcgtccgaggacgaggaagaactgaacgagcgccgagcaagcacatggcaacggaatgccatgaggaggaggcagaagactacccgtgaagataagccttcagcaccgataaaacctacaaacacttacatcggtgaggataactatgactaccctcagatcaaagtcgacgacctgagcagctccccaacaagtagccctgagcggagcacttcaactctcgagattcagccctctcgagcctcaccgacgagcgacattgagagcgtcgagagaaaaatctataaggcttacaaatggttgagatactcctacatttcctacagcaataacaaggacggcgagacaagccttgtgaccggcgaagcagacgaagggcgtgccggtactagtcacaaagataaccctgcgccatcctccagcaaagaggcatgtttgaacattgcgatggcccagagaaaccaggatctccctcccgagggttgttctaaggacactttcaaagaggaaactcccagaactcctagcaacggtccaggacatgagcacagctcccatgcatgggctgaggttcccgaagggacctcacaagatacggggaacagcggctctgtggagcatccttttgagaccaagaagcttaacggtaaggcgctctcaagcagagctgaggagccaccttctccgccagtccccaaggccagcggatcgacgctcaattcaggcagtggcaattgtccacgaactcagagcgatgactccgaggagcgcagcctcgaaacaatctgcgctaatcacaacaacggtcgcctccacccaagaccacctcatcctcataataatggtcaaaatctgggtgagctcgaagtggtcgcctactcgtccccaggccactcagacaccgacagggataattcctcactgacgggcaccctgctccacaaggactgttgcggatctgaaatggcctgcgaaactcctaatgctgggacacgagaggacccaaccgatacacctgcgaccgacagcagccgggcagtgcacggacactccggactgaagcggcaacgcatcgagcttgaggatacggattcagaaaacagctcctcagaaaaaaagcttaagacgtag

SEQ ID NO: 220099 - DNA, 633 bp, synthetic construct
  misc_feature 1..633: note = Description of Artificial Sequence: Synthetic coding sequence
  source 1..633: mol_type = other DNA
atggagcaggcaatccactcaagagtgaaacctatccagctgaaaggggagcaccacagtaatatcttctgcttagctttcaatagcggcaacactaaagtgttcagcggcggtaatgatgaacaggtgatcttacatgatgtggagagcgagaccttagatgtattcgcgcacgaagacgccgtttatggccttagtgtctctccagttaacgataacattttcgcctccagctccgatgatggcagagtacttatttgggacatccgagagtcaccccacggggagccattctgtcttgccaattacccgagtgcttttcattctgtcatgttcaaccctgtcgaaccccgactgttggccacagctaacagcaaggagggtgtcggcctgtgggacatccggaagccgcagagctcacttctgagatatggcggaaacctttcactccagagtgcgatgtccgttcgcttcaactccaacggaacgcaactcctggccctgaggcggaggctccccccagtgctctatgatatccactcccgcttacccgtgtttcagttcgacaaccaagggtattttaatagttgtacaatgaagtcgtgctgttttgccggtgaccgtgaccaatag

SEQ ID NO: 220100 - DNA, 2583 bp, synthetic construct
  misc_feature 1..2583: note = Description of Artificial Sequence: Synthetic coding sequence
  source 1..2583: mol_type = other DNA
atggaacaggctattcattccagagtgaagccaattcaacttaaaggcgaacatcattctaatatattttgcctcgccttcaactcgggaaacacaaaggtgttcagtggcggaaatgacgaacaagtcattttgcacgatgtggagtctagtgaaaccttagacgtcttcgcccatgaggatgctgtttacggactgtcagttagcccggtgaacgataatatcttcgcttcctcttctgatgatgggcgtgtgctgatttgggacataagagagtccccacacggtgaacccttctgcctggccaattacccctcagctttccactctgttatgtttaaccctgtcgagccccgactcctggctacagctaacagcaaagaaggcgtcggactgtgggatattaggaaaccacagagctcactcctccggtatggcggtaacctttcattgcaatcagcgatgtccgttcgctttaacagcaacggtacccagctgttggccctgaggaggcgcctgccacctgtgctgtatgacatccatagtcgcttgccagtgttccagttcgacaaccagggctattttaatagctgtactatgaaaagttgttgcttcgctggcgatagagatcaatacatcctgtccggatcagacgacttcaacctttatatgtggcgaattccagccgatcccgaagctggagggataggcagggtcgtcaacggcgcattcatggtgttgaagggccatagaagcatagttaatcaagtgagattcaacccacatacatacatgatttgttcatcgggggtcgagaaaatcatcaagatctggagtccatacaagcaacccggatgtaccggcgacctggatggcagaatcgaagatgattctcgctgcctgtatacacacgaggaatacattagtctcgtccttaactccggatcagggctgtctcacgattatgctaatcagagcgtccaggaagatcctcggatgatggcttttttcgatagtctggtacgacgcgagattgagggctggtccagtgatagcgactctgatctgagcgaaagtacaatcctgcagctccatgcaggggtcagcgagagatctggatacacggatagtgagtcctctgcctccctacccaggtcccccccacccacggtggacgaatcagccgataatgcatttcacctgggtccccttcgggtgaccactactaataccgtggctagcactcctccaacccccacgtgtgaagacgctgccagccggcagcaaaggctgtctgccctgcggagatatcaagacaaaagactgctcgctttgtccaatgaaagtgattctgaggaaaatgtgtgtgaagtcgagctggacacagatctgttccctagacctcgctctccaagcccggaggacgaatccagctcaagcagcagctctagtagttcagaggacgaagaggagcttaatgagcggcgagcgtccacctggcaacgcaatgccatgcggagacggcagaaaaccaccagggaggataagcctagtgccccaattaagcccacaaatacatatatcggagaagacaattacgactacccacagataaaggtcgacgatttatcctcctcacctacatcctctccggaacggagtacatcaacgttggagatacaaccatcacgcgcttctccaacatctgacattgaatccgtggaaagaaaaatctacaaggcttacaaatggctgcgatactcctacattagctacagtaataacaaagacggagagacaagtctggtcactggggaagcagatgagggacgtgcaggaacaagtcacaaggacaacccagccccaagctcgtcgaaagaagcatgtcttaatatcgccatggctcagcggaaccaggacctcccccctgagggttgcagtaaggacacgttcaaggaggaaacgcccaggacgcccagcaacggccctgggcatgaacattcttcgcatgcctgggctgaggtccccgaaggtactagccaggacaccggcaattctggcagtgttgaacacccctttgaaacgaagaaacttaacgggaaggccctctctagtagggccgaagaacctcctagtcctcctgttcctaaagccagcggcagtaccctgaatagcggatccggcaactgcccacgaactcagagtgacgacagcgaggagaggtccttggagacgatctgtgcgaatcataataacggacgactccaccctcggccaccccaccctcacaacaacggacagaacctaggagagttggaggttgtggcctactccagtccaggccactctgacacggaccgagacaattccagtctcacaggcactctgctgcataaggattgctgtgggagcgaaatggcctgcgagacgcctaatgcgggaacgagagaggaccccaccgatacaccagccacagactcttcaagggcagtgcacggccacagcggactcaagcgtcagaggatagaattagaggacacggactccgagaatagtagcagcgagaaaaagctgaaaacctag

SEQ ID NO: 220101 - DNA, 357 bp, synthetic construct
  misc_feature 1..357: note = Description of Artificial Sequence: Synthetic coding sequence
  source 1..357: mol_type = other DNA
atgccttttctggagcttgataccaacctacccgcaaatcgcgtcccggctggtcttgaaaaacgcctgtgtgctgcagcggcttcgatcctaggaaaacctgctgatcgggttaacgtcacagttagaccgggattggccatggcccttagtggctcaactgaaccctgcgcgcaactctccatctcctctatcggcgtagtggggaccgcagaagataacaggtctcattctgctcatttctttgaattcctgacaaaggaactagctctgggacaggacaggatactcatcagattcttccctctcgagtcatggcaaattggaaagatcggaactgtgatgaccttcctctag

SEQ ID NO: 220102 - DNA, 357 bp, synthetic construct
  misc_feature 1..357: note = Description of Artificial Sequence: Synthetic coding sequence
  source 1..357: mol_type = other DNA
atgcctttcttagagttggatactaacctgccagccaatcgggtgcctgccggactggaaaagcgactgtgtgccgcagccgcatcgattctcggtaagcctgcagatcgcgtaaacgtcacggttcgcccagggctagccatggccttaagcggcagcacagagccctgtgcccaactgtccatcagttctataggggttgtaggaaccgcagaggacaataggagtcatagtgcccatttctttgaattcctgactaaagagctggcactggggcaggatcgaatcttgataaggtttttcccattggaatcatggcagattggcaagatcgggactgttatgactttcctctag

SEQ ID NO: 220103 - DNA, 399 bp, synthetic construct
  misc_feature 1..399: note = Description of Artificial Sequence: Synthetic coding sequence
  source 1..399: mol_type = other DNA
atgcagctctttctcttagctgtcagcgtgccccttcctgccatgcccttcctggagctcgacaccaacttgcctgctaatcgagtgccggcagggttggagaaaagactgtgcgcagccgctgccagcatactcggcaaaccagccgatagggttaacgtaaccgtgcgtcccggtttggcaatggcacttagtgggtctaccgaaccttgtgcgcaactctcaatctctagcattggtgtcgttggtactgctgaggacaacaggagccattcagcccacttctttgagttcttaacaaaagaactcgctctcggccaggaccggatcctcatcaggttcttccctcttgaatcctggcagatcggaaaaataggaacagtaatgacatttctttag

SEQ ID NO: 220104 - DNA, 348 bp, synthetic construct
  misc_feature 1..348: note = Description of Artificial Sequence: Synthetic coding sequence
  source 1..348: mol_type = other DNA
atgcccatgttcatcgtgaacaccaacgtgccccgagcctccgtacccgacgggttcctgagcgaactgacacagcagctggctcaagccaccgggaaacctcctcaatacattgctgttcacgtagtacccgaccagctcatggcttttggaggttcctcagagccatgcgccctgtgctcgctgcacagcatcgggaagattggaggggcacagaacaggagttactcgaaacttttgtgcggtttgctcgctgagagacttagaatatctcccgatcgcgtctacattaattactacgatatgaacgccgcaaatgtgggctggaataacagcaccttcgcttag

SEQ ID NO: 220105 - DNA, 1224 bp, synthetic construct
  misc_feature 1..1224: note = Description of Artificial Sequence: Synthetic coding sequence
  source 1..1224: mol_type = other DNA
atgaataacagtggtgccgacgaaattggaaaactttttgtcggtggtctggactggtccacgacacaggagacgctgcgttcctacttctcacagtatggcgaggtcgtcgactgtgtgattatgaaggacaaaactaccaaccagtcccggggatttggttttgtaaaattcaaggaccccaactgcgtgggcacagttctggcctctcgaccgcatacgctggatggcagaaacatcgatcctaaaccctgtactcctagaggtatgcagcccgaaaggacacgcccaaaagaaggatggcagaaaggtcccaggagtgataacagtaagtcgaacaagattttcgttggtggtattccccataattgcggcgagaccgagctgcgggaatattttaaaaagtttggcgtcgtgacagaggtcgtcatgatatacgacgcggagaaacagcgcccaagaggattcgggttcatcacttttgaggacgagcagagtgtcgatcaggctgtcaacatgcattttcacgacatcatgggaaaaaaggtggaggttaagcgtgctgaacccagggattctaaatctcaggcgccaggacaacccggtgcgtcacaatggggatcacgcgttgtgcccaacgccgctaatggttgggctggacagcctccacctacttggcagcaaggatatggtcctcagggcatgtgggtgccggctgggcaagctatagggggttatggacccccacctgcgggacgtggcgctccgccacccccaccccctttcacatcatacattgtcagtactccacctggcggttttcccccaccccaggggttcccccagggctatggagccccaccccagttcagctttggttatggccctcctcctccccctcctgaccagtttgcaccgccaggcgtaccgccaccccctgcaacccccggagcggcaccccttgcgtttccccctccaccctcacaagcggcacccgatatgtccaagccaccaaccgcccagcccgacttcccatacggtcagtacgccggttacggtcaggacctgtccgggtttggccaaggtttctccgaccccagccaacagccaccatcttatggtggacccagcgttcccggaagcggcggacctcctgcaggaggcagcggattcggccgtgggcagaaccataatgtccagggctttcacccctaccgacggtag

SEQ ID NO: 220106 - DNA, 2223 bp, synthetic construct
  misc_feature 1..2223: note = Description of Artificial Sequence: Synthetic coding sequence
  source 1..2223: mol_type = other DNA
atggccgctttctctgagatgggcgtgatgcccgaaatagctcaagccgtagaggagatggactggctgttgcctaccgatattcaagccgaatcaatcccacttatactgggcggaggagacgtgctgatggccgctgagacaggctccggtaaaacgggcgctttcagtatccctgtcatccagattgtatatgaaaccctgaaagaccagcaagagggtaagaagggaaaaaccactattaagactggtgccagtgtcctgaacaagtggcagatgaatccctacgaccggggaagcgcattcgctatcgggagcgacgggctctgctgtcagagccgggaagtgaaagagtggcatgggtgcagggctacaaaaggccttatgaaaggcaagcattactacgaagtatcttgccatgaccagggcctgtgtagggtggggtggtccaccatgcaagcatccctcgacctgggtaccgataagtttggttttggctttgggggaaccggcaaaaaaagccacaacaagcagtttgataattatggggaagagtttaccatgcatgataccatcgggtgttatctggatatcgacaaaggacacgtgaagttttccaagaacggaaaagacctcggcttagctttcgaaatccctccccacatgaaaaatcaggcactttttccggcatgtgtgctgaagaatgcagaactgaaattcaatttcggtgaagaagagtttaaattcccacccaaggacggattcgtagccttgagtaaagcacctgacgggtacatcgtcaagtctcaacattccggcaacgcccaggtcacacagacgaaatttctccctaacgccccaaaagctctcatagttgagccatccagggagctggctgaacagacgctgaataacataaaacagtttaaaaagtacatcgacaacccgaagttgcgagagctgttgattatcggcggtgtcgccgcacgtgaccagctgtctgtcctggaaaacggggttgacattgtggtcggaacacctggcagacttgacgaccttgtctcaacgggcaagctgaatttatcacaagttaggttcttggtgctcgacgaggcagacggtctcctcagccagggctactcagatttcataaaccgaatgcacaatcagatcccccaggtaaccagtgatggaaagcggctgcaggtcatagtttgcagtgcaacactccactcgtttgacgtaaagaagctgtccgaaaagataatgcattttccaacgtgggtggatctgaaaggtgaggatagcgttccagataccgtccaccatgtggtcgtccccgtgaatcctaaaactgatcgcctgtgggaaaggctagggaagagccacattagaaccgatgacgtacacgccaaagataacaccaggccaggagccaacagccccgagatgtggagcgaagccataaagatcctcaaaggggagtatgcagtaagggctatcaaagaacacaagatggatcaggccatcattttttgtcgaacaaagatagactgtgacaacctggaacagtatttcatccagcagggaggcggtccagacaagaagggccaccagttcagctgcgtttgcctgcacggggacaggaaaccccatgagagaaagcagaatctcgaacgcttcaaaaagggcgatgtgagattccttatctgcacagacgtcgctgcgaggggaattgacatccacggagtaccttatgtgataaatgttactcttcctgacgaaaagcagaactatgtgcacagaattgggagggtcggtcgggcagagagaatggggctggccatttctctggtggctaccgagaaggagaaggtctggtaccacgtgtgttcttcccggggaaaagggtgctacaacaccaggcttaaagaggatggcggttgtacaatctggtacaacgagatgcagttgctgagtgaaatcgaagaacacctaaactgtactatatctcaagtggaacccgatatcaaggttccggtggatgagtttgatgggaaggtcacatatggccagaaaagagctgcgggagggggatcctacaagggccatgtggatatactggccccaacagtgcaagaactagcagcgttggaaaaagaagcccagacatcgttcctccacctcggttacctgcctaaccaactgtttcgaactttttag

SEQ ID NO: 220107 - DNA, 51 bp, synthetic construct
  misc_feature 1..51: note = Description of Artificial Sequence: Synthetic coding sequence
  source 1..51: mol_type = other DNA
atggcagcctttagtgagatgggggttatgcccgagatagcgcaagcgtag

SEQ ID NO: 220108 - DNA, 1869 bp, synthetic construct
  misc_feature 1..1869: note = Description of Artificial Sequence: Synthetic coding sequence
  source 1..1869: mol_type = other DNA
atggctgcctttagcgaaatgggagtcatgccagagattgctcaggcagttgaagagatggactggctgctgcctactgacatccaggccgaaagtattcctctcattctcggcggtggggatgtgctgatggcagccgagaccgggagcggtaaaacaggagctttcagcattcctgtgatccagatcgtgtatgaaactctaaaagaccaacaagagggcaaaaaagggaagactaccatcaagaccggagctagcgtgttgaataagtggcagatgaacccttacgaccgcgaggtgaaagaatggcacggatgccgcgctacgaaaggcctgatgaaagggaagcattactacgaggtgtcgtgtcatgaccagggtctgtgccgcgtcgggtggagcaccatgcaggctagtctggatctcggcacagataagtttggctttggtttcgggggtactgggaaaaaaagccacaacaagcaatttgataactatggagaagaattcacaatgcacgataccattggttgttacttggacattgataagggccacgtgaaatttagcaaaaatggcaaagatctcgggctagcattcgaaattcccccacacatgaaaaatcaggccctcttccctgcatgtgtgctcaagaatgccgagctgaaattcaactttggagaggaggaatttaaatttccaccgaaggatggctttgtcgcgctgtctaaggcccctgacgggtacatcgttaaatcccaacacagcgggaacgctcaagttacacaaacaaagttcctaccaaatgcccctaaagctcttatcgtcgagccttcaagagagttagctgaacagacactcaataatatcaagcagttcaagaagtacatcgacaatcctaagctgcgggaacttctgataataggcggagttgcagcacgggatcagctttcagttctcgagaatggtgtagacatagtggtgggcacgcctggtaggctcgatgacctggtgagtacaggcaagctgaacctgtcacaagttcgcttcctggtgctggacgaagccgacggcctgcttagtcaaggatattccgactttatcaacaggatgcataatcagatccctcaagtaacttccgatggcaaaaggctgcaggtgattgtctgttctgcgaccctccattccttcgacgtgaagaaactgtcagaaaaaatcatgcacttcccaacatgggtcgatctgaagggggaagacagtgtgcccgatacggtgcatcatgtcgtggtgcccgtgaacccaaaaaccgaccggctatgggagcggctcgggaagtcacatattagaaccgacgatgtgcacgctaaggacaacaccagaccaggcgcaaactcgcctgaaatgtggtcagaggccattaagattttaaagggggagtacgccgtgcgcgcaattaaagagcataaaatggatcaggcaattatcttttgtcgcaccaagattgactgcgacaatctcgagcagtattttatccaacagggcggaggcccagacaaaaaaggacaccagtttagctgtgtatgcttgcatggcgacaggaagccccacgagcggaagcagaacctcgaacgcttcaagaaaggggacgtcaggttccttatctgtacagacgtcgccgcaagaggcatcgacatccatggagtcccctacgtgattaatgtgacactccctgacgagaaacagaattacgtgcaccgcatagggcgagtgggcagagcagagcgcatgggattggcaataagcctcgtggctactgagaaagagaaagtgtggtaccacatggtccagcgagacgcagtgaccatttag

SEQ ID NO: 220109 - DNA, 2628 bp, synthetic construct
  misc_feature 1..2628: note = Description of Artificial Sequence: Synthetic coding sequence
  source 1..2628: mol_type = other DNA
atgggtaagacggccaactcacctggctccggcgcacggccagatccagtgcgtagtttcaatcggtggaagaaaaaacattcgcataggcagaataagaagaaacaactgcggaagcaactcaaaaagcccgagtggcaagtggaaagggaaagcatttcccgactgatgcagaattacgagaaaattaacgtcaatgagatcacaaggttttcggattttccgctctcaaagaaaactttgaaaggtttgcaggaagcacaatacaggctagtgacagaaatccaaaaacaaaccatagggctggccttgcaggggaaggacgtactcggcgcagctaaaaccggatccggcaagactctggcatttctcgtgcccgtattggaagccctctatcgcctgcaatggacgagtacagatggattaggcgtgctgattatcagcccaacacgagaactggcttatcagacttttgaggtgctccggaaggtaggaaagaaccatgatttttcagctggactgatcatcgggggtaaggacctcaagcacgaggcggagcgcatcaacaacatcaatattctggtttgcacacccggacggcttctccagcacatggatgaaaccgtaagtttccacgcaaccgatttgcaaatgctagttttggatgaggctgacagaattctggatatgggattcgcagacactatgaatgccgtaattgaaaatctgcctaagaagcgccagaccctcctgttttctgcaacccagacaaagtcggttaaagacctagccaggctaagtctaaagaacccagagtatgtctgggtccatgaaaaagcgaaatatagtacccctgcaacgcttgaacagaattatatagtgtgtgagctgcagcaaaagatttccgtgctgtattcctttctgcgatcccacctgaagaagaagtcaatagttttcttctcgagctgcaaagaggtacaatatctgtaccgcgtattctgtcgcctccgaccaggggtgtccatactcgccctgcacggtcggcagcagcaaatgaggaggatggaagtgtacaacgaatttgtgcggaaacgcgcagccgtcctgtttgccaccgacattgctgccaggggtctggactttcccgctgtgaattgggtgctgcagttcgactgcccagaggacgcaaacacgtacattcatcgcgctggcagaaccgcccgttataaggaagatggagaagctttgcttatcctcctgccatcagagaaagcgatggtccagcagctcctgcaaaagaaggtgcccgtgaaagagattaaaatcaaccccgagaagctcattgacgtccagaaaaagctagagtccatcctagcacaagaccaagatctcaaggagagagctcagaggtgttttgtgtcttatgtgcgctccgtgtatctaatgaaggataaagaagtgtttgatgtctcaaaactgcctatcccagagtacgccttgtctcttggcctcgccgttgctcctagggtccgcttcctgcagaagatgcagaaacagccaacaaaggaacttgtccgaagtcaggctgataaagtaattgagccgcgtgcacccagcctaaccaacgacgaggtggaggaatttcgggcttattttaacgagaaaatgtcgatccttcagaaaggcggaaagcgattggagggtacagagcataggcaagacaacgacactgggaacgaggagcaggaggaagaagaagacgacgaagaagaaatggaggaaaaactggcaaaggctaaaggttcccaggctcccagtctgccgaacacgagtgaagcgcagaagatcaaggaagtgccaactcagttcctggatagggacgaggaagaggaggacgccgactttctcaaagtcaagaggcataacgtcttcggactggacctcaaggacgaaaagacattacagaagaaagaacccagcaaatcatccatcaagaaaaagatgactaaggtagctgaagccaaaaaagtgatgaagcgtaattttaaggtcaataaaaagataaccttcaccgacgagggcgagctggtccagcagtggccacagatgcagaaaagtgccatcaaggacgccgaagaggacgacgataccggtggaatcaacctgcataaagccaaggaaaggcttcaggaggaagacaagtttgataaggaggagtaccgaaaaaagatcaaggccaaacatagggagaagcgcctgaaagagagggaggcacgcagagaggctaataaacgccaggctaaggcaaaggatgaagaagaggcttttctggactggagtgacgacgacgatgatgatgatgacggatttgacccttccacgcttcccgaccctgacaagtatcgatcatctgaggactccgatagtgaagacatggagaataagattagcgacaccaaaaagaaacaggggatgaaaaagcggagcaactcagaggttgaggatgtgggacccaccagccacaaccggaaaaaggcacgttgggacaccttggaacccttggacaccgggctgagcctcgctgaagacgaggaacttgttcttcacctccttcggtctcagagctag

SEQ ID NO: 220110 - DNA, 2346 bp, synthetic construct
  misc_feature 1..2346: note = Description of Artificial Sequence: Synthetic coding sequence
  source 1..2346: mol_type = other DNA
atgggcaagacggccaatagcccaggcagcggcgcaaggcccgatcctgtccgcagcttcaaccggtggaagaaaaaacactcccaccggcagaacaagaagaaacagctcaggaagcagctcaaaaagccagaatggcaggtcgaacgggagtccatctctagactcatgcaaaactatgaaaagatcaacgtgaatgagattacaagattttccgatttccctctgtctaagaagacactgaaaggactgcaggaagctcaatacaggttagtaactgagatccaaaaacagacaattggtctggcactccagggcaaggacgtgttaggggctgccaagaccggatcgggcaaaaccctggcctttttggtaccggtgaacgaagctgatcggatcctggatatgggatttgcagataccatgaatgccgttattgagaaccttcctaagaaaagacagacattgctcttctctgctacccagacaaagtctgttaaagatcttgcgcgtttaagcctcaaaaatcccgagtacgtttgggtacacgagaaggcgaaatattcgactcctgctacgctggaacagaactatatcgtatgcgagttgcagcagaaaataagcgtgttgtattcattcctgcgctcccatctgaaaaagaagtcgatagtgttcttttccagctgtaaagaagttcaatacctctaccgtgtgttctgcaggctgaggcctggcgtctccattttggccctgcacggcaggcaacagcagatgcggaggatggaggtgtataatgaattcgtgcgaaagagagccgcagtgctgtttgcgacagatatcgccgcacgaggcctggatttcccagccgtgaactgggtactgcagtttgactgtccagaagatgcgaatacgtacatccaccgcgcagggaggaccgccagatacaaagaggatggggaagcactccttattcttctgccatctgagaaggctatggttcagcagttacttcagaaaaaagtcccagttaaggagatcaaaattaacccggaaaagctaatcgacgtgcaaaaaaagctggaatctattctggcacaggaccaagatctgaaagaacgggctcaacgctgctttgtgtcttatgtgagatcagtgtacctgatgaaagacaaggaggtgtttgacgtcagtaagttaccgattcctgagtatgcattatccctgggcctggctgtcgctcctagagtgcggtttctccaaaaaatgcagaagcagcccacaaaggagctggtgcggtctcaggctgacaaagtgatcgaaccccgagctcccagtctgaccaacgacgaagtggaagagtttcgggcatattttaacgagaagatgtccatcctccagaaaggaggcaagaggctggaaggcactgaacatcgccaggataacgatactgggaatgaggaacaggaagaggaggaggatgatgaggaggaaatggaggagaagctggccaaggccaaagggagccaggccccaagcctacccaatactagcgaggctcagaagattaaggaagttcccacacagttccttgatcgcgacgaggaagaggaagatgctgacttccttaaggtgaaacggcacaatgtgtttggactggatttgaaggatgaaaagactttacaaaagaaagaacccagtaagagctcgatcaaaaagaagatgactaaggtggcggaggccaaaaaggtcatgaaacgtaacttcaaagtgaataaaaaaatcactttcacagacgaaggtgagctggtacaacagtggccgcagatgcagaagtcagctatcaaagatgctgaagaagacgatgacacggggggtataaacttacacaaagccaaggagagactgcaggaggaggacaaattcgacaaagaagaatacaggaaaaaaattaaggcaaaacatagggaaaagcggctcaaagagcgcgaagcacggcgagaggcgaataagcgacaggccaaagccaaggatgaggaagaggcgttcttggattggagtgatgatgatgacgatgatgatgatggcttcgatcctagcacgctccctgacccagataaatatcggagtagcgaggactccgatagcgaggatatggagaacaagatttctgataccaaaaaaaaacaagggatgaagaagaggtctaattccgaggtcgaggacgtgggccctacatcccacaacaggaagaaagctagatgggataccctagagcctttggatacaggtttgtcccttgccgaagacgaagaactagttctgcatttacttcgctctcagtcctag

SEQ ID NO: 220111 - DNA, 1959 bp, synthetic construct
  misc_feature 1..1959: note = Description of Artificial Sequence: Synthetic coding sequence
  source 1..1959: mol_type = other DNA
atgagaggcggaggctttggagaccgagacagggatagagaccggggaggcttcggtgccagaggcggtggcggactcccccctaaaaaattcggcaaccctggagagcgcctccgtaagaagaagtgggacctgtctgagctgcccaagtttgaaaagaacttttatgtggagcacccagaggtggccaggttgaccccttacgaagtggatgaactgagacgaaagaaagagatcacggtaagaggaggagacgtttgccctaaaccagttttcgcattccaccacgctaattttccacagtatgttatggacgtactcatggaccagcattttacagagcctacacctatccagtgtcagggcttccccttagccctttccggacgagacatggtgggcattgctcagaccggctcaggcaagacgctcgcctaccttctgcccgctatcgtccacataaatcatcagccctacctggagcgcggagacggccctatctgtctggttctggccccaactagagagctggcccagcaggttcagcaggtggcggatgactacggaaagtgctctcgactcaaatctacttgcatttacgggggtgctcctaaaggccctcaaattagggatctggagcgcggtgtggagatttgcattgctacgccaggacggttgattgattttctcgagtctggcaagaccaatctgagacgatgcacatatctggtgctggacgaggcggatcgaatgctcgacatgggcttcgagccacaaattcgaaaaatcgtggaccagatcaggcccgacagacagactcttatgtggagcgccacttggccaaaagaagtccgacagctcgcagaggatttcttaagagactatacccaaatcaacgtgggcaacctggagttatccgccaatcataatatcctgcagatagtcgatgtgtgtatggaaagtgaaaaggaccataaactcatccagttgatggaggaaatcatggcagagaaggaaaataagacgatcattttcgtagaaacgaaacgcagatgcgatgatttgacaaggcggatgcgtagagacgggtggcctgccatgtgtatacatggcgacaagtcacagcccgagcgggactgggtgttaaatgagtttcgaagcggcaaagctcctattctgattgccacagatgtcgcttcacggggacttggcttcgatgtcgaggatgttaagttcgtaattaattacgattaccccaattcaagcgaggactacgtgcacaggatcggccgtacagcaagaagcacaaacaaagggactgcatacaccttcttcacccccggaaacctcaagcaggctcgcgagctgatcaaagtgctggaagaggcgaaccaggcaataaatcctaaattgatgcaactggtggaccatagaggaggaggtggtggtggtgggggaagatctagatataggacgacttcctcagcaaataatccaaatttaatgtaccaggacgaatgcgaccgacggttgagaggagtgaaggatggagggagaagggactccgcctcttacagagatagatcagagacagatcgggctggctacgccaacgggtcaggatatggatcacctaatagtgcatttggcgctcaggccggacagtacacgtatggccagggcacctacggggcagcagcgtatggtacctcttcttatacagcacaggaatacggtgcgggaacctacggtgcaagttcgacaacaagcacaggtcgttcgtcccagagctcttctcagcaatttagcggcatcggacggtctggccagcaaccgcagccactgatgtcccagcagttcgcccagcctcccggagcgacaaacatgattggctatatgggacagacggcctaccagtatcctccaccccctcctccccctcccccatccaggaagtag

SEQ ID NO: 220112 - DNA, 2196 bp, synthetic construct
  misc_feature 1..2196: note = Description of Artificial Sequence: Synthetic coding sequence
  source 1..2196: mol_type = other DNA
ctgcctaccgggttcgtggcacctatcctctgtgtcctgctgccttcccccacccgggaagccgctacagttgcctcagctaccggcgactctgcgtcagagcgcgaatctgcagcacccgcagccgctccgaccgcagaggcaccaccccctagtgtcgtcacgcgacccgaaccacaggcacttccctcccctgctatccgcgctccactgccagacctgtacccatttggtaccatgcgcggtggtggcttcggggatcgggaccgagatcgggaccgcggagggttcggcgcacgcggtggtgggggactccccccaaagaagtttggcaacccaggggaacggctgcggaaaaagaaatgggacctatcagagctgcccaagttcgaaaaaaacttctatgtggaacacccagaggttgctcggttgacaccatatgaagtagatgagctgcgcagaaaaaaggagatcactgtgagaggtggtgatgtctgtcctaagccagtgttcgcatttcaccacgccaactttccgcagtatgtcatggacgtactcatggaccagcactttacagaacctacacccatccagtgccagggtttccctctggccctcagcggtcgcgatatggtggggatcgctcagactggatctggtaagacattggcctatttgttgcccgcaatcgtacacatcaaccaccagccctacctcgagagaggggacgggccaatctgtttggtcttagcaccaaccagagagctggcacaacaggtgcagcaggttgcggacgattatggcaaatgttctcggctcaaaagcacctgtatttatggaggggcacctaaaggaccgcagataagagatcttgagcgaggggtggagatttgcatcgccacacccggacgactgattgactttctcgaatcaggcaagaccaatctcaggaggtgcacgtacttggtgcttgacgaggccgacaggatgctggatatgggatttgagccgcaaatacgtaaaatcgttgaccagattcgacccgacaggcagaccttaatgtggtcagctacatggccgaaggaggtcagacagttggcagaggacttcctacgagactatacccagatcaacgtcgggaatcttgaactctccgccaatcataacatccttcagatcgttgatgtttgtatggaaagcgaaaaagatcacaaactgatccagctgatggaagagattatggccgaaaaggagaacaagactattatattcgtggagacgaagcggcgatgcgatgatttaacacgcaggatgagaagagatggttggccggcaatgtgcattcatggtgacaaatcacagccggagcgagactgggtgcttaatgaattccgtagtggcaaagcaccaatactcatagccacagacgtcgcaagcagagggctcgacgtggaggatgttaaattcgtgattaactatgactaccctaacagttccgaagactatgttcatcggattggcagaactgcccgttccacaaataaaggaaccgcatatacatttttcactccagggaacctaaaacaggcccgagagctgatcaaggtcttagaagaggcaaaccaagccataaaccccaaactgatgcaactcgtggaccaccggggtggcggaggaggtggaggcaaagggggtcgcagtcggtacaggactaccagtagtgcaaacaaccccaatctgatgtatcaggacgagtgtgatcgcagactccggggtgtgaaagacgggggtcgacgagactctgccagttatcgtgaccgctccgaaacagatcgagccggatacgccaatggatcaggatacgggagtcctaattccgcttttggtgcccaagctggtcagtacacatatgggcagggtacttacggggcagccgcttatggaacctcaagctatacagcacaggaatatggcgcaggtacatacggagcctccagcaccacttcgacaggacgctcaagtcagtcttccagccagcagttcagtggaataggtagaagcgggcagcagccccaaccactcatgtcacagcagtttgcacagcccccaggggctacgaatatgattggatatatgggccagactgcttaccagtacccaccaccccctcccccacctcccccaagccgcaaatag

SEQ ID NO: 220113 - DNA, 2190 bp, synthetic construct
  misc_feature 1..2190: note = Description of Artificial Sequence: Synthetic coding sequence
  source 1..2190: mol_type = other DNA
ttgcctaccggttttgtggctcctattctctgcgtgcttttaccgagccccacgcgggaggcagcaacagtcgcatctgctaccggggatagtgcgtcggaacgagagtctgccgcacctgccgctgccccaacggccgaagctcctcctccctccgtggtgaccaggcctgagcctcaagcgttaccatcacccgctattagagccccactccccgacctctacccattcggaactatgaggggcggagggtttggagatagggaccgcgatcgagatcggggtggttttggtgcccgtggaggtgggggtctaccccctaaaaaatttggaaacccaggggaaagattgcgaaagaagaaatgggatctgtctgagctgccaaaattcgaaaaaaacttttacgtggagcacccagaggttgccaggctgactccttacgaagtcgacgagttgcgtcgaaaaaaagagatcacagttagaggaggcgacgtgtgccccaaaccggtatttgccttccaccatgctaacttcccgcaatacgtaatggacgtcctgatggatcagcacttcacagagcccaccccaatccagtgccaagggttcccgcttgccctgtctggaagggacatggtggggatcgcccagacagggagtggaaagacattagcctatctactgccggcaatcgtgcatatcaatcaccagccttacctagagcggggagacggcccaatttgtttggtgctcgcacccaccagggaactcgcccagcaggtccagcaggtggccgatgactacggaaaatgtagcagactgaaatcaacttgtatctacggcggtgccccaaaggggcctcagattcgggatttagagcggggagtagagatatgtatcgccaccccaggacgacttatagatttcctggagagcggaaaaactaatcttcgaaggtgtacgtacctggttctcgatgaggcagatcggatgctggacatgggattcgagccccagatcaggaagattgttgatcaaatcaggccagataggcagactctaatgtggagtgcaacgtggcctaaggaagtccggcagttagcagaggattttttgcgagattatacccagatcaacgttggcaatctggaactcagtgccaatcataatatcctgcagattgttgatgtttgtatggagtccgagaaagaccataagcttatccagctaatggaggaaatcatggccgagaaagaaaataaaactattatctttgtcgagactaaacgtagatgcgatgacctcactcgcagaatgaggagagacggctggcctgcgatgtgtattcacggcgacaaaagccaacccgagcgcgattgggtgttaaatgaattccgtagtggcaaggctccaattctcatcgccactgatgttgctagccggggactggatgttgaagacgtaaagtttgtgattaattacgattaccccaattcgagtgaggactatgtgcatcgcattggtcggacggcaagatctaccaataaggggacggcttacactttttttaccccagggaatttgaagcaggccagggagctgataaaggtcctagaagaagctaaccaggccatcaatcccaagctcatgcagctggtcgatcaccggggtggagggggagggggagggggacgatcacggtaccgaacaacttcttcggctaacaacccaaaccttatgtaccaggatgaatgtgatcggaggctccgaggagtcaaggacggcggtagaagagattccgctagctaccgggataggagtgaaaccgatcgcgctggttatgccaacggatcagggtacggtagtccaaactctgcctttggtgcgcaagccggtcagtacacctacggtcagggtacctacggcgcagccgcatacggaacatcctcctacaccgctcaggagtacggcgcaggcacttacggggcatcttctaccacctcaaccggacggtcaagtcaaagttctagccaacagttcagtgggatcggtagatcagggcagcagcctcaacctctcatgtcacagcaattcgcacaaccaccaggggcaacaaatatgattggctatatggggcagactgcctaccagtacccgcctcccccaccgcctccccctcctagcaggaaatag

SEQ ID NO: 220114 - DNA, 2214 bp, synthetic construct
  misc_feature 1..2214: note = Description of Artificial Sequence: Synthetic coding sequence
  source 1..2214: mol_type = other DNA
cctaacctacctacgggatttgtggcgccaatcctgtgtgttctgcttccatcgcctacgagagaggccgcaactgttgcctcggcaacaggcgatagcgcgagcgagcgcgagtctgctgccccagcggctgcgccaacagcagaagcgcctcccccttctgtggtgacaaggcccgaaccacaggctctgccatcccccgcaattcgcgcaccactgccagatctttacccatttggcactatgaggggcggagggtttggcgatcgagaccgggaccgcgataggggcggattcggcgctcgcggaggcggaggattaccgcctaagaagtttggtaaccctggggagcgactgcggaagaaaaagtgggacttatcagaactccctaaattcgagaagaatttttatgtggagcaccctgaggtcgctcgcctgacgccttacgaagtggacgagctgaggagaaagaaggagataactgttagaggcggagacgtgtgtcctaagcctgtcttcgccttccaccatgccaacttcccccaatacgtcatggatgtgctcatggaccagcatttcacagaaccaacacctatccagtgccaggggtttcctctggccctatccggaagggacatggtggggatagctcagactggcagtggcaagacgttagcatacctcctgccggctattgtccatatcaatcaccaaccctacctggaaaggggcgacggccctatttgcctcgtcctcgcccctacaagggagctggctcagcaagtccagcaggtggctgatgattacgggaaatgtagtaggcttaaatcaacctgcatttatgggggtgctccaaaaggaccgcagatcagagacctggagagaggggttgagatctgtattgcgaccccgggtcgtttgattgacttcctggagagtggaaaaaccaatctgcgcaggtgtacctacctggtgctggacgaggctgaccgtatgctggacatgggctttgagccgcagatccgcaaaatcgtggatcaaattaggcctgacagacaaactctgatgtggagtgctacatggcccaaagaggttcgtcaactggctgaggactttcttagggactacacacagatcaacgtgggaaatctcgaactgtctgctaatcataacatattgcagattgttgatgtgtgcatggaaagtgaaaaggaccataaactgatccagctgatggaggaaatcatggccgaaaaagagaataaaaccatcatattcgtagaaaccaagaggaggtgtgacgacctcactaggcggatgagacgcgacggctggcccgcaatgtgcatccacggagacaaaagccaacccgagagagattgggttttgaatgaatttaggtccgggaaagcccctattctgatagcgactgacgtggcgtcaagaggactggatgtagaagatgttaaattcgtcatcaactacgattatcccaacagcagcgaggactatgtgcacaggatcggtcgtaccgcaagatccaccaacaagggcaccgcctataccttttttactcccggtaatcttaaacaggctagagagttgatcaaagtgctcgaggaggccaaccaggccatcaatcccaaactgatgcagcttgtagaccaccgcggtggtggtggaggcggaggcaagggcggaagatcacggtatagaacaacaagttccgccaacaaccccaatctgatgtatcaggacgagtgtgataggcgcctgcggggagtgaaggatgggggtcgaagagactccgcctcctacagagatcggtctgagacagaccgtgccggatacgccaacgggagtggctacggctctcccaattcggctttcggtgcgcaggcaggtcaatacacctacggacaggggacctacggggcagccgcttacgggacctcttcctacacggcccaggaatacggagccggaacatacggggcttcatcaactacgtcaaccgggcgttcgagccagagctcatcacaacaattttccggcatcggacgcagtggacagcagcctcaacctctgatgtcccagcaatttgctcaacctcctggtgcaacgaatacactgcttctcctgcccctccttctgctccatgtgaacgaaaccacccaagtcgttgtcacaccagcagacctgatcactttctag

SEQ ID NO: 220115 - DNA, 546 bp, synthetic construct
  misc_feature 1..546: note = Description of Artificial Sequence: Synthetic coding sequence
  source 1..546: mol_type = other DNA
atgcaactggtcgaccaccgcggtgggggaggcggagggggaggcaggtcccggtaccgaacaacaagctctgcaaacaaccctaatttgatgtatcaggatgagtgcgacagacgcctgcgcggagtgaaagatggcggtcggcgagattcagcctcataccgcgatagatcggagaccgatcgcgcaggatatgctaacggctcaggctatggttcccccaactctgccttcggggctcaggctggtcagtacacatacgggcagggaacttacggcgctgccgcatacggcacaagctcgtatacggctcaggagtatggggcaggcacttatggcgcatccagcacgacttccacgggccgaagttctcagtcttctagtcaacagttttctggtatcggtcggtctggacaacagccacagcccctcatgtctcaacaattcgcacagcctcccggtgccactaacatgatcgggtacatggggcagacagcttatcagtatccaccaccccctccgcctccgcctccctcccggaaatag

SEQ ID NO: 220116 - DNA, 2013 bp, synthetic construct
  misc_feature 1..2013: note = Description of Artificial Sequence: Synthetic coding sequence
  source 1..2013: mol_type = other DNA
atgtcccacctgccgatgaagctgctacgaaagaagatagaaaaacgcaatcttaagctgcgccagcgaaacctgaaattccagggcgcatctaatctgacactgtccgaaactcagaacggtgatgtctcagaggaaacaatgggctctcgcaaagtcaaaaagagcaagcagaaacccatgaacgtgggtctctctgagacccagaacggcggtatgagccaggaggcagtgggaaacatcaaggttacaaagtcaccgcaaaaatcaactgtgttgaccaacggggaggccgcaatgcaaagctcaaattcagaatccaaaaaaaaaaaaaaaaaaaaacgaaaaatggttaacgatgccgagccagacaccaaaaaagcgaaaaccgaaaacaagggaaagtccgaggaagaatctgcagagaccacaaaagagacagaaaataacgttgaaaagccagacaacgacgaggatgagtcagaagtaccttccctacctctgggcctgaccggcgcattcgaagatacttcattcgcctcactatgtaatctcgtgaatgaaaacacccttaaggcaatcaaggagatgggatttactaacatgactgagatccagcacaaatcaattcggcctcttttggaaggaagggacctgctggcagcagctaagactggatcaggtaagaccttggcgttcttaatacctgcagtcgaactcattgtaaagctgcgcttcatgcctcggaacgggactggagtgctgatcctctcccccacaagggagctggcaatgcagaccttcggagtgctgaaggagcttatgacgcaccacgtgcatacctacggtctgatcatggggggttccaaccggagtgcagaagcgcagaaattgggaaacgggatcaatatcatcgtagccacgccagggagactgttggatcacatgcagaatactcctgggttcatgtacaagaatctgcagtgcctggtgatagacgaagccgacagaatcttagacgtgggcttcgaggaggagctgaaacagatcattaagctcctgcccactcggaggcagaccatgttgtttagtgcaacgcagaccaggaaggttgaagaccttgcccgaatctccctaaaaaaagaaccactctacgtaggcgtcgacgatgacaaggcaaatgcgaccgtcgacggactggagcaggggtacgttgtctgcccttcagaaaagcgttttttgcttttgttcacctttctgaaaaaaaataggaagaagaaactgatggtcttttttagctcatgcatgtccgtgaaatatcattatgaactgcttaattacatcgatctgccagtcctagccattcacggcaagcagaagcaaaacaagcgcaccaccacgttttttcagttctgtaacgccgattcaggcacattactgtgtactgatgtcgcggcacgcggactggacatacccgaagtggattggattgtgcagtatgatcctccagacgatcctaaagagtacattcatagagttgggcgaacagcccgtgggctcaatgggcgtggccatgcactgttgatactccggcctgaagaactgggcttcctgcgatatcttaagcaatccaaagtaccactgtcggagttcgatttctcatggagtaagatttccgatatacagagccagctggagaagctgatcgaaaaaaactatttcctgcacaaaagtgcccaggaagcttataagtcttacattcgagcttatgattcccacagtctgaagcaaatattcaacgttaacaacttgaacctgccgcaggtggccctgagctttggcttcaaagtgcccccatttgtggatttaaacgtgaactctaatgaaggtaaacagaagaaaagaggcggaggaggagggtttggctaccagaagacaaagaaggtagagaagagcaagatctttaagcacataagtaagaagtcctctgatagtagacagttttcacactag

SEQ ID NO: 220117 - DNA, 1230 bp, synthetic construct
  misc_feature 1..1230: note = Description of Artificial Sequence: Synthetic coding sequence
  source 1..1230: mol_type = other DNA
atggaacaggaacaaacatttggggttcttaaggaactgatgacacaccacgtgcacacatatggtctgatcatggggggatccaaccgctcagccgaggcacagaagttaggcaacggtatcaatataattgtcgctacgccgggaagattactcgaccatatgcaaaacacccctggattcatgtacaagaatcttcagtgtctggtgatcgacgaggccgatagaatactggacgttggcttcgaggaagagctgaaacaaatcataaagctgctccccacgaggaggcagactatgctcttctctgccactcagacgcggaaagttgaagatctggcccgaattagcctcaagaaagaaccgctgtatgtcggggtggacgacgacaaagccaatgccaccgtcgatggattggaacaggggtatgtagtatgtccaagcgagaaaagattcctgcttctgtttaccttcctgaagaagaaccgaaagaaaaagctgatggtgtttttcagcagctgtatgtcagtcaagtaccactatgagctgctgaactatatcgacctgcccgtgctggccattcacggcaaacagaaacagaataagcggaccaccactttttttcagttctgtaacgctgactccggcaccctgttgtgcacagacgtggccgctagaggcctggatatcccagaagtggactggattgtgcagtacgacccaccggatgatccaaaagagtacatacatagagtaggcaggactgcccgaggcttgaacgggaggggccacgcactgttgatcctgcgaccggaagagttagggtttcttcgctacttaaaacagagcaaggtgccgctttcagaatttgatttctcctggtcaaagataagtgatatccaatcccagctggagaagttaattgaaaagaactattttctgcacaagagtgcacaggaggcctataagtcttacattcgggcttatgacagtcatagtctgaaacaaatctttaacgtgaataatctgaatctgcctcaggtggcactgtcgtttgggtttaaagttcccccattcgtggacctaaacgtcaactccaacgaggggaagcaaaagaagcgcggaggtggcggaggctttggctatcagaagaccaaaaaggtcgaaaagtcaaagatctttaagcacatatcaaaaaagagtagcgattcaaggcagttctcccattag

SEQ ID NO: 220118 - DNA, 2475 bp, synthetic construct
  misc_feature 1..2475: note = Description of Artificial Sequence: Synthetic coding sequence
  source 1..2475: mol_type = other DNA
atggctgcagcctttgaggcctcaggcgctctggctgccgtggccaccgcgatgcctgccgaacacgtggcggttcaggtccccgcacccgagcctactcctgggcctgtgagaattctcaggacggcccaagacctgtcatcgcccaggactcgcacaggagatgtgcttctcgcagagcccgctgattttgagagtctgctccttagccggcctgtcctggagggtctcagggccgctggcttcgagcgaccgagccccgtgcagctgaaggcgattccccttgggcgatgcgggctggacctcatcgtccaggccaagagtggcacagggaagacgtgcgtctttagcaccattgcactcgactctttagtattggaaaacctctccacgcaaattttaatcttggctcccacaagagaaattgccgtgcagattcacagcgtgatcacagccatcggaattaaaatggagggccttgagtgtcatgtgtttatcgggggaacaccacttagccaggataagacacgcttaaaaaaatgtcacatcgctgttgggtctccaggtagaatcaagcaattgatcgaactggactacctgaatccaggatcaatcagactcttcattctcgatgaggctgacaagctcctggaagagggctcttttcaggaacagatcaactggatctactcgagccttcccgcttctaagcaaatgctggccgtcagtgccacctatcccgaatttctggccaacgccctaactaaatacatgagagatcctactttcgttagactaaactctagcgacccaagtttgatcggcctgaaacagtattacaaagtggtcaactcttatcctcttgcccacaaggtttttgaagagaagacccagcacctgcaggagctgttctctagaatccctttcaaccaggctcttgtgttctctaatctgcattcaagggcccagcacctcgcagacattctgtctagcaaggggtttcccgcagaatgcatctcaggaaacatgaatcaaaaccaacgattagatgccatggccaagctgaagcacttccattgtagagtcttaatcagcactgatttgacttccagaggtatcgatgcagagaaagtgaacctggtggtgaatttggacgtgcccttggactgggaaacctacatgcatagaatcggtagagctgggagatttgggacattagggctaactgtcacttactgttgcaggggagaagaagaaaatatgatgatgcggatcgcccagaagtgtaacataaatctgctccctctgcctgaccccattccatctggcctgatggaggagtgcgttgattgggacgtcgaggtgaaagcagcggtccacacatacggtatagcttccgtcccgaaccagcctctgaagaaacagatccaaaaaatagaacggaccctacagatccagaaagctcatggtgaccacatggcatctagccgaaacaactccgtgagtggactgagtgtcaagtctaaaaacaacacaaagcagaagctgccagtcaaatcacactccgaatgtggcattatagaaaaggccactagcccaaaagagctgggttgtgataggcagtccgaggagcagatgaagaacagcgtccagactcccgtggaaaactcaacgaattcacaacaccaggtgaaggaagctttgcccgtgagtctgcctcaaatcccctgtctctcatcatttaagatccatcagccttacaccttgaccttcgcagagctcgtcgaagattatgagcattatattaaggagggtctggagaagccggtcgagataattcgccattacacaggaccaggcgaccagaccgtgaatcctcagaatgggttcgtgcggaataaggtcattgagcagagggttccggtgctggccagctccagccaaagtggggacagcgagtccgattctgacagttacagctcaagaacctctagccagtctaaagggaacaagtcttacctggaaggatccagcgataatcagctgaaagactccgagtcaacacctgtcgatgaccgcattagtctcgagcaacctccaaacggatccgatactcccaaccctgagaaatatcaagagtcccctgggattcaaatgaagactagactgaaagagggtgcttcgcaacgggcaaagcagagccgccgtaaccttccaaggcggagctcttttagactgcagaccgaagcccaagaagacgattggtatgattgccatcgggagatccgtctgtccttttcggacacctaccaggactacgaggagtattggcgcgcttattaccgggcatggcaggagtattatgccgctgcaagccatagttactactggaacgcacagcgccacccaagctggatggctgcttaccatatgaacacaatctacctacaggagatgatgcatagtaaccaatag

SEQ ID NO: 220119 - DNA, 417 bp, synthetic construct
  misc_feature 1..417: note = Description of Artificial Sequence: Synthetic coding sequence
  source 1..417: mol_type = other DNA
atggccgctgcttttgaggcctctggggcactggccgcagtcgctaccgctatgcccgctgagcacgtagctgttcaagtacccgcacctgagcccacccctggcccagttcgcatactgaggacggcacaagacctatcttcacccaggacacggacaggcgatgtattactcgctgaaccagccgatttcgaaagccttctgctgtcgcggccagtcctggagggtttgcgtgccgcaggctttgagcgtccctccccagttcaacttaaggccattcccttagggaggtgcggtttggacctgatcgtgcaggccaaaagtgggactggcaagacttgcgtgttttcgacaattgcattagatagccttgtccttgagaacctctctacccaggccgagctctcaaattcttag

SEQ ID NO: 220120 - DNA, 2352 bp, synthetic construct
  misc_feature 1..2352: note = Description of Artificial Sequence: Synthetic coding sequence
  source 1..2352: mol_type = other DNA
atgcctgggaagctgaggtccgatgcaggcctagagtccgacaccgctatgaaaaagggcgaaactctcaggaaacagacagaggagaaagaaaagaaggaaaagccgaagtcggacaaaaccgaagagattgctgaagaggaagagacggtatttcccaaggcgaagcaggtaaaaaagaaggccgagccctccgaggtggacatgaactcccccaagtccaagaaagctaagaaaaaggaggagccctcgcaaaacgatatttcgcccaagactaagtcgctccggaaaaagaaggagcctatcgaaaaaaaagtagttagctcaaaaaccaaaaaggtgaccaagaacgaggaaccttcagaagaagaaatcgacgccccaaagccaaagaaaatgaaaaaggagaaggagatgaacggtgagacccgggagaaatctcctaaactcaagaacggcttcccacaccctgagccagattgcaacccatcagaggccgcaagcgaggagagcaacagcgaaatcgagcaggagatcccagtggagcagaaggaaggtgcattctctaacttccctataagtgaagagactattaaactccttaaagggagaggcgttacattcctgttcccaattcaggccaaaacgttccaccatgtatacagcggtaaagatctcatagcacaggcgcgaacaggtacaggaaaaaccttcagcttcgccataccactgattgaaaagcttcacggggagctgcaggaccgcaaaaggggaagagccccacaggtacttgtgttagcacccacacgcgagctagccaaccaggtatcgaaggatttctcggacattacaaagaaactgagcgtagcctgcttctatggtggcaccccttacgggggacagttcgagcggatgcggaatggcatcgatatcttggtcggaacacccggaaggatcaaggatcatatccaaaacgggaaactggatcttaccaagctgaaacacgtagtactcgacgaggtcgatcaaatgctggatatgggctttgccgaccaggtcgaagaaatcctctcagtggcctacaagaaagactctgaagataacccccaaaccctactatttagtgccacatgcccccactgggtgtttaacgtagccaaaaagtatatgaagagtacttacgagcaggtggatttgattggtaaaaagacccagaagacagccataaccgttgaacacctcgctattaaatgtcactggacgcaaagggccgctgtgattggggatgtgattagggtgtactccggacaccagggcaggacaataatcttctgcgagacaaaaaaggaggcacaggagttgagtcagaacagtgcaattaagcaagacgcccagagcttgcatggagatataccccagaagcaaagggagatcacacttaaaggttttcgtaacggtagttttggggtgctggtggctaccaacgttgctgcgagaggcctcgatatcccagaggttgacctcgtgattcaatcttctcccccaaaagatgttgagtcctacattcaccggtctggcaggacaggaagggcaggtcggactggagtttgcatttgtttttaccagcataaagaggagtaccagttagtccaggtggagcagaaagccggtattaagttcaaaagaattggagttccatccgcaaccgagatcatcaaagctagctctaaggacgcgatcagattgctggattccgtgcctccaaccgccatctcccacttcaaacagtcagccgaaaaactcattgaggaaaaaggggcagtcgaggcgctggctgccgctctcgctcacattagcggcgctacctcagtcgaccagaggtcactgatcaactctaatgtaggcttcgttaccatgatactgcagtgtagcattgaaatgccaaacatcagctatgcgtggaaggaactgaaagagcagttgggcgaagagatcgattccaaggtcaaggggatggtgttcctgaaggggaagctcggagtctgctttgatgtccccacagcgtccgtcacagagattcaagaaaagtggcacgattcgaggaggtggcaattatctgtggccactgagcagccagagctcgaaggccctagggaggggtacgggggatttaggggccagagagagggaagccgtgggttccgcggacaacgcgatggcaacaggaggttccgtggccagagggaaggtagcagaggtcctaggggacagagaagcggaggaggcaataaatccaatcgatcccagaacaagggacagaaacgaagcttcagcaaagcatttgggcaatag

SEQ ID NO: 220121 - DNA, 249 bp, synthetic construct
  misc_feature 1..249: note = Description of Artificial Sequence: Synthetic coding sequence
  source 1..249: mol_type = other DNA
atgccaggtaaacttcggtcagacgccggacttgagtccgacactgcaatgaaaaagggggaaactctgcgtaaacaaactgaggagaaggagaaaaaagaaaagcccaagagtgacaaaactgaggagatcgccgaagaagaggaaaccgtgttccccaaggccaagcaggtgaagaaaaaggccgagccgagcgaagtggacatgaacagcccaaaaagcaaaaagaagaagaagaagaagaagtag

SEQ ID NO: 220122 - DNA, 2463 bp, synthetic construct
  misc_feature 1..2463: note = Description of Artificial Sequence: Synthetic coding sequence
  source 1..2463: mol_type = other DNA
atggccggtgagctggcagacaagaaggacagagacgcttcgccttccaaagaggaaaggaaacgcagtaggacccccgatagagaaagggatagggaccgcgacaggaagtcaagcccatctaaagacaggaaacgtcaccggtcgagggaccgcagacgcggaggatctaggtccagaagccgaagccgaagcaagtccgctgaaagggagagaagacataaggaaagggaacgtgataaagagcgggatcgcaataagaaagatcgggacagagataaggatggccaccgtagagataaagatcgcaaacgtagcagcctgtcaccagggcgtggcaaggattttaaatccagaaaggaccgggacagcaaaaaagatgaagaggatgagcatggcgacaagaaaccaaaagcccagcctctttcattggaggaactgctagctaagaaaaaggctgaagaggaggcagaagcgaagccgaaattcctgtcaaaagccgagcgagaggccgaggcgctgaaaaggaggcagcaggaagtcgaggagagacaaagaatgctggaagaggaaaggaagaagcgaaagcagttccaggatctgggcagaaagatgttggaagatccacaggaacgggagcgtcgggagcggcgtgagaggatggagcgcgaaacgaacggaaatgaggacgaagaaggcagacagaaaatccgtgaggaaaaagacaagtctaaggagctgcacgcaataaaagagcgctacctggggggtataaaaaagcgcagacgcacgagacacctcaatgacagaaagttcgtgttcgagtgggacgcttccgaggatacatcaattgactacaaccccctgtataaggaaagacaccaggtccagttattagggagaggcttcatagctggtatagacctgaagcagcagaagagagaacagagtcgcttttacggggacctgatggaaaaaagaagaaccctggaggagaaggagcaagaggaggcacgccttagaaagctccggaagaaggaagccaaacaacggtgggatgaccgccactggtctcagaagaaattggacgagatgaccgaccgtgactggaggattttcagggaggattactctataactactaaggggggtaagattcccaatccaatcaggtcttggaaggactcttcactacctccacacatccttgaggttattgacaaatgcggatacaaggaacccacccctattcaacgacaggccatccctatagggctgcaaaatcgggatattattggcgttgccgaaaccggctccggaaagacagcagctttcctgattcctctgttggtgtggattacaacattgcccaaaatcgatcggattgaggagagtgaccagggaccgtatgcaattatcctggcccctaccagggagcttgcccaacagatcgaggaggaaaccattaagtttggcaagccactgggcatacgtaccgtggctgtgattgggggtatatctagggaggaccagggatttaggttacggatggggtgtgaaattgtcatcgccacaccgggacggctgattgatgtgctcgagaatagatacctggtgctatctcgatgtacctacgttgtcctggacgaggctgataggatgattgacatgggttttgagccagatgtgcagaaaattctggagcacatgcccgttagcaatcagaaaccagacacggacgaagccgaggacccagaaaaaatgcttgctaactttgaatccgggaaacataaataccggcaaaccgtcatgtttaccgccactatgcctccagccgtggagcgcctggctaggtcttacttgcggcgtcccgcagtggtgtacattgggtccgcgggaaagccacacgagcgagtggagcagaaagtttttctgatgagcgagtccgaaaaaagaaagaaactgctggcgatcctcgaacaaggattcgatccaccaattatcatattcgtgaatcagaagaagggatgtgacgtgcttgcgaagtcactggagaagatgggctataatgcctgtacactacacggcggtaagggtcaggagcaacgggagtttgcattgtcgaaccttaaagccggagcaaaggatattctggtagcaaccgatgtcgccggtagaggcattgatatccaggacgtgagcatggtggtgaattatgacatggcaaagaacatcgaggactacatccaccggataggacggacaggacgcgcaggaaaaagcggagtcgccatcacgtttcttactaaagaggactctgcggtgttttacgaacttaagcaggcaatccttgagagccccgtctcttcttgcccacctgagctggccaaccatcctgatgcccagcacaagcccggaaccattctgactaagaaacgccgtgaggagaccatcttcgcctag

SEQ ID NO: 220123 - DNA, 417 bp, synthetic construct
  misc_feature 1..417: note = Description of Artificial Sequence: Synthetic coding sequence
  source 1..417: mol_type = other DNA
atggcgggagaattggcagacaaaaaggatagagatgccagtccttcaaaggaagagaggaagcgctcgcgtactcccgaccgggaaagagaccgagacagagaccgcaagtccagtccaagtaaagatagaaaacgacacaggagcagggatcgacgacgcggtgggtcccggagcagatcgcggtctaggtcaaaatctgcagaacgcgagaggcgccataaagaacgggaaagggataaagaacgcgaccgcaacaaaaaagatagggatcgcgataaggatggtcaccggagggacaaagatcgtaaacgctcctctctgagcccaggacgcggtaaggacttcaagtctcgaaaagaccgggactccaagaaagatgaggaggacgagcacggcgataaaaagccaaagtag

SEQ ID NO: 220124 - DNA, 549 bp, synthetic construct
  misc_feature 1..549: note = Description of Artificial Sequence: Synthetic coding sequence
  source 1..549: mol_type = other DNA
atggcgggtgagttggccgataaaaaggatagagacgccagtcccagcaaggaagaacgcaaaaggtcgcgaactcccgaccgggagcgtgacagagatagggacagaaaatcctccccctcgaaagatcgtaagaggcatcggtcccgggacagacggcgaggcggttcgcgcagccgcagtcgcagccggtctaaaagtgcggagagagagcggagacataaggagcgtgagcgggacaaggaacgtgatcggaataaaaaggacagggatcgagataaggacgggcacaggagagacaaagacaggaagagaagctctctaagccctggcagaggcaaggacttcaaatcacggaaggatagggattccaagaaggatgaggaagatgagcacggtgacaaaaagccaaaggcccagccattgagcctggaagagctcctggccaagaaaaaagctgaggaagaagccgaggcaaaacctaagtttctgtccaaagcagagcgagaagcagaagcgctgaagaggagacagcaggaagttgagtag

SEQ ID NO: 220125 - DNA, 2580 bp, synthetic construct
  misc_feature 1..2580: note = Description of Artificial Sequence: Synthetic coding sequence
  source 1..2580: mol_type = other DNA
atgaaactcaaggacaccaaaagtaggccaaagcagagtagctgcggtaaatttcagacgaagggcatcaaggtcgtgggaaagtggaaagaggtaaagatcgacccaaatatgttcgccgatgggcagatggatgacttggtgtgtttcgaggagctgactgactaccagctcgtgtctccagcaaaaaatccttctagtttgttttccaaagaggcgcctaagcgcaaagcacaagcagtctccgaagaggaggaagaggaggaggggaaaagtagttcacccaagaaaaaaattaagctcaagaagagcaaaaacgtagccaccgaagggacgagcacacagaaggagttcgaagtgaaagacccagaactcgaggctcagggggacgacatggtgtgtgatgaccccgaagcaggggaaatgacttccgaaaacctcgtacagactgcccctaaaaagaagaaaaataaaggaaagaaaggactggagccttctcagtccacggccgcaaaggtccccaagaaagctaagacttggatcccagaggtgcatgaccagaaagctgacgtatccgcttggaaagacctgttcgtccctcgcccagtgctccgggctctgtcattcctaggcttctccgccccaacccccatccaagccctgaccctggctccggcaatcagggataagctcgatatcttaggagctgccgagacaggcagcggcaaaaccctagcgtttgcgataccgatgattcacgcggtcctgcagtggcaaaaaagaaatgctgccccaccaccttctaacactgaggcaccccctggagaaacaagaactgaggctggggctgagacacgctctcctggtaaagcagaggccgagagtgatgccctgcccgacgatacggtgatcgaatcagaagcactccctagtgatatcgcagcagaggccagagccaaaacggggggaactgtcagcgaccaagcccttctgtttggcgacgatgatgctggggagggcccaagcagtcttatccgtgaaaaacctgtccccaagcagaatgagaatgaggaggaaaaccttgataaagagcagacaggaaatttaaagcaggagctggatgataagagtgccacctgtaaagcgtaccctaagagacccctcctgggtctggtactcacaccgactcgggaattggccgtgcaggtgaagcagcacattgatgcagtcgcgaggttcaccgggattaaaactgccattctggtgggcggtatgtccacacagaagcagcagagaatgctgaaccggagaccagagattgttgtggccactccagggcgactgtgggaactgataaaagagaagcactaccacctccggaacttgcgccagttacgatgcctggtcgtagacgaagccgatagaatggtggaaaagggacattttgctgaactgagtcagctgctggagatgcttaacgatagccagtacaatcctaagcggcagaccctggtgtttagcgccactttgacgcttgttcaccaggcacctgccaggattctgcataaaaagcacaccaagaagatggacaaaaccgcaaagttggacctcctaatgcagaagatcggaatgagagggaaacccaaagtaattgacctaaccaggaacgaggcaactgtagagaccttaacggagaccaagatccattgtgaaacagatgagaaagatttctacctttattactttctgatgcagtatcctggacgcagtcttgtgttcgctaactccataagctgcatcaaacggctctctggactgttaaaggtgctggatatcatgccccttactctgcatgcctgcatgcaccaaaagcagagactgaggaaccttgaacagtttgcccgattggaagactgtgtgctgctcgctactgacgtagccgctagagggctggatatcccaaaagtacaacacgtgatccattatcaggtgcctcgcacttccgagatctatgtgcaccggtcaggtcggactgccagagcaactaacgagggcctgagtctgatgctgattggccctgaggacgttattaattttaaaaagatctataagacattaaagaaagatgaagacatacctctcttccctgtacagacaaaatatatggatgtcgtcaaagagcgcatccgcctcgccaggcagatcgagaagtctgaatatcggaatttccaggcctgtttacacaattcctggatcgagcaggccgcagcagctttagagattgagttagaagaggatatgtacaagggtggcaaggctgaccagcaggaggagcgccgaaggcagaagcagatgaaggtcttgaagaaagagctccggcatcttttaagccagccactgtttaccgaaagtcagaagactaaataccctacacagagcggcaaacccccattactcgtttctgccccatcaaagagcgagtcggcactctcctgcctgtcaaagcagaagaaaaaaaagaccaagaaacccaaagaaccccagcctgagcaacctcaacccagcacaagtgcgaattag

SEQ ID NO: 220126 - DNA, 2415 bp, synthetic construct
  misc_feature 1..2415: note = Description of Artificial Sequence: Synthetic coding sequence
  source 1..2415: mol_type = other DNA
atgaaattgaaggacaccaaatcgcgacctaaacagagcagctgcggcaaatttcagaccaaggggatcaaagtggttggtaaatggaaagaggttaaaattgatccgaatatgtttgccgatggacagatggatgatcttgtctgcttcgaggagttgacagactaccagctcgtgtcaccagctaagaatccttctagcctattttcaaaggaggcccctaaaagaaaagcgcaggcagtgagtgaagaggaagaagaggaggaaggtaaaagctcaagtccaaaaaaaaagatcaagctgaagaaaagtaagaacgtcgccaccgagggaacatctacacagaaggaattcgaggtgaaagatcctgaacttgaagctcagggagacgacatggtttgcgacgacccagaggccggtgagatgacgtctgagaacctcgttcaaactgcccctaagaagaagaaaaacaagggcaagaagggtttagaaccgagccagtctactgcagctatccgtgataaactcgacattctgggtgctgcggaaacaggaagcggtaaaacattggcattcgctatccccatgattcacgctgtgctccaatggcagaaaagaaacgccgcacccccaccgtctaatactgaagctcccccaggggaaaccaggacagaggctggtgccgagactagatcacccggaaaggccgaggcagagtcggacgctctcccggatgatactgtcatcgaatctgaagcgctgccaagcgatatagccgctgaggcccgtgcgaaaaccggaggaaccgtatctgatcaggcactgctgtttggcgatgacgatgctggcgaaggaccttcctcactgattcgcgagaagccagtacctaaacagaatgagaatgaggaggaaaacctcgataaggagcagaccggaaacctgaaacaggaactggacgataaatcagcaacgtgcaaagcgtatcctaagcgacccctgctgggtctggtactcacgcctactcgggaactggccgtccaggtgaagcagcacatcgacgctgtggcaaggttcactggaatcaagacggccattctggtgggcggaatgtcaacccagaaacagcaacgcatgctcaacaggagacctgaaattgtcgtggccactcctggtcggctttgggagctcattaaggaaaaacattatcacctacgcaatttgaggcagttgcggtgccttgtggtcgacgaggctgaccggatggtcgagaaagggcacttcgcagaattaagccaacttcttgaaatgctgaatgactcccagtataatccaaaacgccagacactggttttctcagccacactgaccctcgttcaccaggcaccagcccgaattctgcataaaaagcacaccaaaaagatggacaaaaccgcgaagttagatttgctcatgcaaaaaataggcatgaggggaaaacctaaggttattgacctgacaaggaacgaggcgacggtggaaacgcttacagagacaaagattcattgcgaaacagatgagaaggacttctatctgtactacttcctgatgcagtacccgggaagatcacttgtctttgccaactccatctcatgtatcaagagattgagcggcctgctcaaggttttggatataatgccccttaccctccacgcttgcatgcaccagaagcagcgacttcgcaatctcgaacagtttgcgcgtttggaggattgcgtactgctggctacagatgttgccgctagagggcttgacattcccaaggtgcagcatgtaattcactaccaggtgccaaggactagcgagatttacgtccaccggagcgggaggaccgcacgggctaccaacgagggactgtcattaatgctcattggtcctgaagacgtgattaattttaagaagatatataagaccctcaagaaggatgaggacatcccgttgtttcctgtgcagaccaagtacatggacgtagtgaaagagcgcatcagactggctcgccagattgagaagtcagagtataggaacttccaagcttgtctccacaatagctggatcgaacaggcggcagccgctctggagatcgagcttgaagaagatatgtataaaggcggaaaggccgaccagcaggaagagcggagaaggcagaagcagatgaaggtgctaaaaaaggagctgcgccacctgctgagccaacctctgttcacggagtcgcagaagaccaaatacccaacccagtccgggaagccccctcttctggtgagcgctccgtccaaaagcgaaagtgcactgtcctgcctatccaaacaaaagaagaaaaagacaaaaaaacccaaggaaccccagccagaacagccgcaaccttcgaccagcgccaactag

SEQ ID NO: 220127 - DNA, 2292 bp, synthetic construct
  misc_feature 1..2292: note = Description of Artificial Sequence: Synthetic coding sequence
  source 1..2292: mol_type = other DNA
atggatgatctggtctgcttcgaggaattgactgactaccagctggtgagtccagctaagaatccatcatctctgttcagcaaggaggctcctaagagaaaggcccaggccgtcagcgaggaggaagaagaagaagaaggcaaaagctcttctccaaaaaagaaaatcaaactgaaaaaatctaagaacgtggctacggaagggacgtccactcagaaagaatttgaggtaaaggacccagaactggaggctcagggtgatgacatggtgtgcgatgaccccgaggcaggcgagatgacctcggagaacctggttcagaccgcccctaagaaaaagaaaaataagggaaagaaggggctcgaaccatcacagagcacagccgctaaagtgccgaaaaaagccaaaacctggatcccagaagttcatgaccagaaggcagacgtgtccgcctggaaagatctcttcgtgccacgcccagtattaagagctttgtctttccttgggttctccgctccaaccccaattcaggctctgaccctcgcaccagccatccgtgataagctggatatcctgggcgctgcggaaacaggaagtggcaaaacccttgcatttgccatcccgatgatacatgctgttctgcaatggcagaaacgcaacgccgctcctccacccagtaacacagaggctcccccaggtgagacaaggaccgaagcaggggcagaaacacgttcacctgggaaggctgaggctgaaagcgacgccttgcctgacgacaccgttatcgaatccgaggctcttcctagcgatattgccgcagaggcacgggcaaaaaccggaggaactgtgagtgaccaggccctcctgtttggggatgacgacgcaggagaaggtccctccagtctgattcgtgaaaaacccgtgcctaagcagaacgagaacgaagaagagaatcttgacaaggagcaaacaggcaacctgaaacaggaactcgatgataaaagcgctacttgtaaggcatatccaaaaaggccactgttgggccttgtcctgacccctacacgggagctcgcagtgcaggtgaaacagcacatcgatgccgttgcaagattcacaggcatcaagactgccatcctggtgggtgggatgagtacccagaaacagcagcggatgttaaaccgcagaccagaaattgtcgttgcaactcctggccgtctttgggaactcataaaggaaaagcactatcacctgagaaacctccgccagctgcgctgcctggtcgtggatgaagctgacagaatggttgagaagggtcatttcgctgaactttcccagcttctcgaaatgttaaatgactctcaatataatccaaaaaggcagacacttgtgttctcagccacactgacactggtgcaccaagctccagctagaattcttcacaagaagcatactaaaaagatggacaagacagccaaactagatctgttgatgcagaagatcgggatgcggggaaagccaaaggtgattgatctgacgaggaatgaggccacagtggagacactgactgagacaaagattcactgcgaaacggacgaaaaggacttttacctgtactactttttaatgcagtatcccggacgctccctggtgtttgcaaatagcatctcttgcataaaaagactctccgggctgctgaaggtgctcgatattatgccactcaccctgcacgcttgtatgcaccagaagcagcggctgcgtaacctcgaacaatttgccaggttggaggactgcgtattattagccaccgacgtcgccgcacgcggtctggacatccccaaggtccagcatgtgattcattaccaagttcccagaacatccgagatatacgttcataggagtggtcgaactgcaagagccaccaacgagggattgagcctcatgctcatcggtcctgaagacgtcattaactttaaaaaaatttacaagacactcaaaaaagacgaggatataccgctgttccccgtgcagaccaaatatatggacgttgttaaggagcgcatccgacttgccaggcagatcgagaagtctgagtatcggaacttccaggcgtgcctgcacaactcttggatcgaacaagccgcagctgccctggagattgagctggaagaggatatgtacaaaggaggcaaggcagatcagcaggaagagcgtcgaagacagaaacagatgaaagtgctgaaaaaagagcttagacacttgctgtcccagcctcagcccagcacaagcgctaactag

SEQ ID NO: 220128 - DNA, 1458 bp, synthetic construct
  misc_feature 1..1458: note = Description of Artificial Sequence: Synthetic coding sequence
  source 1..1458: mol_type = other DNA
atgaccaaggccccttgtaaagcgtacccaaaacgccctttactgggccttgtccttaccccgactcgcgagctggctgtgcaggtgaaacagcatattgacgcagtggcacgctttactggcataaagacagcaattcttgtcggagggatgagtacacagaagcagcagcggatgctcaaccggcgacccgaaattgtggtggccacacctggaagattgtgggagctgatcaaggaaaagcactatcatttgcggaatctgaggcagctgcgctgccttgtcgtggacgaggccgacagaatggtcgagaaaggccactttgctgaactctcacagctgctggagatgctgaatgactcacagtataaccctaaaagacaaacactcgtcttctcggcgaccctgactttggtgcatcaagcccctgcccgtatcctgcacaaaaagcatacaaaaaagatggataaaactgctaagcttgacctgcttatgcagaagatagggatgcgagggaagcccaaagtaatcgatctgaccaggaatgaggccacggttgaaaccctgaccgaaacgaagatacattgcgagacagatgaaaaggacttctacttatactattttctgatgcagtaccccggacggtccctggtatttgcaaatagtatctcctgcattaagcgactgagcgggctgcttaaagtccttgacatcatgcctttgacattgcatgcctgcatgcatcaaaagcagcggctccgtaatttagagcaattcgcccgactcgaagactgtgtgctcctggctaccgacgttgccgcaagaggcctggacattccaaaagtgcaacatgtgatccattaccaggtgcctaggacaagtgagatttatgttcatcgatctggcaggacagcacgagcgaccaacgagggcctgtccctcatgctgatcggaccagaagacgttatcaatttcaaaaagatttacaagacgctgaaaaaggacgaggatatacctctgttcccggtccagaccaaatatatggatgtggtaaaggagcgaatcagactcgccaggcagattgaaaaaagtgagtatcgcaactttcaggcatgtctccataattcctggattgaacaggctgcagccgcactagagattgaactagaggaggatatgtataaaggaggaaaagccgatcagcaagaggaaaggcgccgacagaaacagatgaaggtgttgaaaaaagagctcagacacttgctgagccagccactgtttacagaatctcagaaaaccaaatatcctactcaatctggcaagcccccactcttggttagcgccccaagcaaaagcgagtcagccttgagttgtctgtctaagcagaagaagaaaaaaaccaagaaaccgaaagagccccaaccagaacagccgcaaccgagcacttcggctaattag

SEQ ID NO: 220129 - DNA, 1623 bp, synthetic construct
  misc_feature 1..1623: note = Description of Artificial Sequence: Synthetic coding sequence
  source 1..1623: mol_type = other DNA
atggccctgacccgccctgttcggctgttttccctcgtgacgcgactcctgctggcacctcgccgaggcctgaccgttcgatccccagacgagcccctgccggttgtgagaataccagtggccctgcagagacagctggagcagagacagtcacgcaggaggaacctaccaagacctgtcctagttaggcccggacctctgttggtatccgcccgtcgtcccgagctgaaccagccagcccgtctgacacttggcaggtgggagagggccccactggcttctcagggttggaaaagtcggagagccagacgtgaccacttttcgattgagagagcccagcaggaagcccctgcagtgaggaaattgagttcaaagggctcatttgcggatctgggactggaacccagagttctccacgccctgcaggaggcggctcctgaggtggtgcagccaactaccgtccaatcatcaactattccctcactgctgcgcggacgccacgtagtctgtgccgctgagaccggcagtgggaaaacactaagttacctgcttcccttactgcagaggttactgggacaaccatccctggatagtttacctattcctgccccaagagggctcgttctggtgccatcccgggagctggcccaacaagtgcgtgccgttgcccagcccctggggcgatccctgggattgctagtgagagaccttgagggtgggcacgggatgaggcggatccggcttcagctttcgcgccaacccagtgctgatgtgctggttgctacgcctggcgctctgtggaaggctttgaagtcccggctaatttctctcgaacagctctcctttcttgtgctggatgaggctgatacactgctggatgaatccttcttggagctcgttgactatattttggaaaagagccacatcgccgaaggtcccgctgacctggaagacccttttaatcctaaggcacagcttgtcctggttggggcaacgtttcccgaaggagtgggacagcttctgaataaggtcgcgagcccagacgcggtgacgacgattacatctagcaagctgcattgcatcatgccccacgtgaagcagacatttttgcgcctgaagggggcagataaggttgccgagcttgttcatattctaaagcaccgggatcgggcagagcgaacaggtccaagtgggacagtgctggtgttttgtaacagttcatccactgtgaattggctgggttacatcctggacgatcacaagatccagcacctacgactgcagggacagatgcccgctctgatgcgggtcgggatttttcagagtttccagaaaagcagccgggacattttgttgtgcaccgatatcgcctccaggggtcttgactccacaggcgtcgagttggtggtcaactatgatttcccccctactcttcaggattatatccaccgcgctggacgcgtcgggcgtgtgggtagcgaggttcccggtacagtcatcagcttcgtcacccatccctgggacgtgagcctggtccaaaaaatcgagctagccgcaaggcgacgaaggtccctgcctgggctcgcttcaagcgtcaaggagccgctcccccaggccacatag

SEQ ID NO: 220130 - DNA, 1989 bp, synthetic construct
  misc_feature 1..1989: note = Description of Artificial Sequence: Synthetic coding sequence
  source 1..1989: mol_type = other DNA
atgtctcacgtggcagtggagaatgcccttggcctggaccagcagttcgccggtctggatctgaattcatctgataatcagtctgggggaagcactgcttccaaggggagatacatcccccctcacctgcggaaccgtgaggccactaagggcttctacgataaagatagtagcgggtggtccagcagtaaggacaaggatgcttatagcagtttcggttcacgctctgactcccggggaaaaagttccttctttagcgatcgaggtagcggcagccgtggccgattcgacgacagaggacgatcagattacgacggcattggttcacgaggggataggagcggtttcgggaagtttgaacgtggagggaactccaggtggtgtgataagtccgacgaagacgactggtccaaaccactgcccccatccgagcggctagaacaggagctattttccggtggcaataccggaatcaattttgaaaaatacgatgatatccctgtcgaggctacaggaaacaattgtccaccacatatcgaatctttttctgacgtcgaaatgggcgagatcataatggggaatattgagctcactcggtatacgcgacccactcccgtgcagaagcatgctattcctataattaaagaaaaacgggatctgatggcctgtgcacagacagggtccgggaagacagcagcattcctgttacccattctttcacaaatctatagcgacggccctggggaggctctgagggcgatgaaagagaacgggagatacggaaggcggaagcagtacccaatctccctagtcctggcaccaaccagggagttggctgtccagatttacgaagaagccagaaaatttagctatagaagcagggtgcgcccttgcgtagtttatggtggcgcagacattggtcaacagatcagggacttagagcggggttgccacctgctggtcgccacccctggcaggttggtggatatgatggaacgcggtaagattgggctagatttctgcaagtacctggtgctagatgaggctgaccgtatgttagatatgggatttgagcctcagattcgtcgtattgtagaacaggataccatgccccctaagggtgttaggcataccatgatgttcagcgcaacttttcctaaagaaatccagatgctagccagggactttctggacgagtacatcttcttggccgttgggagagttggttccactagcgaaaacattacgcagaaggttgtgtgggtggaagagtcagataagcggtctttccttctggacctcctcaatgctaccggcaaggattcgttgaccttggtcttcgtggagaccaagaaaggcgctgacagcctggaagactttctgtatcatgaaggttatgcatgtacttctattcacggagaccgatctcagcgcgacagagaagaggcgctccatcagttcaggtctggaaagtctcctattctggtggccacagccgtggcagccagggggctcgacatctccaacgttaagcatgtgataaattttgatttgcctagcgatatcgaagagtacgtgcacaggatcggaagaacaggaagggtcggaaacctgggccttgcaacaagcttttttaacgagcggaacatcaacattacgaaagacctcctcgatcttctggtcgaggccaagcaagaagttccatcttggctggaaaacatggcttacgagcaccactataaggggtccagtaggggccgttctaagagttcccggttctctggaggcttcggcgcacgagattatagacagagcagtggggcttcttctagctcattttccagctctcgggcaagcagtagtaggtcagggggtggtggtcatggatcctcaagaggcttcggcggaggcggatatggcggattttataacagcgacggttacggcggaaattacaattcacagggcgtagattggtgggggaattag

SEQ ID NO: 220131 - DNA, 420 bp, synthetic construct
  misc_feature 1..420: note = Description of Artificial Sequence: Synthetic coding sequence
  source 1..420: mol_type = other DNA
atgtcacacgtcgcagttgagaatgcattgggcttagatcagcagttcgccggtctggacctgaattcgtctgacaatcaaagcggcggatccacggcttctaaggggaggtacatccccccacatctccgaaatagggaggcaacaaaagggttctacgataaagatagcagcggctggagcagtagcaaagacaaggacgcatacagcagttttggctcaaggtcagatagcagaggaaaatctagttttttttctgaccgcggatcaggctcgcggggacgctttgatgatcggggtagatcagactacgacggaatcggctcaaggggcgatcgttcgggctatgggggattttacaactcagacggctacggcggaaactacaacagccagggagtggactggtggggaaattag

SEQ ID NO: 220132 - DNA, 1941 bp, synthetic construct
  misc_feature 1..1941: note = Description of Artificial Sequence: Synthetic coding sequence
  source 1..1941: mol_type = other DNA
atgtcacatgttgcggttgaaaatgctctgggcctggaccagcagttcgctggtctggacttgaattctagtgataatcagagtggaggcagcacggcttcgtctttctacgataaagatagtagcgggtggagctcaagtaaggataaggacgcctactcttcttttgggtctagatccgatagtcggggtaagagttctttcttttcagacaggggttctgggagccgcggtagattcgatgaccggggaaggtcggattacgacggtatcggcagcagaggagacagatccgggttcggcaagttcgagaggggcggtaacagtaggtggtgcgataaatccgatgaagatgactggtccaagcccttaccaccgagcgagcggctggagcaagagcttttcagtggtggaaacaccgggatcaactttgaaaagtacgacgacatccctgtggaagccactggaaataattgtcctccccatatcgagtcgtttagcgatgtcgagatgggggagatcataatgggaaacatcgagttgacaagatacactcgtccgacacccgttcagaagcatgcaatccccataatcaaggagaaacgggacttgatggcctgcgctcagaccggtagcggaaaaacagctgcattcctgctgcccatactgtctcagatttacagtgatggaccgggtgaggctctgcgggcaatgaaagagaatgggagatacggcaggagaaagcagtaccccattagcctggtcttagcacccacccgcgaattggcggtgcagatttatgaggaagcaaggaagttctcctaccggagccgagtgagaccctgcgtcgtgtacggaggagccgacattggacagcagattcgcgatctggagcgaggctgccaccttctggttgcaacacctgggagactggtagatatgatggagcgaggaaagatcgggttagatttctgtaagtatctggtgctggatgaagccgataggatgctggatatgggcttcgagccacagatcaggcggatcgtcgagcaggacactatgcctcccaaaggggttaggcacaccatgatgttttctgctacatttccgaaagagatccagatgttggcgagggactttttggatgagtacatcttcctggcagtcggtagagtgggcagcacctcagaaaatattacccagaaggttgtgtgggttgaagaaagtgataaacgctcctttctcctggatctgctcaatgctacgggcaaggattctctgaccctcgtgtttgtggagacaaaaaagggagccgactcacttgaggattttctctatcacgagggctacgcttgtacttccatacatggtgatagaagccagcgcgaccgagaggaggcgttgcatcaatttagatctggaaagtccccaatcctggtggcgacagccgtagccgcaagggggctggatattagcaacgtaaagcacgtgataaacttcgaccttccatcggatatcgaagagtacgtgcaccgtatagggaggactggacgtgtgggcaacctcggtctcgcaacctctttcttcaatgaacgtaacattaatatcacaaaggatctcctggatcttctcgtagaggccaaacaagaggttcctagttggctggagaacatggcatacgaacaccactataaaggctctagtcgaggacggtctaagagtagtaggttctccgggggattcggagcaagagattaccgccagagttccggcgctagctctagctctttctcttccagccgcgcttcaagtagccgcagcggtggcggaggccacggcagctctcgcggattcggcggaggtggatacggtgggttttacaatagtgatggttacggcggaaattacaattcccagggcgtggactggtggggaaactag

SEQ ID NO: 220133 - DNA, 927 bp, synthetic construct
  misc_feature 1..927: note = Description of Artificial Sequence: Synthetic coding sequence
  source 1..927: mol_type = other DNA
atgcgggagtcacggttgatcagcgaccttggaggattcgcgggtgtccgttctgcagctgggagggactggcgaccattttggctcgggggtctgcgcccatctcgactcgcccagccgggatttccctccggcggtcccggaggtacgcgctgtctgagagcctgcgagcaaggcttcgctggtctggatttgaatagttccgacaaccagtccggtggttctaccgcctctaaaggaaggtacattccaccccacctgcgcaatcgagaggcaacgaagggattttacgacaaggattctagtggctggagctctagcaaggacaaggacgcctattcatcctttgggtctcgcagcgatagtcggggtaagtcctctttcttctctgaccgaggaagtggttctcgtggcaggttcgacgaccgcggaagatctgattacgatgggatcggcagccggggagataggtccggcttcggcaagtttgagagaggaggtaactctcggtggtgcgataaatccgatgaggatgattggtctaaacccctgcctccgagtgaaagactggagcaagaattgttctccggcggaaacaccgggatcaatttcgagaagtatgacgacatacctgtcgaagcaactggcaacaactgtcctccacatattgagtccttctcagatgtggagatgggggaaattatcatggggaacatcgagctgaccaggtatacgcgccctacccctgtgcagaagcacgccattccgatcataaaagagaaacgcgatctcatggcttgcgctcaaacgggcaagtggaaggtatgggcaccccagacaatacctaatctcctaggcatatccaccaatgagcgcgttgggtctaccgacttaaggggttcccagaagatttttatccctatttag

SEQ ID NO: 220134 - DNA, 1983 bp, synthetic construct
  misc_feature 1..1983: note = Description of Artificial Sequence: Synthetic coding sequence
  source 1..1983: mol_type = other DNA
atgagccacgtggtcgtcaagaacgacccggagctggaccagcagctagccaatcttgacttaaattccgaaaagcaaagtggcggtgcctctaccgcttctaagggccgttatatacccccacatttgcgtaatcgcgaggcctccaaagggtttcacgataaggatagcagcggatggagctgcagtaaggataaagatgcctatagcagctttggctcaagggattccagagggaagcccggatatttcagtgaacgcggatccggatccagggggagattcgatgatagaggaagatccgattacgatggaattggcaatcgggagcggcctgggttcggaagatttgagcggtccgggcattcaagatggtgcgataagtccgtggaagacgactggagcaagccactgccaccgagtgaacgtctggaacaggagctgttctcgggcggaaacacaggtatcaactttgagaagtatgacgacattccagtcgaagcaacagggagtaattgcccaccacacatcgaaaacttttcagatattgacatgggggagattattatgggtaatattgagcttactaggtataccaggcccactcccgtgcagaagcacgcaattcccatcatcaagggaaaaagagatcttatggcctgtgcccagactggatccggaaagaccgccgctttcttactgcctatattgtctcagatttatactgatggaccgggagaggcacttaaagctgtgaaagagaacggaaggtatggtcgcagaaaacagtatcccatttccttggtactcgcaccaaccagggagctggccgttcagatatacgaagaagccagaaaattttcctatagaagccgagtccgaccttgcgttgtttatggaggcgcagatatcggtcagcagattcgcgatcttgagcgcggatgccacttattagtagccacccccggacgcttagtggacatgatggagcgcggaaagatcggcttagacttctgcaaatacctcgtgttggatgaggctgatcggatgctcgatatggggttcgagccacaaattcgtcgcatcgtggagcaggatactatgccacccaagggtgtgagacatacaatgatgttttccgcgacgtttcccaaggagattcaaatgctggccagggactttctggatgaatacatctttttggcagttgggagggtgggttccacctcagagaacatcactcagaaggtggtgtgggtagaggacctggacaaacggagcttcctgcttgatatcctgggggctacggggtctgattcactcacactcgtcttcgttgagactaaaaagggggcagattctctggaggatttcttgtaccacgagggttacgcctgtacctctatccacggggaccggagccagagggatcgggaagaagccctgcatcagtttagatctgggaagagtcctatcttggtcgctacagcagtcgcagcccgaggcctagacatctcaaatgtgcgccacgtcatcaattttgatctgccatctgatattgaggaatacgtacacagaattggacggacgggaagagtgggtaaccttggcctcgccaccagctttttcaacgagaaaaatatgaatatcaccaaagaccttctggatcttctggtcgaggctaagcaggaagtccccagctggttagaaaatatggcctatgagcatcattacaagggtggttcaagagggagatccaagagcaatagattctcgggcggatttggggcacgggactaccgacaaagcagtgggagtagttcaagcggcttcggcgcatcgcggggatcaagttcccgctccggaggcggaggttacggaaactccagagggttcggaggcggtggttatggtggattctacaacagcgacgggtacggcggaaattataatagtcagggggtcgactggtggggcaattag

SEQ ID NO: 220135 - DNA, 1983 bp, synthetic construct
  misc_feature 1..1983: note = Description of Artificial Sequence: Synthetic coding sequence
  source 1..1983: mol_type = other DNA
atgtcacacgtcgtggtcaagaacgaccccgaattagatcaacagctagccaatcttgacctcaactccgaaaagcagagcggtggggcttccactgcttcaaaaggtagatacatccccccacatctcaggaaccgtgaggcgagcaaggggttccacgacaaagacagctctgggtggagctgctctaaggacaaagatgcttacagttcgttcggaagccgagactccagggggaagcccggatacttttccgagcgtggctccggaagcagagggagattcgacgatcggggtagatcagactacgatggaatcgggaaccgagaacgtccaggatttggcagatttgagagatccggccattccaggtggtgcgacaaaagtgtcgaggatgactggtcaaaaccactccccccaagcgagcgcctggaacaggagttattttcgggaggcaacaccgggattaactttgagaagtatgacgatatcccggtcgaagcgacgggcagtaactgtcctccgcacattgagaacttcagtgacattgatatgggagaaataatcatgggaaacatagaactaaccaggtacacccgccctacccccgtgcagaaacacgcgatccctattattaaaggcaaacgtgatttaatggcgtgcgcccagaccggcagcggaaaaactgctgcctttctgctgccaattctatctcaaatctacactgacggtccaggcgaagcgctcaaagcagtcaaggaaaatggacggtacggcaggcggaagcagtatcctatctccctggttcttgccccaacccgggagctggcggtccagatttatgaggaagccagaaagttcagctatcggtcccgtgttcgaccgtgcgtggtttacggtggagcggacattggacagcagatccgtgacctggaaagaggatgccacctgctggtggccactcccggtcggttggtggacatgatggaacgcggaaaaatcggactcgacttttgtaagtatcttgtattagatgaagccgaccgaatgctggacatgggcttcgagccccagatccggcgaatcgtggagcaggacacaatgccgcctaaaggggtccggcatacaatgatgttttcagccacttttcccaaagaaatccagatgctcgcacgcgactttctcgacgagtacatcttcctcgccgtcggccgtgtggggtctacctctgagaacatcacacagaaagttgtgtgggtggaggatcttgacaaacgatcctttctgctggatattctgggggctaccggatccgatagtttgacccttgtgtttgtcgaaaccaagaagggggctgacagcttagaagacttcctctaccacgaaggatacgcgtgtacaagcatccacggtgacaggagccagcgtgacagggaggaagccttacaccagttccggagcggaaagtcgccgatcctcgtggccacggccgtggccgctagaggactcgacattagcaatgtcaggcatgtaataaactttgatctgcctagtgatatcgaagaatacgttcatagaattggcagaactgggcgagtgggcaatttgggccttgcaaccagcttcttcaatgaaaaaaatatgaacatcacaaaagacctgcttgatctgcttgtcgaagctaagcaagaagtgccttcttggctagagaacatggcttatgagcatcactacaaaggcggatccagaggacggtccaagagcaatcgcttctcaggcggatttggggctagggattataggcagtcaagtgggtcctcctccagtggattcggggcatctagaggatcctctagccgaagcggtggcggaggctacggcaacagcagaggtttcggaggaggtggctacggaggattctacaatagtgacgggtacgggggaaactataactcccagggggtcgactggtggggcaactag

SEQ ID NO: 220136 - DNA, 753 bp, synthetic construct
  misc_feature 1..753: note = Description of Artificial Sequence: Synthetic coding sequence
  source 1..753: mol_type = other DNA
atggagataggccgacctcggaaagacacatggaagctcgccaacctcgatctgaactccgaaaagcagagtgggggagcgtccactgcatctaagggcagatacatccctccccatctgcgcaaccgcgaggcctctaaagggttccatgataaagactccagtggctggtcttgcagcaaagacaaagatgcatactcctcattcgggagccgcgatagccgtggtaagcctggatactttagcgaacggggttccggcagcaggggtcggttcgatgatcgcggtcggtccgattatgatgggattggcaaccgggaacggccaggcttcggacggttcgaacggagtggccattcccgctggtgtgacaaatccgtcgaggacgattggtctaaaccgctcccaccatcagaaaggctggaacaagagctgttttctgggggtaacactgggatcaacttcgaaaagtacgacgacattcctgtggaggccaccgggagcaattgtcctcctcatatagagaatttttccgatatcgacatgggagaaatcatcatgggaaacatagagctaactcggtacacacgacctaccccggttcagaagcacgccattccaatcattaaggggaaaagggatctgatggcatgtgcgcagaccggaagtgggaagactgctgcattcctgctgcccattctctctcagatttacaccgatggaccaggcgaggccctaaaggctgtgaaatag

SEQ ID NO: 220137 - DNA, 675 bp, synthetic construct
  misc_feature 1..675: note = Description of Artificial Sequence: Synthetic coding sequence
  source 1..675: mol_type = other DNA
atgtcacacgttgtggtgaagaacgacccggaactggaccagcagctggccaacctggacttgaattctgagaagcaatctggaggggcatctactgccagcaagggtcgttacatccccccacacttgcgcaacagggaggcttctaaaggattccacgacaaagactcctccggatggtcgtgcagtaaggataaggacgcctatagttctttcggctccagggactcgcggggtaagccgggatacttctctgaaagaggatccggcagcagaggacggtttgacgataggggaagatctgactacgacggaattgggaacagagaacggccaggctttggtaggttcgaaaggagcggtcactcgaggtggtgcgacaaatccgtagaagatgactggagtaagcccttgccacctagcgaacgactggaacaggagctgtttagtggaggcaataccggcattaattttgaaaaatatgatgacattccagtggaagccaccggcagcaactgcccaccacacattgagaatttcagcgacatagacatgggtgagataatcatgggtaacatcgagttgacccggtatactcgtccaaccccggtccagaaacatgccattccaatcataaaaggcaagagagacttgatggcatgcgcccagacctag

SEQ ID NO: 220138 - DNA, 1974 bp, synthetic construct
  misc_feature 1..1974: note = Description of Artificial Sequence: Synthetic coding sequence
  source 1..1974: mol_type = other DNA
atggagattgggaggcccagaaaagacacatggaagcttgcaaatctggacctgaattccgagaagcaatctggcggtgccagcaccgcatccaaggggaggtatatccctcctcatttgcggaatcgggaggcctccaagggctttcatgacaaggactcatctggctggagctgttctaaagataaggacgcttatagcagcttcggatcgcgggactctcggggtaagccaggttatttttccgaacggggttctggatccagagggagattcgacgatcgagggcgaagcgattacgatggtataggaaaccgggagaggcccggtttcggccgtttcgagaggagtggtcacagtagatggtgcgataagtctgtggaagacgattggtccaaacctctcccaccaagtgaaaggctggaacaagagctgttcagcggaggcaatacagggattaactttgagaagtacgacgacatcccagtagaggctactgggagtaactgcccgccacatatcgaaaacttctccgacatcgatatgggagaaatcatcatgggcaacattgaactgacacgatacaccagacccactcccgtgcagaagcatgccattccaattatcaaggggaaacgagatctgatggcctgtgcccagaccggatccggcaaaactgcggctttcctgcttccaatactgtcccagatatatactgacggtcccggtgaagctctaaaggccgtgaaggagaacgggaggtatgggagacggaaacagtatccaatatccttagtgctggcacctacaagggagctggcagtgcaaatatatgaagaggccaggaagttctcctacaggtcaagagtcagaccttgcgttgtgtacggcggtgcggatattggacagcagattagggatttagagcgaggttgccacctcctggtggccacgcctgggagactggttgacatgatggaaagagggaagattgggttggacttttgtaaatacttagtgctggacgaagctgatcggatgctggacatgggcttcgagcctcaaatccgcaggattgtggagcaggacacaatgccacccaagggagtgcgtcatactatgatgttttccgcaacttttcccaaagaaattcaaatgctggcacgcgatttcctggacgagtacattttcctggcagtggggagagttggctctactagtgagaacattacacaaaaggtggtgtgggttgaggatctggataagagatcttttctgctggacattttgggcgcaacaggttctgattctctgacattagtttttgtggaaactaaaaagggagccgactccctggaagattttctgtatcacgagggctatgcctgtacaagtatccacggcgatcgtagccagcgggatcgggaagaagctctgcatcagttccggtccggcaagtcgcccattttggttgccacagcagtggcagccagagggctggatatatccaacgtgcgacacgttatcaatttcgatcttcctagtgatatagaggaatatgtgcatcggattggccgaaccggaagagtgggaaacctgggcctggccacttctttctttaacgagaaaaatatgaacatcaccaaagacctgctcgacctactggtagaagcaaaacaggaggtgcctagctggctcgagaacatggcgtacgagcatcactataaaggcggaagccgcggaagaagtaagagtaatcgtttctccgggggttttggggctcgggattacagacagagcagcgggtctagcagctctggtttcggtgccagtcggggtagcagctcccgcagcggcggaggagggtacgggaactctaggggattcggaggcggtggctacggaggcttctataattctgatgggtatggcggaaattacaacagccagggtgtagattggtgggggaactag

SEQ ID NO: 220139 - DNA, 1278 bp, synthetic construct
  misc_feature 1..1278: note = Description of Artificial Sequence: Synthetic coding sequence
  source 1..1278: mol_type = other DNA
atggcagagaatgatgtggacaacgaacttctagactatgaagacgatgaagtcgagactgccgctggaggtgatggggctgaggcaccagctaaaaaagatgtgaaaggctcctacgtttccatccacagctcagggttccgagatttcctgctaaaacccgaacttttgcgcgctattgttgactgcgggtttgaacatccttcagaggtccagcatgaatgtatcccacaggctatcctgggcatggacgtcttgtgtcaggccaaaagcggtatgggaaaaaccgcagtgttcgtgctggccacgctgcagcagctcgagccagtcactggccaggttagcgtactagtcatgtgccatacacgcgagctcgctttccagattagcaaagaatatgagagattctctaagtatatgcccaatgtcaaagtagcggtattttttgggggtctgtctattaagaaggatgaggaagtgctgaaaaagaattgccctcatatagtagtgggcaccccaggtcgaatccttgcactcgcgaggaataaaagcttaaatcttaaacacattaaacacttcatccttgacgaatgtgataagatgctggaacagttagacatgagaagggacgtgcaagaaatctttaggatgacaccccatgaaaagcaagtgatgatgttcagcgcgactctcagcaaggaaataaggccagtatgcagaaaatttatgcaggatcctatggagattttcgtggacgatgagacaaagctcactctccacggacttcaacagtattacgtgaaactcaaggacaatgagaaaaatcgaaagctgtttgatctgctggacgtacttgaattcaatcaagtcgtgatctttgttaaaagtgtgcagcgttgcatcgccctcgctcagctgctggtggagcagaattttcctgcgattgcaatccaccgcggaatgccccaggaagagagactcagtcggtaccagcagttcaaagatttccaacgtaggattttggtggctacaaacctgtttggcagagggatggatatcgaacgggtgaacatcgctttcaactatgatatgcctgaagacagcgatacctacctgcacagatgttatcctctgtcacccagcaggtggcctgaacaggctggcctggccccacgggcttggctcagccacctgtgtcctatgcgaatgatgccaaggagcagcatgatgtgtcgcattgctcttaggtccatccttgtgtcatgtcttatgcggtag

SEQ ID NO: 220140 - DNA, 1287 bp, synthetic construct
  misc_feature 1..1287: note = Description of Artificial Sequence: Synthetic coding sequence
  source 1..1287: mol_type = other DNA
atggccgaaaacgatgttgacaacgaactcctcgactacgaagatgatgaggtggagactgcagctgggggtgatggcgctgaggcccctgctaagaaggatgtaaagggcagctacgttagcatccactcctccgggttccgcgatttcttattgaagcccgagcttcttcgcgctatcgtggactgcggcttcgagcatccttcagaggtgcaacatgaatgcatcccccaggccatcctgggaatggatgtcctgtgccaggccaagagtggcatgggcaaaacagccgtgtttgtattggccaccttgcagcaactcgaacctgtgacaggacaggtatcagtactcgtcatgtgtcacacccgggaattggcatttcagatatccaaggagtatgaaagattttctaagtacatgcccaatgtcaaggtcgcagtctttttcggaggcctgtcaatcaaaaaagacgaggaagtcctgaagaagaactgtcctcatattgtggtgggtactccaggaaggattctggccctggcgaggaataagtccctaaacctgaagcacattaagcatttcatcctggacgaatgtgacaagatgctggagcagctcgacatgcgtcgcgacgtccaagagatattccgcatgactccccacgaaaagcaggttatgatgttcagcgctaccctaagcaaagagatcaggcccgtttgtagaaagttcatgcaggatcctatggagattttcgtagatgacgagactaaactgaccctgcacggccttcaacagtattatgtcaagcttaaggataacgagaagaaccggaaattgtttgatctgctcgatgtcctagaattcaaccaggtggtgattttcgtgaaaagtgtccagagatgcatcgccctcgcacagctactcgtggaacaaaatttccctgccattgccattcaccgcggaatgccacaagaggaacgacttagccgctaccagcagttcaaagatttccagaggcgcatcctggttgctaccaacttatttggacgcggaatggacatagagagggtgaatattgctttcaactacgacatgcccgaagattctgatacctacctccatagagttgcacgcgctggacgattcgggaccaaaggcctggccatcacttttgtgtccgatgagaacgatgcaaagatcctgaacgacgttcaagataggtttgaggttaatatctcagagttacctgatgaaattgatatcagtagttatatagagcaaacccgctag

SEQ ID NO: 220141 - DNA, 1287 bp, synthetic construct
  misc_feature 1..1287: note = Description of Artificial Sequence: Synthetic coding sequence
  source 1..1287: mol_type = other DNA
atggcagagaacgatgtggataatgaactattagattacgaggatgacgaggtcgagacggcagccggaggcgatggtgccgaagctccagcaaagaaggatgtgaagggatcctacgtttccattcattcctccggtttcagagactttcttctgaaacccgagctgctacgggctatcgtggactgtggctttgagcatccctctgaggtgcaacacgaatgcatcccacaggcaatcctaggcatggacgtcctctgtcaggccaagtcaggcatgggaaaaaccgcagtgttcgtgctcgcaacccttcagcaactagaaccggtgactggccaggtttctgtcctggtcatgtgtcacaccagagagcttgccttccagatcagcaaagagtatgaacgattttctaagtatatgcccaatgtgaaggtggccgtcttcttcgggggtctgagcatcaagaaggacgaagaggtcctgaaaaaaaactgccctcacattgtggtagggacacctggtcgtatcctcgcccttgctaggaacaagagtctgaacctgaagcacatcaagcatttcatccttgacgaatgcgataagatgcttgagcaattggatatgcgccgagacgtgcaggaaatattcaggatgaccccccatgaaaagcaagtgatgatgtttagcgccactctctccaaggagatccgacccgtttgcaggaaattcatgcaggaccctatggagatcttcgtcgacgacgaaactaaactcactctgcacggcctgcagcagtattacgtgaaactgaaggataacgagaagaacagaaaactattcgatctgttggatgtcctggagtttaaccaggtagttatcttcgtgaaatccgtccagcggtgtatagcactggctcagttactggtcgaacaaaacttcccagccattgctatccaccgcggaatgccacaggaagaacgactcagccgctatcaacagttcaaagattttcaacgcaggatactggttgctactaacttatttggacgcggtatggatattgaacgcgtgaacatagcattcaattatgacatgcctgaggactccgatacctaccttcacagagtggctagagccggaaggtttggtaccaaaggtctggccatcacttttgtgagcgatgagaacgacgctaaaatccttaatgacgtgcaggaccggttcgaagtaaacatcagcgaattgcccgacgagatcgatatctcgtcttacattgagcagacacggtag

SEQ ID NO: 220142 - DNA, 1278 bp, synthetic construct
  misc_feature 1..1278: note = Description of Artificial Sequence: Synthetic coding sequence
  source 1..1278: mol_type = other DNA
atggctgagaatgatgtcgataatgagcttcttgactatgaagacgatgaggtcgagacagcagctggcggagacggcgctgaggctcccgcaaagaaggatgttaaggggtcctatgtgagtatccactcctcagggtttcgcgactttctcctcaagcccgagctactgagagcgatcgttgattgcggtttcgaacatccctcagaggtgcagcacgaatgcattcctcaggccatcttgggtatggatgtcctctgccaggctaaatctggaatggggaagacagccgtttttgttctcgccactcttcagcagttggagccggtcaccgggcaagttagcgtcttggtaatgtgtcatacacgagaattagccttccagatatccaaggaatacgagcgcttttccaagtacatgcccaacgtcaaggtagcagttttctttgggggactctctataaaaaaagacgaggaggtattgaagaagaattgcccacatatcgtggttgggaccccaggccgtattctggcactggcccgaaataaaagcctcaacctaaaacacattaagcactttattttagacgagtgcgataagatgctcgagcaactcgatatgcgcagagacgttcaggagatatttcgtatgacgccccacgagaaacaggtgatgatgttttccgctaccctgagcaaggagattaggccagtatgtagaaaatttatgcaggatcccatggaaatttttgtggacgacgagacgaaactgactctgcacgggctgcaacaatactacgtgaaattaaaggataacgagaagaatagaaaattgttcgatctgttggacgttctggaattcaaccaggtcgtgatatttgttaaaagtgttcagaggtgtatagcgttggcccagctgttagtagaacagaatttccctgcgatcgccattcatcggggaatgccacaggaggaacggctttctcgctatcaacagtttaaagattttcagagacggatattggtcgccacaaacctatttgggagggggatggatattgagagagtcaatatcgcctttaactatgacatgcctgaagacagcgatacgtatttgcaccgctgttatcccctgagcccatcacggtggcctgaacaggcgggtcttgcgcctcgtgcctggctgagccatctgtgccctatgcggatgatgccgaggtcaagcatgatgtgccggatcgccctgagaagtatccttgtgagctgcctgatgcgatag

SEQ ID NO: 220143 - DNA, 1287 bp, synthetic construct
  misc_feature 1..1287: note = Description of Artificial Sequence: Synthetic coding sequence
  source 1..1287: mol_type = other DNA
atggctgagaacgacgtggataatgaacttttagattatgaagatgatgaggtggaaacagcagctgggggagacggcgcagaggctcctgcaaagaaagacgtgaagggctcttatgtatccattcactcaagtgggttccgagactttttacttaagcctgagcttctccgggcaattgttgactgtgggttcgagcacccatctgaggttcagcacgaatgcatccctcaggcgatactgggcatggacgtgttgtgccaggctaagagcgggatgggcaaaacggccgtgttcgtcctggccaccctgcagcaactcgagccggtgacaggccaggtatcagtgctcgtgatgtgtcatacccgcgaacttgcttttcagataagtaaggagtatgaaaggttcagcaagtacatgccgaatgtgaaagtagccgtgttctttggcggattgtccatcaaaaaggatgaggaagtgttaaaaaagaactgccctcacatagtggtgggaacccccggacgcatactggcactggctcggaacaagtccctgaatctgaagcatataaagcattttatcctggatgagtgtgataagatgctagaacagctggacatgcggcgagatgtgcaggaaatattcagaatgacaccgcacgaaaagcaggtcatgatgttttcagcaaccctgagcaaggaaattcgccctgtatgtagaaaattcatgcaggaccccatggaaatctttgtggatgacgaaaccaaactgacactgcacggactgcagcagtattacgtgaaactgaaagataacgagaaaaaccggaagctgttcgatctgttagacgtcctcgagttcaaccaggtcgtgatctttgtgaagtctgtgcagcgctgtattgccttagcacaactgctggtggagcagaattttcccgctatagcaattcataggggtatgcctcaggaggagcggctgtccaggtaccagcagttcaaggattttcagcggcgaatcctggtggcaaccaacttgtttggaagaggtatggacatagaacgagtgaatatcgcttttaattatgacatgcctgaggattctgatacatatttgcaccgggtggcacgcgcagggaggttcggaactaagggactggccatcacgtttgtgagcgatgaaaacgacgccaagatccttaacgatgtccaggaccgctttgaggtcaatataagtgagctccctgatgagattgacatctctagctatatcgaacagactaggtag

SEQ ID NO: 220144 - DNA, 1287 bp, synthetic construct
  misc_feature 1..1287: note = Description of Artificial Sequence: Synthetic coding sequence
  source 1..1287: mol_type = other DNA
atggcagaaaacgacgttgacaatgaacttctggattacgaggacgatgaggtggaaactgccgctggtggggacggagctgaggcccctgccaaaaaggacgttaagggaagctatgtcagcatccattctagcgggtttagagactttctcttgaagccagaactgctacgggcaatagtagattgcggttttgaacatccatctgaggtgcaacacgaatgcatcccccaagccatactcggtatggatgtgctctgccaggctaagtccggaatgggtaagaccgccgtgtttgtgctggccacactgcagcagctggagccagtaactggccaggtgtccgtgcttgtcatgtgccacactcgggagctggcttttcagatttctaaagagtacgaacgtttcagcaaatacatgcctaatgtgaaggtggccgtgtttttcgggggactctccattaagaaggatgaggaggttctcaaaaaaaattgcccccacatagtggttggtacaccagggaggatcctggcgcttgctcgcaacaagtctctgaaccttaaacatattaagcacttcattctggacgagtgtgacaagatgttggagcagctcgatatgcgcagagatgtgcaggaaattttccgcatgacaccccacgagaaacaagttatgatgtttagtgcaacgctttctaaagagatcagaccggtgtgtaggaaattcatgcaggatccaatggaaattttcgttgatgatgaaacgaagctgactcttcatggtctgcagcagtactacgtgaagttaaaggacaacgagaagaatcggaagttattcgacctactcgatgtactggagttcaaccaggtcgtgatctttgtcaaaagcgtgcagaggtgcatcgctctggcccagctactggttgaacagaatttcccggcaatcgcaatacatcgcggaatgccccaagaagagaggctttcacggtatcaacagtttaaggatttccaacgcaggattctggtcgcaacaaacctgtttggtcgtgggatggatatcgagcgagttaatatcgcattcaactacgacatgcctgaggacagtgacacgtacctgcaccgcgtggcgagggcagggaggtttggaacgaaaggcttggccatcacctttgtgtctgatgagaacgacgccaaaatcctgaacgacgttcaggacaggttcgaggtcaacatttcagaacttccggacgaaatcgatattagttcctatattgagcagactcggtag

SEQ ID NO: 220145 - DNA, 564 bp, synthetic construct
  misc_feature 1..564: note = Description of Artificial Sequence: Synthetic coding sequence
  source 1..564: mol_type = other DNA
atgggatcctcacatattgggggactgtccatcaacgagcgcagatgtagcgcaagcttgggactggtaatggctgaaaatgatgtggacaatgaattacttgactatgaagatgatgaagtggagaccgccgctgggggagatggagccgaagcaccagcaaagaaagacgtgaagggctcctatgtgtccatacatagctcagggttcagggactttctgcttaagcccgagttactgcgtgctatcgtagactgcgggtttgagcatcccagcgaggtccagcacgagtgtatccctcaagccatcctgggcatggacgtgctgtgtcaagccaagtctggcatgggaaagaccgcagtcttcgtcttggccacccttcagcaactagagcccgtgaccgggcaagtatctgtactggtgatgtgtcacacgagggagctcgccttccaaattagcaaagaatatgaaagattcagcaagtacatgcctaacgtcaaggtcgccgtgttctttggaggactatctataaaaaaggatgaggaggtgcttaagaagaattag

SEQ ID NO: 220146 - DNA, 1287 bp, synthetic construct
  misc_feature 1..1287: note = Description of Artificial Sequence: Synthetic coding sequence
  source 1..1287: mol_type = other DNA
atggctgagaatgatgtcgacaatgaactcttggattacgaagatgatgaagtagagacggccgcagggggtgatggagctgaggccccagccaagaaggatgtgaaaggtagctacgtgtctatccactcgagtggtttccgggattttctgcttaaaccagagcttcttcgcgctatcgttgactgtggattcgaacatccttcagaagtgcaacatgagtgcatcccacaagctatcttgggcatggacgtactctgtcaggctaaatcaggcatgggaaagacagcagtgttcgtcttagccaccctccagcagctggaacccgttaccggtcaagtgagcgtgctggtgatgtgtcatacacgcgaactggccttccagatctcgaaggaatatgaaaggttttctaagtatatgccaaatgtgaaggtcgccgtgttcttcggcggattgtctattaagaaagatgaagaggtcctgaagaaaaactgcccacacatcgtggtaggaacccccggtcggattttggcccttgctcgcaataagtcgctaaatctgaagcatattaagcatttcattttagatgaatgcgacaagatgcttgaacagctcgatatgagacgagacgtacaggaaatttttaggatgacgccccatgaaaaacaggtgatgatgtttagcgctaccttatcaaaggagatccggcctgtgtgcaggaagtttatgcaggacccgatggagattttcgtggacgacgaaaccaagctgaccctccacggcctgcagcagtattatgtaaagcttaaggataacgagaaaaaccgcaagctgtttgacttgctcgacgtgctggagtttaatcaggtcgtgatttttgtcaaatctgtgcagcggtgtattgccctcgcccaattgcttgtcgaacagaacttcccagcgatcgccatccataggggaatgccccaggaggagcggctcagtcgttaccaacaatttaaggactttcagcggcgtattctggtcgctacgaatctgttcggacgaggcatggacatcgagagggtaaatatagcctttaactatgatatgcccgaggactctgacacctatcttcaccgcgtggcacgggcagggagattcgggactaaaggcctggctatcacttttgtcagtgatgagaatgatgccaaaattttaaacgatgttcaggatcgattcgaggttaatattagcgagctgcctgacgaaatagacattagtagttacatagagcagactcgctag

SEQ ID NO: 220147 - DNA, 378 bp, synthetic construct
  misc_feature 1..378: note = Description of Artificial Sequence: Synthetic coding sequence
  source 1..378: mol_type = other DNA
atggcggaaaacgatgtggataatgaactgctggactacgaagacgatgaagtggagaccgctgctggcggagacggggctgaagccccagccaaaaaggatgtaaagggctcgtacgtgtccattcattccagtggctttagagattttcttctgaagcctgagctcctgcgggcaatcgtcgactgcgggtttgagcacccatccgaggttcaacacgaatgcattccgcaggcaattctcgggatggacgttctgtgccaagcaaagagtgggatgggcaagacggccgtgtttgtcctggctaccctgcagcagcttgaacccgtgaccggccaggttagcgtcctggtgatgtgccacaccagggagttgtag

SEQ ID NO: 220148 - DNA, 1287 bp, synthetic construct
  misc_feature 1..1287: note = Description of Artificial Sequence: Synthetic coding sequence
  source 1..1287: mol_type = other DNA
atggctgaaaatgacgtggacaacgagttgctcgactacgaagatgacgaggtagaaactgctgccggaggcgacggcgcagaggcccctgccaaaaaggacgttaagggaagttatgtatcaatacactctagtgggttcagggacttcctcctgaaaccagaactgctacgtgctattgttgattgtgggtttgagcacccctcggaggtgcagcatgagtgtatacctcaggctatcctcggtatggacgtgctgtgccaagccaagagcggcatgggaaaaaccgccgtgtttgtgttagcaacacttcaacagctggaacccgtcacagggcaggtctccgtgctggtgatgtgccatacaagagagctcgccttccaaattagcaaggaatacgagagattttctaagtatatgcctaatgtaaaggtcgctgtgttcttcggcggattgagcataaagaaggacgaggaggtgttaaaaaaaaactgcccgcatattgttgtgggtacaccaggcagaattctcgctctcgccaggaacaagagtctgaacttaaaacatattaaacactttatccttgacgagtgtgataagatgctggaacagctcgacatgcgcagggatgttcaagagatctttaggatgactcctcacgaaaagcaggtgatgatgttttctgctacgctctcaaaagaaattcggcctgtgtgcaggaaatttatgcaggaccctatggagatctttgttgatgacgagactaaactgactttgcatgggctgcaacagtactatgtgaagctgaaagataatgaaaagaatcggaagttgttcgatttactcgatgtactcgaatttaaccaggtggtgatctttgttaaatctgtccagagatgtatagccttggctcagctcctggttgaacaaaactttcctgcaatagccattcacaggggtatgcctcaggaggagcgactgtcaaggtatcagcagttcaaggacttccagagacgcatcctggtagccacaaatctttttgggcgtggaatggatatcgaacgggtcaacatagcattcaactacgacatgcctgaagatagtgatacctacttgcacagggtggcccgtgccggacggttcggaaccaaaggtctggcaatcacattcgtctctgatgaaaatgatgccaaaattcttaatgatgtacaggaccgtttcgaagtgaacatctccgagttgcctgacgaaattgatataagtagctatattgaacaaacccgctag

SEQ ID NO: 220149 - DNA, 564 bp, synthetic construct
  misc_feature 1..564: note = Description of Artificial Sequence: Synthetic coding sequence
  source 1..564: mol_type = other DNA
taatccgaagaaagggatattggcaaacctatggagattttcgtggacgatgagacaaaattgaccttgcatggactgcaacaatattatgtgaagctgaaggacaatgaaaaaaatcgaaagttgttcgatttgctggacgtgctggagttcaaccaggtggtgatattcgtgaagagtgtccaacggtgcatcgcactcgctcaattgctcgtggagcagaattttcccgcaattgcgatccacagggggatgccccaggaggaacgcctgtcaaggtaccagcagtttaaggatttccagaggcgaattttagtggcaaccaatctcttcggcaggggcatggacatcgagcgggtaaatatagctttcaattatgatatgccagaagatagtgatacctacctccaccgtgtggcgcgagccggaaggtttgggactaagggcctcgctattacgtttgtgtcagatgagaacgatgcgaagattctgaatgacgttcaggatcggtttgaagtcaatatcagcgagctcccagatgagattgatataagctcatattag

SEQ ID NO: 220150 - DNA, 378 bp, synthetic construct
  misc_feature 1..378: note = Description of Artificial Sequence: Synthetic coding sequence
  source 1..378: mol_type = other DNA
atggcggaaaacgacgtggacaatgaactgctggattacgaagatgacgaagttgaaacagccgcaggcggtgacggtgctgaggccccagctaagaaagatgtgaagggtagttacgtgtccatccattcatcagggttccgtgactttttactgaaacccgaactgcttcgggctattgtggattgcgggtttgagcaccctagcgaagtgcagcacgagtgtatacctcaggcgatactcggcatggacgttctctgccaggcaaaatccggtatgggtaagactgccgtttttgtgctggctacgctgcagcagcttgagccagtgacaggacaggtgtccgtgcttgtgatgtgtcatacacgagagctgtag

SEQ ID NO: 220151 - DNA, 1287 bp, synthetic construct
  misc_feature 1..1287: note = Description of Artificial Sequence: Synthetic coding sequence
  source 1..1287: mol_type = other DNA
atggcagagaatgacgtcgataacgaactccttgattacgaggacgatgaagtagagacagcggctggtggcgacggcgctgaggcaccagcaaagaaagatgtcaaggggtcgtatgtaagcattcacagtagtgggttccgggactttctactgaaaccagagctcctgagggccattgtcgattgtggcttcgagcaccctagcgaagtgcagcacgagtgcatccctcaggcaatcctgggaatggatgtgctgtgtcaggccaagagcggcatggggaagacggctgtgtttgtgctcgcaaccctgcagcagctggaacctgtgaccggacaggtttctgtcttggtcatgtgccacactagggaacttgcattccagatttctaaagaatatgagcggtttagtaagtacatgcccaatgttaaagtagcagtttttttcgggggattgtccatcaaaaaggatgaagaagttcttaagaagaattgcccccacatcgtggtgggcacacccggaagaatcctcgctttggcaagaaacaagagtctgaacctgaagcacatcaagcattttatcctggacgagtgtgacaagatgctggagcagcttgacatgcgacgggatgtgcaagagattttcaggatgactccacacgaaaagcaggtgatgatgttttccgcaaccctgtctaaagagatacgccctgtctgtcggaaatttatgcaggaccctatggaaatcttcgttgacgacgagactaagctgacactgcatggactccaacagtactacgtcaaactcaaagataacgagaaaaatcgtaagcttttcgatctgctggatgtactggagttcaaccaggtcgtgatttttgtaaagtcagtacaacggtgcattgccttggctcaactgctagtcgagcagaacttcccagcaattgcaatccatagaggcatgccccaggaggagagacttagccggtatcagcaattcaaggactttcagaggcgaatcctcgtcgccaccaacttgtttgggagagggatggacatagaaagggtgaatatcgcgtttaattacgacatgcccgaggactcagacacgtatctccaccgggtcgctagggccggacggtttggcacaaaggggctggctatcacgtttgttagtgatgagaacgacgcaaaaattctcaacgacgtccaagacagattcgaagtgaacatttctgagcttcctgatgagattgacatatcttcgtatatcgagcagacaagatag

SEQ ID NO: 220152 - DNA, 870 bp, synthetic construct
  misc_feature 1..870: note = Description of Artificial Sequence: Synthetic coding sequence
  source 1..870: mol_type = other DNA
atggccgaaaacgacgtggacaacgaactgctggactatgaggacgatgaggtagagaccgccgctgggggtgatggggctgaagctccggcaaaaaaagacgtgaaagggagctacgtgagtattcatagtagcggtttccgggactttcttctcaagccggaactgttgagggctattgtcgattgtggttttgaacatccgagcgaggttcagcacgagtgtatcccccaggccatcctgggaatggacgtgctgtgccaggccaaatctggcatgggtaagacagccgtgtttgttctggcaacactccaacagctagaacccgtgacagggcaggtgagcgtgctggtcatgtgtcatactagggagctggcattccagatctctaaagagtacgagcgcttttcgaaatatatgccaaatgtcaaggtggctgtgtttttcgggggtttgtcgataaaaaaggatgaggaagtgctgaaaaaaaattgcccacacatagttgtggggacaccgggtcgaatcctcgctctcgccagaaataagagcttgaaccttaaacacatcaagcacttcatcttagacgagtgtgataaaatgctcgagcagctggacatgagacgagatgtgcaggaaattttcagaatgacaccccacgagaagcaagtgatgatgtttagtgccaccctgagcaaggagatcaggccggtgtgtcggaaattcatgcaggacccaatggaaatctttgtggatgacgaaacaaaactaacccttcatggacttcaacaatactacgtgaaattaaaggataacgaaaaaaaccggaagttgttcgatttacttgatgtgctcgagtttaaccagtag

SEQ ID NO: 220153 - DNA, 1287 bp, synthetic construct
  misc_feature 1..1287: note = Description of Artificial Sequence: Synthetic coding sequence
  source 1..1287: mol_type = other DNA
atggccgaaaatgacgtagacaatgaactcctcgactatgaggatgacgaggtcgagacggctgccggaggggatggggctgaagctcccgctaaaaaggacgtgaaggggagttacgtgtctatacactcgagcggcttcagagacttcctgttaaaacccgagctgttacgcgcaatcgtcgattgtgggtttgagcaccccagcgaggtgcagcacgaatgcatccctcaggcgatcctcggcatggacgtgctgtgtcaggccaaatcagggatgggaaagactgcggtttttgtgcttgccacattacagcagttggaacccgttacagggcaagtgtctgtgctggtgatgtgtcatacaagggagctggcatttcagattagcaaggaatatgagcgcttttccaaatacatgccgaacgtcaaggttgcagtattctttggcggactctccatcaaaaaggatgaagaggtgctgaagaagaattgtcctcatatagtcgttggaacgccagggaggattctggccctagcgcgtaataaatctctgaacctgaaacacatcaaacatttcatcctggacgagtgcgacaaaatgctggagcagctggacatgcggagggacgtccaggaaatatttcggatgaccccccatgaaaaacaagtcatgatgttcagcgcaactctcagcaaagagatcaggcccgtctgcagaaaattcatgcaagatcccatggagattttcgtcgacgacgaaacaaagttaacacttcatggcctccagcagtactacgtcaagctcaaagataacgaaaaaaaccggaagctgttcgatttactcgatgtgttagagttcaaccaggttgttatattcgtcaagtccgtgcagagatgtattgccttagcgcagctgctggttgagcagaattttcccgctatcgctatccaccggggtatgcctcaggaggaacggctctctaggtaccaacagtttaaggattttcagcgtcgcatcctcgtggccaccaacttgttcggcagagggatggacatcgagcgagttaatatagcgttcaactatgatatgcctgaggacagcgacacctaccttcatagggttgcgagagcaggccgttttggcaccaagggccttgccatcacttttgtgtctgacgagaacgatgctaagatactcaatgatgtgcaagatcgatttgaggtgaacatttcggagttgcccgatgagatagatattagcagttatatagagcagaccagatag

SEQ ID NO: 220154 - DNA, 291 bp, synthetic construct
  misc_feature 1..291: note = Description of Artificial Sequence: Synthetic coding sequence
  source 1..291: mol_type = other DNA
atggcagaaaatgacgtggacaatgagttgttagattatgaagacgatgaggttgaaacagctgctggaggggatggagcagaggcacctgcaaaaaaggacgtgaaaggtagctacgtttctatccactcctcaggatttcgggactttttgttgaaaccagagctgctgcgggctattgttgattgcggtttcgaacacccctctgaggtccagcacgagtgtatcccccaggcgattctcggcatggatgtcctttgccaggctaaatccgggatgggaaagacgtag

SEQ ID NO: 220155 - DNA, 378 bp, synthetic construct
  misc_feature 1..378: note = Description of Artificial Sequence: Synthetic coding sequence
  source 1..378: mol_type = other DNA
atggccgagaacgacgtcgataacgagctgcttgactacgaagatgacgaggtggagaccgccgctggcggtgacggagctgaggctcctgcaaaaaaggacgtaaaaggctcatacgtatctattcactcctctgggttccgggacttcctgttaaaacccgagcttttacgcgcaatcgtggattgcggttttgagcaccctagcgaggttcaacacgagtgcatacctcaggctatattgggaatggatgtactatgtcaggctaagtccgggatgggtaagaccgctgtattcgtgctggccaccttgcagcagcttgagccggtcaccggccaagtgtcagttctagtcatgtgccatacccgagaactctag

SEQ ID NO: 220156 - DNA, 696 bp, synthetic construct
  misc_feature 1..696: note = Description of Artificial Sequence: Synthetic coding sequence
  source 1..696: mol_type = other DNA
atggcggagaatgacgtcgataacgaactgctggactatgaggacgacgaggtcgagaccgctgccggaggcgatggtgctgaggcacctgctaagaaggacgtgaagggctcctatgtgtctattcacagctcagggttcagagatttcctgcttaaaccagagttgctcagagccatagtcgattgcggcttcgaacatccatcggaggttcagcatgaatgcattcctcaggccatcctcgggatggacgtactgtgtcaagctaagagcgggatgggcaaaacagcagtgtttgtcttggctaccttacagcagctagaacctgtgaccggccaggtctccgtgctggtgatgtgccacacccgcgagctcgcctttcaaatcagcaaggagtacgagcgatttagcaaatacatgccaaacgtcaaggtggctgtgttcttcggtggcttaagcatcaagaaggatgaggaggtgctgaaaaagaattgtccacacatcgttgtgggcacacccggacggattctggctctagcacgaaacaagagtctcaatttgaagcatatcaaacactttattttggatgagtgcgataagatgctggagcagcttgatatgcgcagggatgtacaggagatctttagaatgacccctcatgaaaaacaagtcatgatgtttagcgcgacattgtag

SEQ ID NO: 220157 - DNA, 399 bp, synthetic construct
  misc_feature 1..399: note = Description of Artificial Sequence: Synthetic coding sequence
  source 1..399: mol_type = other DNA
atggccgagaatgatgtcgacaatgagctcctagactacgaggatgacgaggtggaaaccgccgctggaggtgatggcgcagaggcaccggcaaagaaggatgtgaaagggtcctatgtctctatccatagctcaggcttccgggattttttactgaagcccgagctgctcagagctattgtagactgcggtttcgaacatccttcggaagtgcaacacgaatgtatccctcaggccattctaggaatggatgtcctctgccaggcaaaatctgggatgggtaagacggcagtgtttgtcctggcaaccctccagcagctcgagccggttacaggacaggtgtgcttttgcgatagccacttcccaagaggggataatgaagagttacacctaccctag

SEQ ID NO: 220158 - DNA, 1053 bp, synthetic construct
  misc_feature 1..1053: note = Description of Artificial Sequence: Synthetic coding sequence
  source 1..1053: mol_type = other DNA
atgtggaccatgtcatcctggacaatgaaaatgatgcgatggcggcagcagctaggcgaaatgggattacgccctcttccacgtcgcatgtcacgcgcaccaatgagtccatctacagcgctcgcctttgtgacttcgtgctcctctcagagttgtagcggcccactgagtacagtggccctctctattcggcagaaagtggctgtctttttcgggggactgtctatcaagaaggacgaggaagtgctcaagaagaactgcccgcatatcgtggtcgggacccccggtcggatcttggccctggctcggaataagagtctgaatctcaagcacatcaagcactttattttagatgaatgtgataagatgttggaacagttagacatgaggcgagatgtgcaagagatctttaggatgacaccacacgaaaagcaagtgatgatgtttagcgctactttgagcaaggaaatcaggcccgtatgccgcaagttcatgcaggatccaatggagattttcgttgatgatgagaccaagctgactctgcatggcctgcagcagtactacgtgaagttgaaggacaacgagaaaaatagaaaacttttcgatctgctcgatgtattagagttcaatcaagtggtaatctttgtgaagtcagtccagcgctgtatcgctctggcgcagcttttggtcgaacagaacttcccagccatcgccatccatcgaggcatgccccaagaggaaagactctcgaggtaccagcagtttaaggactttcagaggagaatcctcgtggccacaaacctgtttggcagagggatggacatcgagagggtaaacatagcttttaattacgatatgccagaggactccgatacatatctgcatagggtggcaagggccggaaggtttgggacgaaaggcttggccataacttttgtctccgacgaaaatgatgccaagatcctgaatgatgtccaggacaggtttgaggtgaatatctctgaattaccagacgagatcgatatatcatcttacattgaacagacacgatag

SEQ ID NO: 220159 - DNA, 738 bp, synthetic construct
  misc_feature 1..738: note = Description of Artificial Sequence: Synthetic coding sequence
  source 1..738: mol_type = other DNA
atgtggactatgagctcctggaccatgaagatgatgcggtggaggcagcaattgggtgagatggggctccgccctctacctagacgcatgagtagagccccaatgtcaccatcaaccgctctggcctttgttacttcatgcagctcacagtcatgctccgggcctttaagcactgtcgcactatcaattcgacagaaagtcgccgtatttttcggaggactcagcatcaaaaaagatgaagaggtgctgaaaaaaaactgcccacacatcgttgtggggacccctggaaggatcctggccctcgcgcgtaataagagccttaaccttaagcacattaaacacttcatactggacgagtgcgataagatgctggagcagctcgatatgcggagagatgtccaggagatcttccgaatgactccgcatgaaaaacaagtgatgatgttctctgctaccctgagcaaggaaattaggcccgtctgcaggaagtttatgcaggaccccatggaaatcttcgtggacgacgagactaagttgaccctccacggattgcaacagtattatgtgaagctcaaggacaacgaaaagaatcgaaaactgttcgatttattggacgtactcgaattcaaccaggttgtgatctttgtgaagtctgtgcagagatgcatcgccttggcacagctcctagtggagcagaatttcccggcaattgctattcacagaggtatgccacagtag

SEQ ID NO: 220160 - DNA, 411 bp, synthetic construct
  misc_feature 1..411: note = Description of Artificial Sequence: Synthetic coding sequence
  source 1..411: mol_type = other DNA
atgggcggtggcaggcgaccctacgatgtcttcttctccaaagtgatggctgagaatgacgtggacaacgagcttctggattacgaggacgacgaggttgagaccgcggctggcggagacggagccgaagccccagccaagaaggatgttaaaggctcctacgtcagtatccacagtagcggctttagagacttcctcttaaagcccgagctgctccgtgcaatcgtcgactgtggcttcgagcacccatcagaagtccagcacgaatgcatcccccaggctattctgggtatggacgtattgtgtcaagccaagagcgggatgggaaagactgcagtgtttgtacttgcgaccctgcagcagttggagcctgttaccgggcaagtgtctgttctggtgatgtgccattag

SEQ ID NO: 220161 - DNA, 1287 bp, synthetic construct
  misc_feature 1..1287: note = Description of Artificial Sequence: Synthetic coding sequence
  source 1..1287: mol_type = other DNA
atggccgaaaatgatgtcgataacgagctactcgactacgaagacgatgaggtggaaacagcggctggtggagacggggcagaagcgccagcgaagaaagacgtgaagggttcttacgtgtccatacattctagcgggtttagagactttcttttaaaacccgagctgctgcgagctattgtggactgtggctttgaacacccctccgaagtgcaacacgagtgcatccctcaagcaatattggggatggacgtgctatgtcaagctaaatccggtatggggaaaacggctgtgttcgttctcgctacgcttcagcagctcgagcctgtgactggacaagtgtcagtgctcgtgatgtgtcacacccgagaactggccttccaaatttccaaagagtatgaacggttctctaagtacatgccaaatgtaaaagtggccgtttttttcggtgggctgagcataaaaaaggacgaggaagtgttaaaaaagaactgtcctcatattgtcgtggggactcccggtaggatcctggccctagcgagaaacaagagcctgaacctcaagcacattaagcactttattcttgacgagtgtgacaagatgcttgaacagctggacatgaggagagacgttcaggagatttttcggatgacgccccacgaaaagcaagtgatgatgtttagcgccactctaagcaaggagatcaggccagtatgcagaaaatttatgcaggatcctatggagatttttgtggacgacgaaactaaactcacgcttcacggcttgcagcagtattatgtaaaactgaaggataacgagaaaaacagaaagctcttcgacctgctagacgtgctcgaatttaatcaagtagtcatatttgttaagtcagtgcagaggtgtatcgctctggcccagctactcgtagaacagaacttcccggctatcgccattcaccggggtatgcctcaggaggaacgccttagtcgctatcagcaattcaaggacttccaacgcaggattctcgtggccaccaacctgttcgggaggggcatggatatcgagcgggttaatatagccttcaattacgatatgccagaagattccgatacgtacctccacagagtggcgagggcagggagattcggcacaaagggcttggcaattaccttcgtcagcgatgagaacgatgccaagatactgaacgatgtgcaggataggtttgaggtgaacattagcgagctccccgacgaaatcgacatttcatcctatattgagcaaacccgatag

SEQ ID NO: 220162 - DNA, 594 bp, synthetic construct
  misc_feature 1..594: note = Description of Artificial Sequence: Synthetic coding sequence
  source 1..594: mol_type = other DNA
atggctgagaacgacgtcgataacgaactgctggactacgaggacgatgaagtggaaacggccgcaggaggggacggggcagaggcgcctgctaagaaagacgtgaagggtagctacgtcagtattcactccagtggctttcgagatttcctgcttaaaccagagctgttaagagcaattgtggactgcggattcgagcatccatcggaagttcagcatgagtgtatcccacaagccattttaggaatggatgttctttgtcaagccaaatctggcatgggtaagacagctgtattcgtactcgcaaccctgcagcagctggagcccgtgacaggtcaggtctgcttctgtgacagtcactttcccagaggtgataacgaggagctgcatctgccctacgtcagcgtatactttctccctaaggtgtccgttcttgtaatgtgtcacacacgggaacttgccttccagatttcaaaggaatacgagcggttctctaaatatatgcccaatgttaaggtggctgtttttttcggcggattaagcataaagaaggacgaggaagtgcttaagaaaaattgcccccacattgtgtag

SEQ ID NO: 220163 - DNA, 570 bp, synthetic construct
  misc_feature 1..570: note = Description of Artificial Sequence: Synthetic coding sequence
  source 1..570: mol_type = other DNA
taggctaccttacagcagctcgagcccgtgacgggtcaggtcagcgtcctggtcatgtgtcacacaagggagcttgcctttcaaatctctaaggaatacgagcggttctcaaaatacatgcctaatgtgaaagtagccgtgttttttggcggattgagtatcaaaaaggatgaggaagtgctgaagaagaattgtccccacatcgttgtgggcactcctggccgaattctggctctggccaggaacaaaagtctgaacctgaagcatataaaacatttcattctggatgagtgcgacaaaatgcttgagcagctggacatgcgaagggatgtgcaagaaattttccggatgacgcctcacgagaagcaggttatgatgtttagtgccacactctccaaagagatccgtccagtctgccgcaaattcatgcaggaccccatggaaatcttcgttgatgatgagaccaagctcaccctccatggtctgcagcagtattatgttaagctcaaggacaatgaaaagaatagaaaactcttcgacttgctcgacgtgctggagtttaaccagtag

SEQ ID NO: 220164 - DNA, 1287 bp, synthetic construct
  misc_feature 1..1287: note = Description of Artificial Sequence: Synthetic coding sequence
  source 1..1287: mol_type = other DNA
atggccgaaaatgacgtggacaatgaactgctggactacgaggacgacgaagtggagactgccgctgggggtgatggcgctgaggctcctgcaaaaaaggacgtcaagggcagctacgtgagtatccattcctccggattccgggacttccttctcaagcccgagctgctgcgggctattgtggattgcggcttcgagcacccatccgaggtgcagcacgaatgtatcccacaggccattctagggatggatgtgctgtgtcaagcaaaatctggaatgggaaagacagccgtattcgttctcgcgaccctgcaacaactggagccagttacggggcaggtctcagtgctcgtgatgtgtcataccagagagctggcctttcagatatccaaagagtacgagcgcttcagcaagtacatgcccaatgtgaaggtggctgtgttcttcggtggcctgtctatcaaaaaggacgaagaagtactaaagaaaaattgcccacacatagtggttgggactcctggcagaatcctagccttagccagaaacaagtccctgaatcttaaacacattaaacacttcattctggacgagtgcgataagatgctcgagcagctagatatgcgcagagatgtgcaggagatctttcgcatgactccacatgagaaacaggtgatgatgttttcggcaaccctgtcaaaggaaatcaggcccgtttgtcggaagttcatgcaagacccaatggaaatcttcgtggacgacgagacaaagttaactctacacggcctacagcagtactacgtaaagctaaaggacaatgagaaaaatagaaaactcttcgacctgttggatgtgttagaattcaatcaggtcgtgatctttgtgaagagcgtgcagagatgcatcgcattagcccaattgttggtggaacaaaacttccctgccatcgcgatccatagaggcatgccacaggaagagaggttgtctagataccaacagttcaaagactttcaacggagaatcctagttgccactaacctcttcggtcggggtatggacatcgaacgggtgaacattgcattcaattacgacatgccggaagattccgacacctacctgcacagagtggctagagccggtcgtttcgggactaagggactagctatcaccttcgtttccgacgaaaacgacgccaaaatcctgaatgatgtgcaggacaggttcgaagtgaatatcagcgagctgccagatgagatcgacatctcaagctatattgaacagacccgctag

SEQ ID NO: 220165 - DNA, 711 bp, synthetic construct
  misc_feature 1..711: note = Description of Artificial Sequence: Synthetic coding sequence
  source 1..711: mol_type = other DNA
atggctgaaaatgacgttgacaatgaactcttggactatgaggacgatgaagttgagacagcagctggtggtgatggagcagaggcccctgcaaaaaaggacgtcaaaggcagttacgtttccatccactcgtcgggctttagagattttctcctcaaacctgaacttctgcgtgctatcgtggactgtggattcgaacacccttcagaggttcaacacgaatgtattccacaagcgatcctcggcatggatgttttatgccaggccaagtcgggaatgggcaaaacggccgtgttcgtcctcgccacacttcagcagctggagccggtaaccgggcaagttagtgtgttggtcatgtgccacacacgcgagctggcattccagattagtaaagaatacgaacggtttagcaaatatatgccgaacgtgaaggtggccgttttctttggcggattgagtatcaagaaagacgaggaagtgctcaaaaagaactgtccacatatagtcgtggggactcctggaagaatcttagccctcgccagaaataaatcgctcaacttaaagcacattaagcactttattttggatgaatgcgataagatgctcgagcagctggacatgcgcagagacgttcaggaaatattccggatgactccacatgaaaagcaagtcatgatgttcagcgccacattatcgaaagagatccggtag

SEQ ID NO: 220166 - DNA, 564 bp, synthetic construct
  misc_feature 1..564: note = Description of Artificial Sequence: Synthetic coding sequence
  source 1..564: mol_type = other DNA
atgggttcctcacatatcggtggactatcaatcaatgagaggcgacggagtgcctctcttggtctggtaatggccgagaatgacgtcgataatgaactgctggattatgaggacgatgaagtagagacggccgcaggaggagatggagcggaagcgcctgctaaaaaggacgtcaaaggatcctatgtttccatccattcctctggcttccgtgacttcctcttaaagccggagctgttgagagctattgtggactgcggattcgaacacccgagtgaggtgcaacacgagtgcataccccaagccatcctcgggatggatgtgctctgccaagcgaagagcggcatggggaagaccgccgtgtttgtcttggccacgttacagcagctggagcccgtgaccggacaggtgagcgtactggttatgtgccatacaagagagttggctttccaaatcagtaaagagtatgaacggttcagcaaatacatgcccaatgtgaaggttgcagtcttctttgggggactgtccatcaagaaagacgaggaggtgctgaagaaaaattag

SEQ ID NO: 220167 - DNA, 399 bp, synthetic construct
  misc_feature 1..399: note = Description of Artificial Sequence: Synthetic coding sequence
  source 1..399: mol_type = other DNA
atggcggagaatgacgtggacaacgaattgctcgactatgaggacgacgaggtggaaacggctgctggcggagacggagccgaggccccagccaagaaggacgtgaaagggtcatatgtgagcatacactcttcaggctttagagacttcctactgaagcccgagctgctacgtgccatagttgattgcggcttcgagcacccgagcgaggtgcaacacgagtgcatccctcaagccatcctcggaatggatgtgttgtgccaggctaagagtgggatgggcaagacagccgttttcgtgttggccacacttcagcaactggaaccagtgactggccaagtgtgcttttgcgacagtcactttcctcgcggagacaacgaggagctccatctgccatag

SEQ ID NO: 220168 - DNA, 1332 bp, synthetic construct
  misc_feature 1..1332: note = Description of Artificial Sequence: Synthetic coding sequence
  source 1..1332: mol_type = other DNA
atggcggaaaacgacgtagacaacgagttgctggattacgaggacgatgaagtggagactgccgctggcggtgacggtgccgaggcccctgcgaagaaggatgtgaaagggtcttacgtctcaatccacagcagtggatttcgagactttctgctgaagccagagctgcttagggccattgttgactgcggcttcgagcacccttctgaagttcagcacgagtgcataccgcaggcaatcttagggatggacgtcctgtgtcaggcaaaatcaggaatgggcaagacggctgtctttgtcctggccaccctccaacagttggagcctgtaacagggcaggtgtacctcggtcgagtccttgggcgtggattctggtgcgtgtttgtgagcgtgttggtgatgtgtcatacgagagaactggcgttccagatctcaaaagagtatgagcggttctctaaatatatgccaaacgtgaaggtggcagtttttttcggcggattgagcatcaagaaagacgaggaggtgttgaaaaaaaattgccctcacattgtggtcggaacacctgggagaatcctggccctagccagaaataaaagcctcaatctcaagcacataaagcacttcattctggatgaatgcgataaaatgctggaacagctcgacatgaggagggatgtccaggaaatcttccgcatgactccccacgagaagcaggttatgatgttcagcgcaactctcagcaaggagatccgacccgtgtgccggaagtttatgcaagatcctatggagatattcgtggacgacgaaacaaagctgactctgcatgggctgcaacagtactatgtcaagctgaaagataacgaaaagaaccgcaaactgtttgatctcctggacgtgttagagtttaaccaggtcgttatttttgttaaaagcgtgcagaggtgcatcgccctcgcccagctcctagtggagcaaaactttcccgctatcgctatccatcggggaatgccccaggaggaacgcctttctcgctaccagcagtttaaggactttcagagaagaattctcgtggccactaatttattcggacggggtatggacattgaacgggtgaacattgccttcaactacgatatgccggaagatagtgacacctatctacaccgcgtcgcaagagcagggaggtttgggactaaggggctagcaataacttttgtttccgatgaaaatgacgccaaaatcctgaatgacgtgcaggataggtttgaggtgaacataagtgaacttcccgatgagattgacatctcaagctatatcgagcagactcgctag

SEQ ID NO: 220169 - DNA, 870 bp, synthetic construct
  misc_feature 1..870: note = Description of Artificial Sequence: Synthetic coding sequence
  source 1..870: mol_type = other DNA
atggccgagaatgatgttgacaacgagctgttagattacgaggacgacgaggttgagaccgctgccggaggcgatggggcagaggcaccggctaagaaggatgtcaaaggatcttatgtgtccatccacagctcgggtttcagggatttcctgctgaagccagagctactccgggctatagtggattgcgggtttgagcacccatcggaagtacagcacgagtgcatacctcaggcaattctgggaatggatgtgctttgccaggccaaatccgggatggggaagaccgcagtttttgttcttgccactctccagcagttggagccagtgaccgggcaggtctcagtgctggtgatgtgtcatacccgtgagctcgcttttcagatatccaaggaatacgaaagatttagcaagtacatgccaaatgtcaaagtcgcagtcttttttggaggcttgtccattaagaaggatgaagaagtgttaaagaaaaattgcccacatatcgtggtgggaacgcctgggcgaatcctagcgctcgcccgtaataagtctctgaatctgaagcatataaagcacttcattctggatgaatgcgacaaaatgctggaacaattagatatgaggcgtgacgttcaggagattttcaggatgaccccccatgaaaaacaggtgatgatgttctccgcgacactatcaaaagaaatacgccctgtgtgtaggaagtttatgcaagatcccatggagatcttcgtcgatgacgaaaccaaactcactctgcacgggctgcagcagtactacgtgaaactcaaggacaacgagaagaatagaaagctctttgacctgttggatgtgcttgagttcaaccagtag

SEQ ID NO: 220170 - DNA, 564 bp, synthetic construct
  misc_feature 1..564: note = Description of Artificial Sequence: Synthetic coding sequence
  source 1..564: mol_type = other DNA
taatcagaagagagggatatcggcaagcccatggaaatatttgtggatgacgaaaccaagttaacgcttcacggtctgcaacagtactatgtgaaactgaaggataacgagaaaaatcgcaaactgttcgacctgctggacgtcttggaatttaaccaggtcgtcattttcgtgaagtccgtgcagagatgcattgcactggctcagcttctggtggaacagaacttcccggctattgctattcaccggggaatgcctcaggaggagcgcctgtcacggtaccagcaatttaaagactttcagcgcaggatattggtggcgacaaatctcttcgggaggggtatggacatagagcgagtcaatattgccttcaactacgacatgccagaagattccgatacttacttgcatagggtggcacgcgcaggaaggttcggaacaaagggtttagccattacatttgtttctgatgaaaacgacgccaagatcttgaacgacgtgcaagacaggtttgaggtaaacatcagcgagctacctgacgaaatcgatatatctagctattag

SEQ ID NO: 220171 - DNA, 411 bp, synthetic construct
  misc_feature 1..411: note = Description of Artificial Sequence: Synthetic coding sequence
  source 1..411: mol_type = other DNA
atgggaggtggtaggcggccttacgatgtgttcttctctaaggtgatggcagaaaacgatgtggataacgaactactcgactacgaggacgatgaagttgagacagccgcagggggagatggagcagaagcgcctgctaagaaagatgtcaaaggaagctacgttagcatccatagcagtggctttcgagatttcttgctgaaacccgagctcctgcgggctattgtcgattgcggtttcgaacacccttctgaggtgcagcacgaatgtattccacaggctattctcgggatggacgttttgtgtcaggccaaatccgggatgggaaaaacggctgtctttgtgttggcgaccttgcagcagctggagcctgtgacaggtcaggtctcagtcctggttatgtgtcactag

SEQ ID NO: 220172 - DNA, 411 bp, synthetic construct
  misc_feature 1..411: note = Description of Artificial Sequence: Synthetic coding sequence
  source 1..411: mol_type = other DNA
atgggcggtggaaggaggccgtatgatgtttttttttcaaaagtgatggccgagaacgacgttgataatgaactactggattatgaggatgatgaagtggagacagcagctggaggcgatggagccgaggccccagctaagaaagacgtgaagggctcatatgtgtcaatacactcttcaggctttcgagatttcctgctgaagcctgagctgttacgcgcaattgttgactgtgggttcgagcatccttctgaggtccagcacgagtgcatccctcaggctatcctgggcatggacgtgctgtgtcaggctaagtcgggcatggggaaaacagccgtgtttgtgctggccaccctccagcagctcgagcccgtcacaggccaggttagcgtgctcgtgatgtgccactag

SEQ ID NO: 220173 - DNA, 399 bp, synthetic construct
  misc_feature 1..399: note = Description of Artificial Sequence: Synthetic coding sequence
  source 1..399: mol_type = other DNA
atggctgagaatgacgtcgataacgaactgttagactacgaggacgatgaggtggaaaccgccgcaggcggtgacggcgctgaggccccagcgaagaaagatgtgaagggttcttacgtgagtatccacagctcaggattcagagacttcctgctgaaaccagagctgctgagagcaatcgtggactgtggattcgagcacccttccgaggtgcaacacgagtgtattccccaggctatacttggaatggacgtactctgccaagcaaaaagcgggatgggtaaaaccgcggtcttcgtgctggcaactctacagcagctcgagccagttactgggcaggtttgcttctgtgactcccatttccctcggggagacaacgaggaattgcacctgccctag

SEQ ID NO: 220174 - DNA, 711 bp, synthetic construct
  misc_feature 1..711: note = Description of Artificial Sequence: Synthetic coding sequence
  source 1..711: mol_type = other DNA
atggctgagaacgacgttgataatgaactcctggactacgaggacgacgaggtggaaacagcagccggtggcgatggcgcagaagcacccgcaaaaaaagacgtcaagggaagttacgtctccatccactcctcaggctttcgcgacttccttctcaagccggaacttctccgagctattgtcgattgcggcttcgagcacccttcagaggtacagcacgaatgcattccacaagccatcctgggaatggacgtcctgtgccaggccaaatccggaatggggaaaaccgccgtttttgttctagccaccttacagcaactggagccagtcacagggcaggtttctgtactggttatgtgccacacacgagaacttgctttccagatctcaaaggagtacgagagatttagcaagtatatgcctaatgtgaaagtggccgtcttcttcggaggcctttcaattaaaaaggatgaggaggtcctaaagaaaaattgtccccacattgtcgtggggacacccggtagaatcctcgctttagcgcgtaataagagtctcaacctgaagcacatcaagcactttattttagatgaatgcgataagatgctggagcagctggatatgcgtagagacgtccaagagatctttagaatgacaccacacgaaaagcaagttatgatgttttctgctactctgtccaaggagatccggtag

SEQ ID NO: 220175 - DNA, 378 bp, synthetic construct
  misc_feature 1..378: note = Description of Artificial Sequence: Synthetic coding sequence
  source 1..378: mol_type = other DNA
atggctgaaaacgatgtagataacgaactgcttgactatgaggacgacgaggtcgagaccgcagcgggtggcgacggtgccgaagcgccagcaaagaaggatgtcaaggggtcctatgtttccattcatagctctggttttcgcgattttctgctgaagccagagctcttaagggctattgtggactgtggcttcgagcatccctccgaagttcaacatgagtgcatccctcaggccattctgggaatggatgtgctttgccaggcaaaatccggcatggggaagactgccgtcttcgttctcgccactctgcaacaacttgaacctgtcactggacaggtttctgtgctggttatgtgccacacccgggaattatag

SEQ ID NO: 220176 - DNA, 987 bp, synthetic construct
  misc_feature 1..987: note = Description of Artificial Sequence: Synthetic coding sequence
  source 1..987: mol_type = other DNA
taagcgactttacagcagctagagccagtcacaggacaggtctcagtgctggtcatgtgccacactcgcgagctcgccttccagatatccaaagagtatgagcgcttcagtaaatatatgccaaacgttaaggtggccgtgttttttggcggtctctctatcaagaaggatgaagaggtcctcaaaaagaattgtccccacattgtagtggggacacctggacggattctggcactggcccgaaataagagcttgaacctcaaacatattaaacacttcatcttggatgagtgcgataaaatgttggaacagctcgacatgaggcgggatgtccaggagatctttcggatgacaccacacgagaaacaggtgatgatgttctccgctaccctctccaaagagatccggccagtgtgccgcaagtttatgcaggaccccatggagatctttgtggatgacgagacaaaactgacactccacggcctgcagcaatattatgttaaactgaaggacaatgaaaagaataggaagctgtttgacctgcttgacgtcctggagttcaaccaggtggtcatcttcgtgaaatcagtgcagcgctgcattgccctggcacagctgcttgtggagcagaacttccctgcgatcgcaatccatcggggaatgccgcaagaagagcgtctgtcacgctaccagcagttcaaagacttccagcggaggattttggtcgccactaacctgtttggaagaggcatggacattgagagggtgaatattgcattcaactacgacatgcccgaggatagcgatacatatctgcatcgggtagccagagccggacggttcggaaccaaaggattggctatcacattcgtgtcagacgaaaatgacgcaaagatcttaaacgacgtgcaggacaggtttgaggtaaatatcagtgaactcccagacgagatagacatcagtagttacatcgagcaaactcggtag

SEQ ID NO: 220177 - DNA, 711 bp, synthetic construct
  misc_feature 1..711: note = Description of Artificial Sequence: Synthetic coding sequence
  source 1..711: mol_type = other DNA
atggccgaaaacgacgtagacaacgagctgcttgattacgaggatgacgaggtggagacggcggcaggcggagacggggcagaggcaccagcgaagaaggatgtgaaggggtcttacgtgtcaattcactcaagcgggtttcgggactttctactgaaaccagagttactgcgtgccatcgtggactgcggtttcgaacatccttccgaggtgcaacacgagtgtatcccacaggcaattctagggatggatgttctctgtcaggccaagtctggaatggggaagactgccgttttcgtcctggccacccttcagcagctggaaccagtgaccgggcaggtgagcgttctggttatgtgtcatacgcgtgagctggcattccagattagtaaggaatatgaaaggttctccaaatacatgccgaatgtaaaggtggctgtgttttttggcggtttgtctattaagaaagatgaagaagttctcaagaagaattgcccccatatcgtggtcggaaccccaggacgtatcttggccctcgctagaaacaagtcactgaatcttaaacatataaaacattttatactcgatgagtgtgataaaatgttggagcagctggatatgcgccgagacgtgcaagaaatttttagaatgactccccatgagaagcaggtgatgatgttttctgctaccctgtccaaagagatccgctag

SEQ ID NO: 220178 - DNA, 564 bp, synthetic construct
  misc_feature 1..564: note = Description of Artificial Sequence: Synthetic coding sequence
  source 1..564: mol_type = other DNA
taaagcgaagagcgcgatatagggaagcccatggagatttttgtcgatgatgagactaagctgacgctgcacggactccagcagtactatgttaaactgaaggacaacgagaaaaacaggaaactcttcgatttgctagatgtactggaatttaaccaagtcgtcattttcgtcaagtctgtgcagagatgcattgctctggctcagctcctcgtggagcagaactttcccgcaatcgctattcacagggggatgcctcaggaggagcggctgagccggtatcagcagtttaaagactttcagcgaagaatactggtggcaaccaacctcttcggcagaggcatggacattgaaagagtcaacattgcgttcaactacgacatgcctgaagattcagatacatatcttcacagggtggcccgagcaggcagattcggcacaaagggactcgcaattacttttgtgagcgacgagaatgatgccaagattctcaatgacgtgcaggataggtttgaagtgaacatatctgaactacctgatgagattgatatcagtagttactag

SEQ ID NO: 220179 - DNA, 378 bp, synthetic construct
  misc_feature 1..378: note = Description of Artificial Sequence: Synthetic coding sequence
  source 1..378: mol_type = other DNA
atggccgagaacgatgtggataatgaactgctggactatgaagatgacgaggtggagactgcagcgggaggtgatggggctgaggctccagcaaagaaagacgttaaggggtcatacgtgtctatccattctagtggtttcagggattttctcctgaagcccgagctgctcagagccatcgtggactgcggctttgaacatccaagcgaggtgcaacatgagtgtataccacaggccattttggggatggatgtcttgtgtcaggcgaagagtggaatgggcaagactgccgtttttgtgcttgctacgttgcaacagttagaacctgtgactggacaggtatctgtgctcgtcatgtgccataccagagaactgtag

SEQ ID NO: 220180 - DNA, 291 bp, synthetic construct
  misc_feature 1..291: note = Description of Artificial Sequence: Synthetic coding sequence
  source 1..291: mol_type = other DNA
atggccgagaatgacgtggacaatgagctcctggattatgaggatgacgaggtcgagaccgcagcaggtggagatggagccgaagccccagcaaaaaaagacgtgaagggctcgtacgtttcaatccattcttccggatttagagatttcctccttaagccagagctcttacgtgctatagttgattgcgggttcgaacacccatcagaggtgcagcatgagtgtatccctcaggccatattgggcatggacgtgctgtgtcaggctaaatctgggatggggaaaacatag

SEQ ID NO: 220181 - DNA, 378 bp, synthetic construct
  misc_feature 1..378: note = Description of Artificial Sequence: Synthetic coding sequence
  source 1..378: mol_type = other DNA
atggcagaaaacgacgtcgataacgaactgcttgactatgaggatgacgaggtagaaacagcagctggtggcgatggcgcagaggccccagcaaagaaggatgtgaaaggcagctacgtctctatccattcctccggattccgggattttttgctgaaaccagaattgctccgggcaatagttgattgtggcttcgagcatccgagcgaggtgcagcatgagtgcattcctcaggccatcttagggatggacgttttatgccaggccaagagcgggatgggcaagactgcagtatttgtcctcgcaaccttacagcagctggagccagtgaccgggcaggtttcagtcctcgtaatgtgccatacacgagaactgtag

SEQ ID NO: 220182 - DNA, 987 bp, synthetic construct
  misc_feature 1..987: note = Description of Artificial Sequence: Synthetic coding sequence
  source 1..987: mol_type = other DNA
tgagcaacactgcagcagctggaaccagtaacaggacaagtgtcagtgctagtgatgtgccacacgagggagctggcatttcagatttctaaggagtacgaacgcttctctaagtacatgcccaacgttaaagtggccgttttttttggaggtctctctattaaaaaggatgaagaagtgctcaagaaaaactgtccacacatagtcgtcggaaccccaggacgaatattggccctcgcgcgaaacaagagcctgaacctaaagcacatcaagcatttcatcctcgatgaatgcgacaagatgctagagcagctggatatgcgtcgggacgtccaggagatctttcggatgaccccacacgaaaagcaggtaatgatgttctccgccaccctgagcaaggaaattcgtcctgtatgtagaaagttcatgcaggatcctatggaaatcttcgtggatgacgagacaaagcttacactgcatgggctgcaacagtactacgtcaagctaaaagacaacgagaaaaacaggaaactctttgacctccttgatgttttagaatttaaccaagtggtcatattcgtgaaatcagtccagaggtgtatcgccctggctcagctgctggtcgaacagaattttcccgctatcgcaattcacagaggtatgcctcaggaggaaagactctcgagataccagcagttcaaagactttcagcgtcggatactggtagctacaaacctgtttgggagagggatggacatcgagcgggtgaatatagctttcaactatgatatgcccgaggacagcgatacttacctgcatagggtcgctcgggctggcagattcgggacaaaaggcttagctataacctttgtgtccgacgaaaatgacgccaagatcctgaatgacgtccaggacagatttgaggtcaatatctctgaactgccagatgaaatcgacatctctagctacatagaacagactagatag

SEQ ID NO: 220183 - DNA, 870 bp, synthetic construct
  misc_feature 1..870: note = Description of Artificial Sequence: Synthetic coding sequence
  source 1..870: mol_type = other DNA
atggcagaaaacgacgttgataacgagctgctcgattatgaagatgacgaagtggagacggccgcaggcggtgacggggcagaagcacctgccaaaaaagatgtcaagggttcatacgtgagcatccatagtagtggattcagagatttcctgctcaaaccggaacttctcagggctatagtggactgcgggttcgaacatccgtccgaagtgcagcacgagtgcatccctcaggctattctggggatggacgttctctgtcaggcaaaatcaggaatgggtaaaacggcagttttcgtgctggctactctgcagcagttagagccggtgacaggacaggtctctgtcttggtaatgtgccacacacgggagttggcttttcagatttccaaagaatacgagcggttctctaagtacatgcctaatgtaaaagtggcagtcttctttgggggtttgtctattaaaaaagatgaggaagttctgaagaagaattgccctcacatagtcgtcggcacacctgggcgaattctcgccctcgcccgtaataagtcactcaacctcaagcacattaagcacttcattttggacgaatgtgacaagatgcttgagcaactagatatgagaagagacgtgcaggagatatttcgcatgaccccacacgagaaacaggtcatgatgttttctgccaccctgagcaaggagatccggcctgtgtgcaggaagtttatgcaagacccaatggagatatttgtggacgacgagacaaagctcacactgcacggcctgcaacaatattatgtcaagttgaaagataacgagaagaatcgtaaactgtttgacctgttagacgttctagagtttaatcagtag

SEQ ID NO: 220184 - DNA, 738 bp, synthetic construct
  misc_feature 1..738: note = Description of Artificial Sequence: Synthetic coding sequence
  source 1..738: mol_type = other DNA
atgtggaccatgtccagttggacaatgaagatgatgagatggcgccagcagctgggggagatgggacttaggccacttcctaggaggatgtccagagcccctatgtccccgagtacagctcttgctttcgtgacgtcctgttcatctcaatcctgctcaggtccactctctacagtggcgctgagcatacggcagaaggtggcggtgttctttggtgggctctctattaagaaagacgaggaagtcctgaaaaagaactgcccacacatcgtggtcggcacgcccggacggattttggccctcgcgaggaacaagagcctgaatcttaagcacatcaagcattttatcttagatgagtgtgataaaatgctagaacagttggacatgcggagagacgtccaagagatctttagaatgaccccccatgaaaagcaggtgatgatgtttagtgctactctgtctaaagagatccgaccagtctgccgaaagtttatgcaggaccctatggagatttttgtggatgacgagactaagctgaccctgcatggtctgcagcaatactatgtcaaactcaaggataacgagaaaaataggaaattattcgacctgctggatgtgctcgagtttaaccaggtagttattttcgtcaaaagcgttcagcgctgtattgcccttgcccaattgctggtggagcagaacttccccgcaatcgcaatacataggggtatgcctcagtag

SEQ ID NO: 220185 - DNA, 738 bp, synthetic construct
  misc_feature 1..738: note = Description of Artificial Sequence: Synthetic coding sequence
  source 1..738: mol_type = other DNA
atgtggactatgtctagctggacgatgaagatgatgaggtggaggcagcagctgggggaaatgggtcttcgcccattgccccgaaggatgtctcgcgctccaatgtctccctctaccgctctggcatttgttacatcttgtagctcccagtcttgttcaggaccgctctctactgtggctctgagtattagacagaaggtggccgtcttctttggcggtttgagcattaaaaaggatgaagaagtgctgaagaagaattgtcctcacattgtcgtgggaactcctggccgaatcctcgctctggcacgtaataaatccctgaatctcaaacacattaagcacttcatcctagatgagtgcgataagatgctggagcaattagacatgcgaagggacgtacaagagatctttaggatgacgccgcacgaaaaacaagtcatgatgttctcggccaccctgtcaaaggagattcggccagtgtgtcgcaagttcatgcaggaccccatggagatcttcgttgatgatgagactaaactgacactgcacgggttacagcaatactacgtgaagctgaaggataatgagaaaaacaggaaactttttgatctactagatgtactggagtttaaccaggttgtgatttttgtgaaaagcgtgcagcgatgtatcgctttggcccagctgcttgtcgagcagaacttccccgctattgccatacacagggggatgccccagtag

SEQ ID NO: 220186 - DNA, 396 bp, synthetic construct
  misc_feature 1..396: note = Description of Artificial Sequence: Synthetic coding sequence
  source 1..396: mol_type = other DNA
taggctacactgcagcagcttgaacctgtgacaggacaagtctccgtcctggtgatgtgccatacccgggagctagcgttccaaatcagtaaagagtatgaacggttcagtaaatacatgcccaacgttaaagtggcagtgttcttcggtggcctatccatcaaaaaggatgaagaagtactgaaaaaaaattgcccacacatcgtcgtgggcaccccaggcagaattctcgcccttgctcgcaataaatccttgaacctgaaacacattaagcatttcatcctggacgagtgcgacaaaatgctggaacagctggacatgcggagggatgtgcaggagattttccgaatgacaccccatgaaaaacaggtaatgatgttttctgctacactctag

SEQ ID NO: 220187 - DNA, 411 bp, synthetic construct
  misc_feature 1..411: note = Description of Artificial Sequence: Synthetic coding sequence
  source 1..411: mol_type = other DNA
tgagcaacacttcagcagctcgagcccgtaaccggacaggtatctgtgttggtgatgtgtcacacgcgggaactggctttccagatctcaaaagagtatgagcgcttcagcaagtacatgccaaatgtcaaagtggcagttttttttgggggactctctataaagaaagacgaggaggttctcaaaaagaactgcccacacatagtggtggggacaccaggccgtattcttgccctggcccgaaacaagtcactgaacctgaagcacatcaaacatttcattttggatgagtgtgataaaatgttggaacaactcgacatgcgtcgtgacgtgcaggaaattttcagaatgactccccacgagaagcaagtgatgatgttttctgcgaccttatctaaggaaattagatag

SEQ ID NO: 220188 - DNA, 717 bp, synthetic construct
  misc_feature 1..717: note = Description of Artificial Sequence: Synthetic coding sequence
  source 1..717: mol_type = other DNA
atggcagagaatgacgtagacaatgaactgcttgattacgaggatgacgaggtggagaccgctgcaggtggcgatggtgccgaagccccagcaaaaaaagatgtgaaaggttcttacgtttcaatccactcctcgggatttcgagatttcctgttaaagcctgagttgctgagagcaatcgtagactgtgggtttgagcacccgtccgaagtccagcatgagtgcattcctcaggccatcttggggatggacgtgttatgtcaggccaaaagtggcatgggaaagactgctgtgtttgtgttagctaccctgcagcagctggaacctgtgacaggccaggtgtcggtgcttgtcatgtgccatacacgggaactggcttttcaaataagcaaggaatatgagcggttcagcaagtacatgcccaatgtcaaggtagctgtgttcttcggcggattaagcattaagaaagacgaggaggtgctcaaaaaaaactgccctcacatcgttgtgggtacccccggtagaatcttagcacttgccaggaacaaatctctaaatcttaagcatataaagcacttcatcctagacgaatgcgataagatgctggagcagctcgatatgcgtcgggacgtccaggaaatctttcggatgacgccccatgaaaagcaggtcatgatgttttcagctacgctttctaaggaaataaggcctgtgtag

SEQ ID NO: 220189 - DNA, 564 bp, synthetic construct
  misc_feature 1..564: note = Description of Artificial Sequence: Synthetic coding sequence
  source 1..564: mol_type = other DNA
tgaagcgaggaaagggatattgggaaacctatggagatttttgttgacgacgagacgaagctaacactgcatggcttgcagcagtattacgtgaagctgaaagacaatgagaaaaacagaaaactgtttgacttgctggacgtgcttgagttcaaccaagttgtcatctttgtgaagagcgtgcagcgatgtatcgccctggctcaacttctggtcgaacagaatttccccgctatagccattcaccgcggaatgcctcaggaagagaggctctcgcggtaccaacagttcaaagactttcagaggcgtattctggtggcaacgaaccttttcgggagaggcatggatattgagagagttaacatcgctttcaactacgacatgccagaggattccgacacctacttgcaccgtgtggcccgagctggacggttcgggactaagggactcgctatcactttcgtgtctgacgaaaacgatgctaagatactgaacgacgtgcaggacaggttcgaggttaacatctcggagctgccagatgagattgacatctccagctactag

SEQ ID NO: 220190 - DNA, 594 bp, synthetic construct
  misc_feature 1..594: note = Description of Artificial Sequence: Synthetic coding sequence
  source 1..594: mol_type = other DNA
atggccgaaaacgatgttgacaacgaattactggattatgaagacgacgaagtcgagactgccgctggaggcgacggggcagaggccccagcaaagaaagatgtgaaggggtcctatgtaagtatacatagctccggcttccgggactttctcctcaagccagagctgctccgggctattgttgactgcggcttcgaacacccctctgaagtacagcacgagtgtattccccaggcaatactgggaatggatgttctttgtcaagcgaaaagcggcatgggcaaaactgctgtcttcgtactcgccacccttcagcagcttgagcctgtgaccggtcaggtgtgcttttgtgactctcacttcccccgaggcgataatgaggaactccatctgccatatgtgtctgtgtacttcctgccaaaagtctctgtacttgtgatgtgtcacactcgggaattggcattccaaatttccaaggaatacgagcgcttttcaaaatatatgccaaacgtcaaagttgccgtgttttttggaggactcagcattaagaaagacgaggaagtgctgaagaagaactgcccccacatcgtctag

SEQ ID NO: 220191 - DNA, 594 bp, synthetic construct
  misc_feature 1..594: note = Description of Artificial Sequence: Synthetic coding sequence
  source 1..594: mol_type = other DNA
atggccgagaacgacgtggataacgagctgctggactacgaagacgacgaggtggagaccgccgcaggcggtgacggcgcagaggctcccgctaagaaagacgtaaaggggtcttacgtttctattcatagttctggattcagggacttcctgctgaaaccagagttgctcagggccattgtagattgtgggtttgaacacccctcagaggtgcaacacgaatgcattcctcaggctatcctcgggatggatgtgctctgccaggctaaaagtggtatgggaaagacagcggtgttcgttctggcaacgctgcagcagctcgaaccagtaaccggccaagtgtgcttctgcgactcacatttcccaaggggcgataatgaggaattacacctgccttatgtttccgtgtatttccttccgaaggtaagtgtcctggtaatgtgccatactcgggagttagccttccagatatcaaaagaatacgagaggttctctaagtacatgcccaacgtaaaggttgctgtgttcttcgggggtctgagcattaaaaaggacgaggaagtgctcaaaaaaaactgtccacacattgtgtag

SEQ ID NO: 220192 - DNA, 411 bp, synthetic construct
  misc_feature 1..411: note = Description of Artificial Sequence: Synthetic coding sequence
  source 1..411: mol_type = other DNA
atggggggaggcaggcgcccatatgatgtgttcttttccaaagtgatggccgagaatgatgtagacaacgagctgttggattacgaggacgacgaggtcgagacggcggctggtggcgatggcgctgaagcgccagccaagaaggatgtaaaggggagctacgtctcaattcatagtagtggattcagggacttccttctgaagcccgaattgttgcgggctatcgttgactgcggattcgagcatccctctgaagtccagcatgaatgtattccccaagccattctgggaatggacgttctgtgccaggcaaagagcgggatggggaagacggctgtgtttgttcttgcaaccctgcagcaactagaaccggtaaccggacaggtctctgtgctggtcatgtgccattag

SEQ ID NO: 220193 - DNA, 1278 bp, synthetic construct
  misc_feature 1..1278: note = Description of Artificial Sequence: Synthetic coding sequence
  source 1..1278: mol_type = other DNA
atggctgaaaacgatgttgacaatgaactcctcgactacgaagacgatgaagtagagactgcagcagggggagacggagctgaagcccctgcgaagaaagacgttaaaggtagttacgtttcaatacactcctccggatttcgagactttctgttgaagccagaactcctacgagctattgtggactgcggtttcgagcacccatctgaagtccagcatgagtgcatcccccaggccattctgggtatggatgttctgtgtcaagccaaatctgggatgggaaagaccgctgtctttgtgcttgccacactgcagcagcttgagcccgtgactggtcaagtgtccgtcctggttatgtgccacacaagggagttggccttccagataagcaaagagtacgaacgattttccaaatacatgcccaacgtgaaggttgcagtattcttcggcggactttccattaaaaaagacgaagaagtgcttaagaaaaattgcccgcacatcgtggttgggactccagggcgtatcctcgccttagcccgaaataaatctttaaatttgaaacatatcaaacatttcatccttgatgaatgcgacaagatgctggaacagctcgacatgcgaagggacgtccaggaaatcttccgcatgacacctcacgaaaagcaagtgatgatgttttccgccacactatccaaggagatccggccagtctgcaggaagttcatgcaggaccctatggagatcttcgtagacgacgagaccaaactaaccctgcatggtctgcaacagtattatgtgaaactgaaggacaatgagaagaaccgtaaattgtttgacttactcgacgtgcttgaattcaaccaggttgtcatcttcgtcaagtccgtccagcgatgtatagcattagcgcaactccttgtggaacagaacttccccgcaatcgctatccaccggggtatgccgcaggaagagcggctctcgaggtaccagcaatttaaggacttccaacgccgtattctggtggccactaatctctttggtaggggcatggacattgaacgggtaaatattgcctttaattacgatatgcccgaagattccgatacatatctgcataggtgctatcctctgagccctagcagatggcctgagcaagccggactggctccgagggcatggctaagccatctgtgtcccatgaggatgatgccccgttccagcatgatgtgccgaattgctctgcggtcgattcttgtttcttgcttaatgagatag

SEQ ID NO: 220194 - DNA, 1287 bp, synthetic construct
  misc_feature 1..1287: note = Description of Artificial Sequence: Synthetic coding sequence
  source 1..1287: mol_type = other DNA
atggcggagaacgatgtcgacaacgagcttctggattatgaggatgatgaagtggagacggctgctggcggagatggcgcagaagcacctgccaaaaaagatgtgaaaggttcttatgttagcattcacagctcgggttttcgggattttctgttaaagccggagctgcttcgtgcaattgtggattgcggttttgaacatccatcagaggtccagcacgagtgtatcccgcaggccatcttgggaatggacgtcttatgtcaagctaagagcgggatgggtaagaccgccgtcttcgtactggcgacactgcagcagcttgagccagtgacaggacaggtgagcgtcctagtcatgtgtcatacgcgggaattggctttccagatctcaaaagagtatgaaaggttttcaaagtatatgcccaacgtcaaagtggccgtgttctttggcggactttcaatcaagaaagatgaggaggtgctgaagaagaactgcccacatattgtggtgggaacccctgggagaatactcgcccttgcccgaaataagagtctgaatttgaaacacatcaaacactttatcctagacgaatgcgataagatgttggagcagctcgatatgcgcagggacgtccaagaaatctttcgtatgaccccccacgaaaagcaggttatgatgttctccgccactctgtccaaagagattcgaccagtgtgcagaaagttcatgcaggaccccatggagatattcgtggacgacgagacgaagctgaccttgcatggtttgcagcaatactatgttaagttgaaggacaatgagaaaaaccgcaaattattcgatctgctggatgtgcttgagtttaaccaggtggtcatcttcgtcaagtcagtccaacggtgcatcgcccttgcacaactgctcgtcgaacagaattttcccgctatcgcgatacaccgtgggatgccacaggaggaacgactgtcacgctatcagcagttcaaggactttcaacgcaggatcctggttgcaacgaacctatttggacgcggaatggacatcgagcgcgtcaacatcgccttcaactacgacatgcctgaagatagtgatacatatctgcatagggtggccagagcagggagattcgggactaagggcctcgcaataaccttcgtcagcgacgaaaacgacgccaagatactaaacgacgttcaggatcgttttgaggttaacatttcggagttaccagatgaaattgacatcagttcatatattgagcaaaccaggtag

SEQ ID NO: 220195 - DNA, 1287 bp, synthetic construct
  misc_feature 1..1287: note = Description of Artificial Sequence: Synthetic coding sequence
  source 1..1287: mol_type = other DNA
atggctgagaacgacgtggataacgagctgctggactatgaggatgacgaggtggagactgccgctggcggtgacggtgccgaggctccagctaaaaaggacgtcaagggaagctacgtgtctatccactcatctggctttagagacttcttacttaagcccgagctgttgcgcgctatcgtggactgtggatttgaacaccccagtgaagtgcagcatgagtgtatcccccaggctatcctagggatggacgttttgtgccaagcgaaaagcgggatgggtaagactgctgtgtttgtactggccaccctccaacaactggagcccgtcaccggtcaggtgtctgtcctcgtgatgtgtcacactagggagctggcattccagatcagtaaggagtacgaaaggttctcaaaatacatgccaaatgtcaaggttgcagttttttttggaggcttgtccattaagaaagatgaggaggtcttgaagaaaaattgtccacacatcgtggtaggtaccccaggccgtatcctggcactggctcggaacaagagcctgaacttgaagcatattaagcattttatactggatgagtgcgacaagatgcttgagcagcttgatatgaggagagacgtacaggagatatttcggatgacacctcacgagaagcaggtgatgatgttcagcgctactctgagtaaggagattcggccagtttgtagaaaattcatgcaagaccctatggagatcttcgtagatgacgaaactaaactcactctccacgggcttcagcaatactatgtcaaactcaaggataatgagaagaaccgcaaactttttgatctactggatgtgctcgaatttaaccaggtggtcatcttcgtgaagagcgtgcagcgctgtattgccctggcacagctgctggtggagcagaacttcccggctatagccatccacaggggaatgccccaggaggaacgcctttcccggtatcaacaattcaaggactttcagagacggattttagtcgccactaatcttttcgggaggggcatggacattgagcgcgtgaatatcgcgtttaactatgacatgcctgaagactctgacacgtacttgcatagggtggcgcgtgccggtcggttcgggaccaaagggctggctattactttcgtgtccgatgaaaatgacgccaagattttaaacgacgtacaagataggttcgaggtgaatatctccgaattgcctgacgagattgacatttcctcctacatcgaacagactagatag

SEQ ID NO: 220196 - DNA, 738 bp, synthetic construct
  misc_feature 1..738: note = Description of Artificial Sequence: Synthetic coding sequence
  source 1..738: mol_type = other DNA
atgtggacgatgtcttcatggacgatgaaaatgatgaggtggaggcagcaattgggtgagatgggcctgcgcccactgccacgccgtatgtcgcgcgctcctatgagtccctccaccgctctcgcctttgtgacatcctgtagttcgcagtcctgttccgggccactcagtacagtcgcactgtcaatccggcagaaggtcgctgtattctttggaggcctgagcattaagaaggacgaagaagtccttaaaaaaaactgtccacacatcgttgtggggactccaggcaggatcctggcactcgctcgcaacaaaagcctgaaccttaaacacattaaacatttcattctggacgagtgcgacaagatgctggaacaactggacatgcggagagacgtgcaggagatcttccgaatgacgccacacgagaaacaggtgatgatgttctctgcaactctttctaaggaaatcagacctgtgtgtcggaagtttatgcaggatccaatggaaatcttcgtggacgatgagaccaaacttacactgcacggactgcagcagtactacgttaagctgaaggataatgaaaagaaccgaaaattattcgatctgctggatgtcctcgaatttaaccaggtggtcatctttgtgaagagtgtgcaacggtgcattgcgttggcccagctgcttgtggaacagaatttcccagccatagccatccaccggggtatgccccagtag

SEQ ID NO: 220197 - DNA, 696 bp, synthetic construct
  misc_feature 1..696: note = Description of Artificial Sequence: Synthetic coding sequence
  source 1..696: mol_type = other DNA
atggccgaaaatgatgtcgacaatgagctgctcgattatgaagacgacgaggtggagaccgctgccggaggcgacggtgcagaggcccctgccaagaaagatgtgaaaggctcgtatgtcagcatccactcttctggcttcagggacttcttgttaaagcctgagctgctgagggccattgtggactgtggcttcgaacacccttccgaggtccagcatgagtgcattccacaagcaatcctaggcatggacgtgttatgtcaagccaagtccggcatgggcaaaacagcagtttttgttctcgcaactctgcagcaacttgagccagtgacagggcaagtgagtgtgctcgttatgtgccatactagagaattggcttttcagatcagtaaggagtatgagagattttcaaagtacatgcctaacgtgaaagtggccgtgttttttggaggactgtcaatcaaaaaggacgaggaggtacttaaaaagaattgccctcacattgtggtgggaacgccaggcaggatccttgccttggccagaaacaagagccttaaccttaagcacattaagcattttatccttgacgagtgcgacaaaatgctggagcagctggacatgaggcgggatgtgcaggaaatcttcaggatgacaccccacgagaagcaggttatgatgttctctgcaacactctag

SEQ ID NO: 220198 - DNA, 594 bp, synthetic construct
  misc_feature 1..594: note = Description of Artificial Sequence: Synthetic coding sequence
  source 1..594: mol_type = other DNA
atggcagagaatgacgttgataacgaactgctggattacgaggatgatgaggtggagactgccgcaggaggagatggagctgaggccccagctaaaaaggatgttaaagggtcatacgtgtcaatacatagcagtggcttccgtgactttctcctcaaacctgagctgctgcgcgcaatcgtggactgtggatttgagcacccctccgaagtgcagcatgaatgcattccgcaggctatccttggtatggacgttttgtgtcaggccaaatcaggaatgggcaagactgctgtgtttgtactagccaccctccagcagctggagcccgtaaccgggcaggtgtgtttctgtgactcccacttcccccgaggcgataacgaggagttgcatctgccctacgtgtccgtgtatttcctgcccaaggtctcggtcctagtgatgtgccacacccgtgaacttgcatttcagatttccaaagagtatgaacgattctctaaatacatgcccaatgttaaagtagcagtctttttcggaggcttgtcgattaaaaaagacgaggaagttctgaaaaaaaactgcccgcatattgtctag

SEQ ID NO: 220199 - DNA, 594 bp, synthetic construct
  misc_feature 1..594: note = Description of Artificial Sequence: Synthetic coding sequence
  source 1..594: mol_type = other DNA
atggctgagaatgacgtagacaatgaactgctggattacgaagacgatgaagtagagactgcagcagggggtgatggcgcagaagcaccggctaaaaaagatgttaaagggagttatgtaagtatacactcctcggggtttcgggactttcttctgaagcctgaacttctgcgggcaatcgtggattgcggttttgagcacccgtccgaggtgcaacacgagtgtattccgcaggcgattttaggaatggatgttctgtgtcaggccaaatcagggatgggcaaaacggctgtatttgtcctcgccaccttgcagcagctggagcccgttaccggacaggtgtgtttctgcgattcccatttccccaggggcgataacgaggagctgcacctgccctatgtttcggtatatttcttacctaaggtttccgttctggtaatgtgtcatactcgggagctagcctttcagatctctaaggagtacgaaaggttctcaaaatatatgcccaacgtgaaagtcgcagttttcttcggtggtttgagcataaaaaaagacgaggaagtcctcaaaaagaattgcccccatattgtgtag

SEQ ID NO: 220200 - DNA, 540 bp, synthetic construct
  misc_feature 1..540: note = Description of Artificial Sequence: Synthetic coding sequence
  source 1..540: mol_type = other DNA
gtggccgtctttttcggcggtctttccataaagaaggatgaggaggttcttaagaaaaactgcccacatatagttgtcgggacccctggtaggattctcgcattggctcgcaataaaagcctcaatctgaagcatattaaacactttatactagatgagtgtgataagatgctggagcagctcgacatgcggagggatgtccaagagatcttcagaatgacccctcacgaaaaacaggtgatgatgttttctgcaacactgtccaaggagatccgaccagtttgccgaaagtttatgcaggatcctatggaaatatttgtggacgatgagacaaaacttacgctgcacgggctacagcagtactatgtgaagcttaaagacaatgaaaagaatcggaagctgttcgacttgctagatgttttggagtttaatcaggttgtcatcttcgtgaagagcgtccaacgctgtattgccctggcacagttgctcgttgaacagaacttcccagccatcgccatccataggggaatgccccaatag

SEQ ID NO: 220201 - DNA, 594 bp, synthetic construct
  misc_feature 1..594: note = Description of Artificial Sequence: Synthetic coding sequence
  source 1..594: mol_type = other DNA
atggctgaaaatgatgtggataatgagttgctcgactacgaggacgacgaagtcgagacggctgctggtggtgatggcgctgaggcaccagcaaagaaagatgtgaagggctcctatgtctcaatacacagttctgggttccgcgacttcctcttgaagccagaactgctgcgggctatagtggactgtggatttgaacatccctctgaggttcagcatgaatgcattccccaggcaatcttgggcatggacgtgctctgccaggctaagtccggcatgggaaaaaccgctgttttcgtgctggccactttacagcagctggagccagtgacaggccaggtgtgtttttgcgacagtcattttccacggggtgacaatgaagagctgcacttaccttacgtcagcgtttacttccttcctaaggtcagtgtgctggtcatgtgccacacacgtgaactcgcattccagatatccaaggagtacgaaagattttctaagtatatgccaaacgtgaaggttgctgtgttcttcggtggactgagtatcaagaaagatgaggaggtgctcaagaaaaattgcccgcacatcgtctag

SEQ ID NO: 220202 - DNA, 564 bp, synthetic construct
  misc_feature 1..564: note = Description of Artificial Sequence: Synthetic coding sequence
  source 1..564: mol_type = other DNA
taaagcgaggaaagggacattggcaaaccgatggagatcttcgtggatgatgagacaaaattgaccctccacggtctccagcagtactatgttaaactgaaagataatgagaagaatcgaaagttgttcgatctcttggacgtcctcgagttcaatcaggtggtgatcttcgttaaaagtgtccagagatgtattgctctggcgcagctactcgtagagcagaactttcccgcaatcgccatccaccggggtatgcctcaggaggagcggctgagtcggtatcagcagttcaaggactttcagcgcagaattttggttgccacaaaccttttcgggaggggaatggacattgaacgggtgaatatagccttcaactacgatatgcccgaggactccgatacctatctgcatagagtggccagggcaggaaggttcgggacgaaaggcctagctattactttcgtttctgacgagaacgatgccaaaattcttaacgatgtgcaggaccggtttgaagtcaatatcagtgagcttcctgacgaaatcgacatcagttcgtactag

SEQ ID NO: 220203 - DNA, 195 bp, synthetic construct
  misc_feature 1..195: note = Description of Artificial Sequence: Synthetic coding sequence
  source 1..195: mol_type = other DNA
tgagcaaccctgcagcagctggaacccgtcacgggtcaggtatccgttctggtgatgtgccatactcgagaactggcgttccagatctctaaggagtacgaacgatttagtaagtatatgccaaacgtcaaggtcgccgttttctttggtggattgtccatcaagaaggatgaagaagtcctgaagaaaaattag

SEQ ID NO: 220204 - DNA, 78 bp, synthetic construct
  misc_feature 1..78: note = Description of Artificial Sequence: Synthetic coding sequence
  source 1..78: mol_type = other DNA
tgagcaaccctccagcaacttgaacccgtaaccgggcaagtctctgtgctggtcatgtgtcacactagggaactctag

SEQ ID NO: 220205 - DNA, 66 bp, synthetic construct
  misc_feature 1..66: note = Description of Artificial Sequence: Synthetic coding sequence
  source 1..66: mol_type = other DNA
taagcgactctgcagcaacttgagccagtgactggacaggtgtcagttctagtcatgtgtcactag

SEQ ID NO: 220206 - DNA, 870 bp, synthetic construct
  misc_feature 1..870: note = Description of Artificial Sequence: Synthetic coding sequence
  source 1..870: mol_type = other DNA
atggcagaaaatgacgtggacaacgaactgcttgattatgaggatgatgaggttgagactgctgccggtggagacggtgccgaagctcctgccaagaaagatgtcaaagggagctacgtgtcgattcattcgagcggattccgggatttcctccttaagccggaactgcttcgagccattgtggactgtgggttcgagcacccatctgaggttcagcatgaatgcattccacaagctattttaggtatggacgtgctgtgccaggctaagtcggggatgggaaagactgccgtgttcgttcttgccaccctacagcagttggaacccgtgacaggacaggtaagcgtgctggtgatgtgccatacccgggaattggcgtttcaaatctctaaagagtacgagcgcttctctaaatatatgcctaacgtgaaggtcgccgtgttctttggcggactctccattaaaaaggatgaagaagttctgaagaagaattgccctcatatagtcgtaggcactccgggaaggatcctggccctagcaagaaacaagagcctgaacttaaaacatattaaacatttcatcttagatgagtgtgataagatgctagagcagctcgatatgcgccgtgatgtgcaggaaatctttcgaatgaccccccacgagaaacaggttatgatgttctccgcaaccctcagtaaagaaatacgccctgtgtgcaggaagttcatgcaggaccctatggagatctttgtagacgatgagactaagctgactctccatggtctgcagcagtactacgtcaaactgaaggacaacgaaaagaatcgtaagctcttcgacctgttggacgtgctggaatttaatcaatag

SEQ ID NO: 220207 - DNA, 711 bp, synthetic construct
  misc_feature 1..711: note = Description of Artificial Sequence: Synthetic coding sequence
  source 1..711: mol_type = other DNA
atggctgagaacgacgttgacaatgagctgttggactatgaggacgacgaggtggagactgccgctggtggcgatggggcagaagcacccgctaagaaagatgtgaagggttcatacgtcagcatacacagctcaggtttcagggacttcctccttaagccagagctccttcgtgccattgtggattgcggattcgagcacccatctgaagtgcagcacgaatgcatacctcaagctatcttaggaatggatgtgctatgccaagcaaaatccggaatggggaagactgccgtttttgtccttgccaccctccagcagcttgaacccgtcacaggccaagtgagcgtgctggtgatgtgccatacgcgcgaactggcattccagatctccaaagagtacgagaggtttagcaaatatatgcccaacgtgaaagttgccgttttcttcggcggactgtccattaagaaagacgaagaggtactgaaaaagaactgtcctcatattgtagtgggaaccccgggacgaattctcgccttagctcggaacaaaagcctgaatctgaaacacatcaaacactttatcttggatgagtgcgataaaatgctggagcagctcgatatgaggcgtgacgtgcaggagatatttaggatgacaccacatgagaagcaggtgatgatgttttcagcaacattgtccaaggaaatccgttag

SEQ ID NO: 220208 - DNA, 711 bp, synthetic construct
  misc_feature 1..711: note = Description of Artificial Sequence: Synthetic coding sequence
  source 1..711: mol_type = other DNA
atggcagaaaatgacgtcgacaatgagttgctggactatgaggatgacgaggttgagacagctgccggaggtgatggagcagaggcacctgctaagaaagatgtaaagggcagttatgtgtcaattcactcgtctgggttccgggatttcctgctgaaaccagagctactcagagcaatcgtggattgtgggtttgagcatccgtccgaggtgcagcatgagtgcattccacaagcaatcctcggcatggatgtgctgtgccaggctaagtccgggatgggaaagacagctgttttcgtgctggccactttacagcagctagaacctgtgacaggacaggtttccgtccttgtaatgtgtcacacccgtgagctcgcattccaaatttcaaaagaatacgaacgtttttctaagtacatgcccaatgtgaaagtggctgtgttctttggagggttatctatcaaaaaagacgaggaggtgctgaagaagaattgtcctcatatcgttgtgggcacacccggtcggatcctggcactggcccgaaacaagtctctgaacctgaaacacatcaaacatttcatcctggatgaatgtgataaaatgctggaacagctggatatgcgaagagatgttcaagaaatctttaggatgacgccccacgagaaacaggtgatgatgttctctgccacactgagcaaagaaatcaggtag

SEQ ID NO: 220209 - DNA, 978 bp, synthetic construct
  misc_feature 1..978: note = Description of Artificial Sequence: Synthetic coding sequence
  source 1..978: mol_type = other DNA
tgagccacactgcagcagctcgaaccggtgacaggccaggtgtctgtgctggtcatgtgccacactcgggagctggcttttcagattagtaaggaatatgagagatttagtaaatatatgcccaacgtgaaagtagccgtgtttttcggtggcctgagtattaaaaaggacgaggaagtgctcaagaaaaactgcccacacatcgtggtgggcacccccggacgaattctggccctagcacggaataagagtcttaatctgaaacacattaagcactttattctcgacgagtgcgataagatgctggagcaactggacatgcggagagacgttcaggagattttcagaatgaccccccatgaaaagcaagtgatgatgttctccgccaccctgtccaaggaaatcagacctgtgtgtaggaagtttatgcaggatccgatggagatcttcgttgatgatgaaaccaagttaactctgcacggcttgcagcagtactatgtcaaactgaaggacaacgaaaagaaccgaaaactcttcgatctactcgatgtgctagaattcaatcaggtcgttatttttgtcaagagcgtccagaggtgtatcgcactagcccaactgctggtcgaacagaatttccccgcaatagccatccaccggggaatgccacaggaggaacgcttgtctcgctaccagcaatttaaggactttcagcgacgcattctggtggccactaatctatttggacgtggtatggatattgagcgagttaacatcgctttcaattatgatatgccagaggactctgacacctaccttcatcgttgctacccactgagccctagtagatggccagaacaggccggactcgcccctagggcctggctgagccacctttgccctatgcgtatgatgcccaggtcaagtatgatgtgtcggatcgccctacggtccatccttgtctcttgtttgatgcgatag

SEQ ID NO: 220210 - DNA, 717 bp, synthetic construct
  misc_feature 1..717: note = Description of Artificial Sequence: Synthetic coding sequence
  source 1..717: mol_type = other DNA
atggctgagaatgatgtagataacgagctgttggattatgaagatgacgaggtggaaacagccgctgggggtgacggagcagaagcccctgcaaaaaaagacgttaagggaagctacgtgagtatccattcgagcggctttagggattttctgctgaagcccgagttactgcgggctatcgtcgattgtggcttcgagcacccttcagaagtccaacacgagtgtatcccgcaggcaatcctcgggatggacgtattgtgtcaagccaagagtggtatgggaaagactgctgtcttcgttctggctactttgcagcagctggaacctgtgactggtcaagtgtccgtccttgtaatgtgtcacactcgggagctggcttttcaaatctcgaaagagtatgagaggttttccaagtatatgcctaacgtcaaggtcgctgtgttcttcggcggtcttagcatcaaaaaggacgaagaggtgctgaagaaaaattgtcctcatatagtcgtaggcactcctgggaggatactggccctggccaggaataagtctcttaatctcaaacatatcaaacactttatcctcgatgagtgcgacaagatgttagagcagttagacatgagacgtgatgtacaagaaatctttagaatgactccccatgagaagcaggtcatgatgttctcagccacgctatctaaggagatcagaccagtttag

SEQ ID NO: 220211 - DNA, 717 bp, synthetic construct
  misc_feature 1..717: note = Description of Artificial Sequence: Synthetic coding sequence
  source 1..717: mol_type = other DNA
atggccgaaaacgatgttgacaatgagctgctcgattacgaggacgacgaagtggagaccgcagctggaggcgatggtgcagaggctcctgcgaaaaaggatgtgaaaggcagctacgtgagcattcatagcagcggttttagggatttcttgttgaaacctgaactgctccgggctatcgtcgattgcgggtttgaacacccctccgaagtacaacatgagtgtattccacaagccatcctgggaatggacgtactgtgccaggcaaagagcggtatggggaaaaccgccgtcttcgtactggctactctgcagcagttggagcctgtgaccggacaggtgagcgtgttggttatgtgccacacacgagaattggcgttccagatctcaaaggagtatgaacgcttttcaaagtacatgcccaatgttaaagtggcggtgttttttgggggtctatcgattaaaaaagacgaggaggtgctgaaaaagaactgcccacacattgtagttggtacacctgggcgtatactcgcactggcgaggaataagagcctgaatctgaaacacatcaagcattttatcctcgatgagtgcgataagatgttagagcaactcgacatgcgtagggacgtacaggaaatctttaggatgacccctcacgagaagcaggtgatgatgttttcagccaccctcagtaaggaaattaggcccgtctag

SEQ ID NO: 220212 - DNA, 870 bp, synthetic construct
  misc_feature 1..870: note = Description of Artificial Sequence: Synthetic coding sequence
  source 1..870: mol_type = other DNA
atggccgagaacgatgttgataacgaactgctcgattatgaggacgatgaggtcgaaacagccgcaggaggcgacggggctgaagctccagccaaaaaagacgtaaaaggctcgtacgtgagcatccactcttcaggcttccgggactttctgcttaaacccgaactgcttcgcgcaatcgtcgactgcgggttcgaacacccatcggaggtacagcatgagtgtatccctcaggccatattgggaatggacgtgctatgtcaggctaaatcaggcatgggaaagacagctgtgttcgttctggcaactcttcagcagcttgaacccgtcaccggccaagtctctgtactggtgatgtgccacacccgcgaactagcatttcaaatttccaaagagtacgaacgctttagtaagtatatgcctaacgtaaaagttgccgtgttcttcgggggactgagcataaaaaaggacgaagaggtcttaaaaaagaactgcccccatatagtggttggaacccctggccgaatccttgcgctggccaggaataagtctctcaatctcaaacacattaagcactttatcctcgatgagtgtgataagatgttggaacagttagatatgcggagggacgtacaggaaattttcaggatgactccccacgaaaaacaggtaatgatgttttccgccaccctttcaaaggagattagacccgtctgtaggaagtttatgcaagaccctatggagattttcgtcgacgacgaaaccaagcttacactccacggtttgcagcagtattatgtcaagcttaaggacaacgagaaaaaccggaagctattcgacctgcttgacgttctggagtttaaccagtag

SEQ ID NO: 220213 - DNA, 1278 bp, synthetic construct
  misc_feature 1..1278: note = Description of Artificial Sequence: Synthetic coding sequence
  source 1..1278: mol_type = other DNA
atggctgagaacgatgtcgacaacgagttactggactacgaagatgacgaggtggaaaccgctgctggtggggatggagcagaagctcctgccaagaaggatgtgaaggggtcatacgtttcaattcacagttctggattccgggacttcctgctgaagcccgagttacttcgggctattgtggactgcggcttcgaacatccttctgaggtgcagcacgaatgcatcccgcaggcaatcttgggtatggacgtgctctgccaagccaaatcgggaatgggcaaaacggctgtattcgttttggcaaccctgcaacagctcgagcctgttaccggacaggtttccgtactggttatgtgccatacaagagaattggcctttcaaatctcaaaggaatacgagcgcttcagcaaatacatgccaaacgttaaggtggctgtgtttttcggagggctgtctataaaaaaagacgaggaggtgctgaagaagaactgccctcacattgtagtgggaacccctgggagaatccttgccctagcgagaaataaatctctcaacctgaagcatatcaagcactttattctggatgaatgtgacaaaatgcttgagcagctggacatgaggcgggacgtccaggaaatcttccgaatgaccccccatgagaaacaggtgatgatgtttagcgccaccctttccaaagagatcaggccagtctgtcggaaattcatgcaggatcccatggagatctttgtagacgacgagaccaaactaaccctgcacggactccaacagtattacgtgaagctcaaggacaacgaaaagaatcggaagctgtttgacctactggacgtcctcgagttcaaccaggtggtcatcttcgtgaaatccgtccagcgctgtatcgccctggctcagctcctagtcgagcagaattttccggcaattgccatccatcgaggaatgccacaagaagaaaggctttcacggtatcagcagttcaaggacttccagcgcaggatattggtagccaccaacctctttggcaggggtatggacatcgagcgggtaaatattgcattcaattacgatatgcccgaagactccgacacatatctgcaccgttgctatccactctctcctagcaggtggccagagcaggctggcttggcccctcgcgcttggctaagccacctgtgtcccatgcgcatgatgccacggtcctctatgatgtgccgaatcgccttacgttccatactggtcagctgcctgatgcggtag

SEQ ID NO: 220214 - DNA, 411 bp, synthetic construct
  misc_feature 1..411: note = Description of Artificial Sequence: Synthetic coding sequence
  source 1..411: mol_type = other DNA
atgggagggggtagaagaccctatgatgtcttcttttcaaaggtgatggccgaaaacgatgtggataacgagttgttagactacgaggacgacgaggtggagacagccgctggtggcgatggcgcagaggcaccagccaaaaaagacgtgaaaggctcatacgtctctattcactcatctggattccgggacttcctcctgaagcccgaattgttacgagcgatcgtagattgcgggtttgaacacccgtctgaagtgcagcacgagtgtatacctcaagcaattttagggatggatgtactttgccaagctaaaagtgggatgggcaagaccgccgtgttcgtacttgccaccctgcaacagctggagccagtgactggacaagtctctgtgctggtgatgtgtcactag

SEQ ID NO: 220215 - DNA, 564 bp, synthetic construct
  misc_feature 1..564: note = Description of Artificial Sequence: Synthetic coding sequence
  source 1..564: mol_type = other DNA
atgggcagtagccacattggcggtctgtctattaacgagagaaggtgttctgcctcactaggactggtaatggcagagaacgacgtggataacgaactccttgattacgaggatgatgaggtggaaactgctgctggcggagatggagctgaggctcctgcaaagaaagacgtgaaaggaagttacgtgtccattcactcctctggtttcagagatttcctgctgaagccagaactgttgcgagcgatcgtagattgcggattcgagcatccctcggaagtgcagcatgaatgtatcccccaggccatcctgggcatggatgtcctgtgccaggccaaatcggggatgggcaagacggccgtgtttgtgctcgcaactttacagcagctggagcctgttactggtcaagtgtctgttctggtgatgtgtcatactcgggagttagcattccagatttccaaagagtacgaacggttctcaaaatatatgccgaacgttaaggtcgcagtgttttttggaggcttgtctatcaagaaggatgaggaggtcctgaagaagaattag

SEQ ID NO: 220216 - DNA, 399 bp, synthetic construct
  misc_feature 1..399: note = Description of Artificial Sequence: Synthetic coding sequence
  source 1..399: mol_type = other DNA
atggctgaaaacgacgttgataacgagctgctggattacgaggatgacgaagtggaaactgcagccggaggggacggagcggaggcccctgcgaagaaggacgttaaggggagttatgtaagcattcactcatctggctttagagacttccttctgaaacccgagctgcttagggccatagtggactgtggtttcgaacacccatcagaagtgcaacacgagtgcatcccgcaggccattctcgggatggatgtcttgtgccaggctaagtcagggatgggtaaaaccgcagttttcgtcttggccacgctgcaacagcttgagcccgtgacgggacaggtgtgtttttgcgatagtcacttccctcgcggagacaatgaagaactgcatctcccctag

SEQ ID NO: 220217 - DNA, 870 bp, synthetic construct
  misc_feature 1..870: note = Description of Artificial Sequence: Synthetic coding sequence
  source 1..870: mol_type = other DNA
atggctgaaaatgatgttgacaatgagttactcgactatgaggatgatgaggttgagacagctgccggaggcgacggagcagaagcgcctgcgaagaaagatgtgaaaggcagctatgtatccatacattcttcagggtttagggatttcttactgaaaccagaacttctcagagctatagtggattgcgggtttgagcatcctagtgaagtgcagcacgaatgcatcccccaggccattcttggcatggacgtgctgtgtcaggcaaaaagcggcatgggcaagactgccgtttttgtcctagctaccttgcagcaattggagccggtgaccggtcaggtttcagtgctcgttatgtgtcacacccgcgagctggctttccagatctctaaagaatatgagaggttttcgaaatatatgccaaatgtcaaggtggccgtgttttttggaggcctcagtatcaaaaaggacgaggaggtgctaaaaaaaaactgccctcatattgtggtgggaacacctggccgaattctggcactggccaggaataaatctctcaatcttaagcatattaaacattttatcctggatgagtgtgataagatgttggagcagcttgatatgagacgcgatgtacaagaaatcttccgtatgaccccgcatgagaaacaggtcatgatgtttagcgcaacgctgtcaaaggagatcaggcccgtctgtaggaaattcatgcaagatcctatggagatcttcgtcgacgacgagacaaaactgacactgcacggactgcaacagtattatgtgaaattgaaggataacgagaagaatcgcaaactttttgatctgcttgatgtattggagttcaatcagtag

SEQ ID NO: 220218 - DNA, 1287 bp, synthetic construct
  misc_feature 1..1287: note = Description of Artificial Sequence: Synthetic coding sequence
  source 1..1287: mol_type = other DNA
atggctgaaaatgacgttgacaacgaactcctggactatgaggacgacgaagtggaaactgctgctgggggtgacggtgcagaagccccagccaagaaggacgttaaaggttcgtatgtcagtattcattcgagtggtttcagggactttctgctgaagccagagctgctgcgggcaatcgtggattgtggcttcgaacatcctagcgaggttcagcacgagtgtattcctcaagcaatcttaggcatggacgttctttgtcaggctaagtctggaatggggaagacagctgtgttcgtcctggccacattgcagcagctggagcctgtaacaggccaggtctccgtcctggtgatgtgtcacacaagggagctggcatttcaaatcagcaaggagtacgagcgatttagcaaatatatgcccaatgtgaaggtcgctgtttttttcggcggtctctccatcaagaaggatgaagaggtgctgaagaaaaactgtccccacattgtggttggcactcccggacggatactcgctctcgcgagaaacaaaagccttaacttgaagcacataaagcactttatcctagacgaatgtgataaaatgctagagcagctggatatgcgtcgggacgtgcaggagattttcagaatgactccccatgaaaagcaggtgatgatgttcagcgccaccctttctaaggagattcgacccgtatgtaggaaatttatgcaggaccccatggaaattttcgtggacgatgagaccaaactaacccttcatggcttacagcagtattatgtgaagctcaaggacaacgagaaaaacagaaagctgttcgacctcctcgatgtgctggaattcaatcaggttgttatctttgtaaaaagtgttcagcggtgcatcgcactggcccaactactggtcgaacagaacttcccagccatcgccatccatcgcggaatgccacaggaggagcgcttatctaggtatcagcagttcaaggatttccaacggaggattttggtggctactaatctttttgggaggggcatggatatcgagagagtgaatatcgcatttaattacgacatgcctgaggatagcgatacttacctccacagagtcgcaagagcgggacgatttggaactaagggcctggcaatcactttcgtgtccgatgagaacgatgccaaaatcctgaacgatgtgcaggatagattcgaagtcaacattagtgagctgcccgatgagatcgatatctcttcgtatattgagcaaaccagatag

SEQ ID NO: 220219 - DNA, 564 bp, synthetic construct
  misc_feature 1..564: note = Description of Artificial Sequence: Synthetic coding sequence
  source 1..564: mol_type = other DNA
atgggctcatcgcacattggcggattgtccatcaatgagaggagatgtagcgcctcactgggactggtgatggcggaaaacgacgtcgataatgagctgctggactacgaggacgatgaggttgagacagctgccggtggcgatggggcagaagcacccgctaagaaagacgtgaaagggtcttacgtttctatccacagctccggctttagagattttctcctgaagcctgagctcttgagagccatcgtggattgtgggtttgagcaccccagtgaagtgcagcacgagtgcataccacaagctatcctgggtatggatgtgttgtgtcaggccaagtcaggaatgggcaagaccgccgtatttgtgctggccactttacaacagctggaaccagttaccgggcaggtttcagtactggtcatgtgtcacactcgagagttggcctttcagattagtaaagaatatgagaggttttcgaagtatatgccgaatgtgaaggtcgccgtgtttttcggaggtctatctatcaagaaagatgaagaggtcctgaaaaaaaactag

SEQ ID NO: 220220 - DNA, 291 bp, synthetic construct
  misc_feature 1..291: note = Description of Artificial Sequence: Synthetic coding sequence
  source 1..291: mol_type = other DNA
atggccgaaaatgatgtggacaacgagctcttagactatgaggatgatgaagtggaaaccgccgcaggaggtgatggtgccgaggcacccgctaagaaagatgtgaaaggttcatatgttagcattcattcctcaggatttcgggattttctgctgaagccagagttactcagagccatcgtcgactgtggcttcgagcatcccagtgaagtgcagcatgaatgtattcctcaggccatcctaggcatggatgtgctgtgccaggctaagagtggcatgggaaaaacttag

SEQ ID NO: 220221 - DNA, 564 bp, synthetic construct
  misc_feature 1..564: note = Description of Artificial Sequence: Synthetic coding sequence
  source 1..564: mol_type = other DNA
atgggctcctcacatatcggtggtctgtctataaacgagcgacgttgcagcgcatcccttggtttagtgatggccgagaatgacgtggataacgaactgctcgactatgaggatgacgaggtcgagacagccgctggtggagacggagctgaggcacctgccaagaaggatgtcaagggaagttacgtgtcaattcacagctctgggtttagggacttcctgctaaagccagaactgctcagagccatcgtggattgcgggtttgaacacccctctgaagtgcagcacgagtgtattcctcaagcaatcctgggcatggatgtcctttgccaggccaagtcaggcatgggcaagaccgcagtctttgtgctcgcaacgctgcagcagctggagccagtaacaggccaagtttccgtgttagtcatgtgccacacccgggagcttgctttccagatcagtaaagagtacgaacggttctcgaaatatatgcctaacgtgaaagtggctgtcttcttcggaggcctgagtataaagaaggacgaagaagttctgaaaaagaactag

SEQ ID NO: 220222 - DNA, 594 bp, synthetic construct
  misc_feature 1..594: note = Description of Artificial Sequence: Synthetic coding sequence
  source 1..594: mol_type = other DNA
atggctgaaaatgacgtggacaatgaactgctggactacgaggacgacgaggtggaaaccgctgcaggaggagatggagccgaagcccctgctaaaaaggatgtcaaaggtagttatgtgtctatccactctagtggattcagagatttccttcttaagccagaactgctccgagccattgtcgactgcggattcgaacatccgtctgaggtacaacacgagtgtatccctcaggcaattctcggaatggacgtcctctgtcaggcaaaatccggaatgggtaagactgccgtgttcgtgcttgccacactacagcaactggagccagtaacaggtcaggtatgtttctgcgattcccactttcccagaggggataacgaagagttgcaccttccctacgtgagcgtttacttcctgcccaaggttagtgtgctcgttatgtgccataccagagagcttgcctttcaaatctccaaggaatatgagagattcagcaaatatatgccaaacgttaaggtcgctgtgttctttggaggcctgtcaatcaagaaggatgaagaggttctgaagaaaaattgtccccacattgtttag

SEQ ID NO: 220223 - DNA, 291 bp, synthetic construct
  misc_feature 1..291: note = Description of Artificial Sequence: Synthetic coding sequence
  source 1..291: mol_type = other DNA
atggcagagaacgacgtagacaatgaacttctcgattatgaggacgatgaggtagagaccgccgcaggcggtgacggtgcagaagcccctgccaagaaagacgttaagggatcctatgtctccattcactccagcgggtttagggatttcctgcttaaacctgaactcttaagagccatagtggactgcggatttgagcacccaagtgaagtgcaacatgagtgcattcctcaggctattctcggaatggacgtactgtgccaggctaaaagcggcatgggtaaaacatag

SEQ ID NO: 220224 - DNA, 696 bp, synthetic construct
  misc_feature 1..696: note = Description of Artificial Sequence: Synthetic coding sequence
  source 1..696: mol_type = other DNA
atggcagaaaacgacgtggataatgaattattggactacgaagatgacgaggtggaaaccgccgcagggggagatggggcagaagcgccagcgaagaaggacgttaaagggagctacgtgtcaatccattccagcggattcagagactttctcctaaaacctgaactcttgagggctatcgtggactgtggtttcgagcatccctccgaggttcagcatgaatgcattccacaggccatactggggatggatgtcctttgccaggccaagagtggcatggggaaaacggccgtgttcgtgttggctactctgcagcagttggagcccgtaaccgggcaagtcagcgttctcgtgatgtgccacactcgggaactggcctttcagatctccaaggaatatgaacggttttcaaaatacatgcctaacgttaaggtggcggtgtttttcggagggctgagcatcaagaaggatgaggaagttctaaagaagaactgccctcatattgtggttgggacgccagggaggatcctggctcttgcacgaaataagagcttaaacctgaaacacatcaaacactttatattggacgagtgtgacaagatgctagaacaactcgacatgcgtcgcgatgttcaggagatttttaggatgacacctcatgagaaacaggtcatgatgttctccgctaccttatag

SEQ ID NO: 220225 - DNA, 696 bp, synthetic construct
  misc_feature 1..696: note = Description of Artificial Sequence: Synthetic coding sequence
  source 1..696: mol_type = other DNA
atggcagagaatgatgtcgataatgagctgctggattacgaagacgatgaggtcgaaacggccgcaggcggagatggggcagaagcaccagctaagaaggacgtgaaaggtagctacgtgagcattcacagcagcggcttcagagactttctgctgaaacccgagcttctaagagcaatcgttgattgcgggtttgaacacccttccgaggtccaacatgaatgtattccccaagccatcttgggcatggatgtgctgtgtcaagctaaatctgggatggggaaaacagctgttttcgttttggccacactacagcagctggagccagtcacaggccaggtcagcgtgcttgtgatgtgccatacccgggaactggcatttcagatctctaaggagtacgagcggttcagcaagtacatgccaaatgtaaaggtagctgttttcttcgggggactgagcattaagaaggatgaagaggtactcaagaaaaactgtcctcacatagtggttggcacgcccggtagaatcctcgccttagcaaggaacaaaagccttaacctgaaacacattaaacacttcattcttgacgaatgtgacaaaatgctggagcagctggacatgcgcagagatgtgcaggagatttttcggatgactcctcacgaaaagcaggtgatgatgtttagcgcaacgctctag

SEQ ID NO: 220226 - DNA, 717 bp, synthetic construct
  misc_feature 1..717: note = Description of Artificial Sequence: Synthetic coding sequence
  source 1..717: mol_type = other DNA
atggctgagaatgacgtagataatgagctactcgactatgaggacgacgaggtagaaacggcggctgggggagatggagccgaggcaccagccaagaaggatgtgaaaggatcatacgtgtcaatccattcttcaggctttcgggattttctgttaaagccagagttgctcagagccatcgtggactgcggtttcgagcatccatccgaggtgcaacacgagtgtatcccccaggcaatcttaggcatggatgtactgtgtcaggccaagtcaggtatgggaaagacagccgtctttgtgctggcgactctacagcagctggagcccgtgacggggcaagtgtctgtgctagtaatgtgccacactcgggaactggcctttcagatctccaaggagtatgaaaggttctctaagtacatgcccaatgtgaaagtggccgtgttctttggcggtctcagtattaagaaagatgaggaggtgctgaagaagaattgcccgcacattgtggtcggcacaccaggcaggatattggctcttgcaagaaacaagagcctgaatctgaaacatataaaacatttcatcctggatgagtgcgacaagatgctggaacaactcgacatgagaagagacgtccaagagatctttcgcatgacaccacatgagaagcaagtgatgatgttctcggctactttgagcaaggagatacgcccagtgtag

SEQ ID NO: 220227 - DNA, 1287 bp, synthetic construct
  misc_feature 1..1287: note = Description of Artificial Sequence: Synthetic coding sequence
  source 1..1287: mol_type = other DNA
atggccgaaaatgacgtagataacgaattgctggactacgaagacgacgaggtcgagacggccgctggcggtgacggggcagaggctcccgctaaaaaggacgtcaaggggtcttatgtatccatacacagctccggctttcgggactttctgttgaagcctgaattactgcgcgcaatagtggattgcgggttcgagcatccctccgaggtccagcatgagtgcatcccgcaggccatcctgggcatggatgtgctgtgtcaggcaaaaagcggaatgggaaaaacagccgtgtttgtccttgccacactgcagcaattggagcctgtgacaggccaggtgagtgtgcttgtcatgtgtcatactcgagagctggcctttcaaatcagcaaggaatatgagcggttcagcaaatatatgcctaacgtgaaggtggccgtgttttttggtgggctctcaattaaaaaagacgaggaggtcctgaaaaaaaattgtccacatattgtcgtgggcacaccagggcgaatcctggcactggccagaaataagtccttgaacttgaagcacataaaacacttcatcctggatgagtgcgataagatgctggaacagctggatatgcgaagagacgtgcaagagatctttcgaatgaccccccatgagaaacaagtgatgatgttctccgctacactgtccaaagagattaggcctgtctgtagaaagtttatgcaggatcctatggagattttcgtcgacgatgagaccaagctaaccctccacggcctacagcagtactatgtcaagctcaaggacaacgaaaagaaccgcaagttattcgatcttctggatgtactggagtttaaccaagtcgttattttcgtcaagtccgtgcaacgatgtattgctctggcccagctgctggtggagcaaaattttcccgcaatcgctatccacagaggcatgccacaggaggagagattaagccggtatcagcagttcaaagactttcaacgcagaatcctggttgccacaaatctgttcggccgtggcatggatatcgaacgggtaaatattgcctttaattatgatatgcccgaggatagtgatacctacttgcatcgagtggcccgagccggaaggttcggaacgaaaggcctggccattacattcgtgtccgacgagaacgacgccaaaatactgaatgatgtgcaagacagattcgaagttaacatatctgagctgcctgatgaaattgatatcagtagctacatcgagcagacgcgttag

SEQ ID NO: 220228 - DNA, 564 bp, synthetic construct
  misc_feature 1..564: note = Description of Artificial Sequence: Synthetic coding sequence
  source 1..564: mol_type = other DNA
tagtcggaggaacgggacattgggaagcccatggagatatttgttgacgacgagacaaaactaactctacatggcctgcaacagtattatgtcaagttgaaagacaatgagaagaatcgtaaactgtttgatcttctggacgtcttagagtttaatcaggttgtcatttttgtaaagtccgtgcagcgatgcatcgcattggctcagctcctcgttgaacaaaactttccagctatagccattcatagagggatgccccaggaggagcgattgtccaggtatcaacagttcaaagactttcagagaaggatcctcgtggctactaacctgtttggacgcggaatggacatcgaacgagtaaatatcgcatttaattacgacatgcccgaggattcagacacatacttacaccgggttgcccgagcaggcaggtttggcacaaaggggctcgccatcacgttcgtatctgacgagaatgacgcaaaaattttgaatgacgtccaggatcgcttcgaggtgaacataagtgagctgccggacgaaattgacatttcctcttactag

SEQ ID NO: 220229 - DNA, 564 bp, synthetic construct
  misc_feature 1..564: note = Description of Artificial Sequence: Synthetic coding sequence
  source 1..564: mol_type = other DNA
atgggcagttcacacattgggggattaagcatcaatgaacggcgttgttccgcatcactgggcctggtaatggcagagaatgacgtggacaatgaactgttggattatgaagacgatgaagtggaaactgctgccggtggggacggtgcagaggcccctgccaagaaggatgtcaaggggtcttacgtttctatacactcctccggctttcgggactttttgctgaagccggagctgctcagggccattgtagattgcggcttcgagcatccaagcgaagttcagcacgagtgtatacctcaggccatacttggaatggatgttctctgccaggccaagtcaggtatgggaaagaccgctgtttttgtgcttgccacacttcagcaactagagccagtgaccggtcaggtgagcgttctggtcatgtgtcatactcgggaactcgcctttcagatcagcaaggaatacgaaagattcagcaagtatatgcctaatgttaaggtggctgtgttcttcggagggctctcaatcaagaaggatgaggaagttctgaagaaaaattag

SEQ ID NO: 220230 - DNA, 717 bp, synthetic construct
  misc_feature 1..717: note = Description of Artificial Sequence: Synthetic coding sequence
  source 1..717: mol_type = other DNA
atggcagagaacgatgtcgacaatgaactgctggattacgaggacgatgaagtggagacagccgctggaggagatggtgcagaggctcccgctaaaaaagatgtgaaaggcagctatgtcagcatacacagctctgggtttagagacttcctgttaaagcctgagctgcttcgcgcaatcgtggattgcgggtttgaacacccatccgaagttcagcatgagtgcatcccacaggccattctcggcatggacgtcctctgccaggccaaatcaggcatgggtaaaaccgctgtcttcgtgttagccacgttgcaacagctcgagcccgtcacaggccaggtaagcgtacttgtcatgtgtcacacacgagagctggcattccagattagtaaggagtacgagaggtttagcaagtacatgccgaatgtgaaggtagcagtgtttttcggcggtttgtccattaagaaagacgaagaggtgctgaagaaaaactgtccccatattgtagtgggcacacctggacgcattctcgcattagcacggaacaagagcctgaatcttaaacacattaaacactttatcctggacgagtgtgacaaaatgttggagcaattggatatgcggagggatgtacaggagatttttcgcatgacaccgcatgagaaacaagttatgatgttctccgcaactctttctaaggagatccgaccagtgtag

SEQ ID NO: 220231 - DNA, 738 bp, synthetic construct
  misc_feature 1..738: note = Description of Artificial Sequence: Synthetic coding sequence
  source 1..738: mol_type = other DNA
atgtggacaatgagctcctggaccatgaagatgatgcgttggcgccaacaacttggcgaaatgggcctacgacctctgccgagacgaatgagtagggcccctatgtctccgtcaacggccctggctttcgtgactagctgcagttcccagtcttgctccggacctctgtcgacagtggccctgtccattcgccaaaaggtggccgttttttttggcggtttgtccattaagaaggacgaggaggttctcaaaaagaattgtccacatattgtcgtgggcaccccgggtaggatcctcgccctcgcacggaataagagcctgaacttgaaacacatcaagcacttcatcctggacgaatgcgacaaaatgttggaacagttggatatgcgaagagatgtacaggagatcttccggatgactccccatgaaaaacaggtgatgatgttttcagccaccctgtccaaggaaatacgccctgtctgcagaaaatttatgcaggatcccatggaaatctttgtcgatgatgagactaagctcacactccatggcctccagcagtactacgtgaaactaaaggacaatgagaaaaatcggaagctattcgatttgctcgacgtgcttgaatttaatcaggtggtaatctttgtgaagtctgtccaaagatgcattgcgctggcccagttgctggtggagcaaaatttccccgcaatcgccatccatcgaggaatgcctcaatag

SEQ ID NO: 220232 - DNA, 1278 bp, synthetic construct
  misc_feature 1..1278: note = Description of Artificial Sequence: Synthetic coding sequence
  source 1..1278: mol_type = other DNA
atggcagagaacgacgttgacaatgaactgctggattatgaggacgatgaggtcgaaactgctgcagggggagacggagccgaagcacccgcaaagaaggatgtgaaggggtcttatgtaagtattcattcatcaggattccgtgatttcctactaaaacccgagctgctgagagctatcgttgactgtggcttcgaacatccctctgaagtgcagcatgaatgcatcccccaggctatcctgggcatggacgtgctctgccaagcaaagtctggaatgggaaagaccgccgtgtttgtcctcgccactctgcaacagctcgagcccgtgaccggccaagtgtccgtccttgtgatgtgtcacacgcgagaactcgcttttcagatttccaaagaatatgagagattcagcaaatatatgccaaatgtcaaagtggccgtgttcttcggcggtttgagcattaaaaaagatgaagaggtgcttaaaaagaattgtccccatatagtcgtgggcacccccggacgaattctcgccctggcacgcaataaatccctgaaccttaaacacataaagcactttattttggacgagtgcgacaagatgctcgagcaactcgacatgcgaagggatgttcaggagatcttcagaatgacaccccacgagaagcaggtcatgatgtttagcgcaacactgtccaaggagattcggcctgtctgccggaaattcatgcaggatccaatggagatcttcgtggatgacgagaccaaactgacacttcatggcctgcagcaatactatgtgaagctcaaggataacgaaaagaaccggaaacttttcgatctgctggatgttctggaattcaaccaggtggtaatattcgttaagagtgtacaaagatgcatcgcactcgctcaactcttagtggaacagaacttccctgcgatcgccatacatcgtggtatgccacaggaggaaaggctgagccggtaccagcagtttaaggatttccagagacgcattcttgtcgcaaccaacttgttcggcagggggatggacatcgaaagagtgaacatcgccttcaactatgacatgcctgaagattctgatacttacttacatcgctgctaccccctgtctccctcacgatggcctgaacaagcagggctggcccctcgtgcttggctctctcatctgtgtcccatgaggatgatgccacgttcctctatgatgtgtaggattgcactccggtccatcctggtcagctgcctcatgcgctag

SEQ ID NO: 220233 - DNA, 711 bp, synthetic construct
  misc_feature 1..711: note = Description of Artificial Sequence: Synthetic coding sequence
  source 1..711: mol_type = other DNA
atggccgaaaatgacgtggataacgagctgctcgattatgaggacgacgaagttgaaacagctgccggtggagatggagccgaagctccggctaaaaaggatgtcaagggcagttatgtgtcgatacatagctcaggttttagggactttctgttgaaaccagagctgctgagggcaattgtcgactgcgggtttgagcatccctctgaggttcagcatgaatgtattccgcaggccatactgggcatggacgtgttatgccaggctaagtctggcatgggtaaaacagccgtatttgtgcttgcgaccctccagcaactggagcccgtgacaggccaagtgagcgtactggtgatgtgtcacactcgcgagttagcctttcaaattagcaaggagtatgagcgcttctcaaaatacatgcccaatgtgaaggtggccgttttctttggaggactctccatcaaaaaagatgaggaagtgcttaagaaaaattgtccacatattgtggtcggaactccagggaggatcctagctcttgcaaggaataaaagcttaaacctgaagcacattaagcactttattctcgatgagtgcgataagatgttggagcagttggacatgagaagagacgttcaagaaatctttagaatgaccccacacgagaagcaggtgatgatgttcagcgcgacgctcagcaaggaaataaggtag

SEQ ID NO: 220234 - DNA, 738 bp, synthetic construct
  misc_feature 1..738: note = Description of Artificial Sequence: Synthetic coding sequence
  source 1..738: mol_type = other DNA
atgtggacgatgagtagctggacaatgaagatgatgcggtggagacagcaactgggggaaatgggcttacgaccgctcccgaggcgtatgtctcgtgctcccatgtcccctagtaccgccttggccttcgtcaccagttgtagtagtcagtcttgcagcggcccactttctaccgtagcactgtcaatccgccaaaaggttgccgttttctttggtgggctctcaatcaagaaagacgaggaggtgctgaagaagaactgcccacacattgtggtggggaccccaggcaggattctcgcactcgccaggaataaaagtctgaacctcaagcacattaaacacttcattctggatgagtgcgacaaaatgcttgagcagctggacatgcgcagagatgtgcaagagatatttaggatgacaccacatgagaaacaggtcatgatgttttcggcgaccttgtcaaaagaaattcgccctgtttgcaggaaattcatgcaggacccaatggagattttcgtcgacgatgaaacgaaacttacactccacggcttgcagcaatactacgtgaagctgaaggacaatgagaaaaatcgcaagctgtttgacctccttgatgtcctggagttcaatcaggttgtgatcttcgtgaagtcagtacagaggtgtatagctttagctcagcttttggtggagcagaattttcctgcaatcgcaattcacagaggaatgccacagtag

SEQ ID NO: 220235 - DNA, 1287 bp, synthetic construct
  misc_feature 1..1287: note = Description of Artificial Sequence: Synthetic coding sequence
  source 1..1287: mol_type = other DNA
atggccgagaatgatgtcgataacgaactgctcgactatgaggatgatgaggtggaaaccgcggctggaggggatggcgctgaggccccagccaaaaaggacgtgaaggggtcttacgtgagtattcactccagcgggttccgggacttcctgctgaaacccgagctgctgcgtgctatcgtcgactgtggattcgagcatccgtccgaggtacagcacgagtgcatccctcaagctattctggggatggatgtgttatgtcaggcaaagagtgggatgggcaaaactgccgtcttcgtgctggccaccctccagcaactggaacctgtgacaggacaagtctccgtgttggtaatgtgtcacacacgagaactggcctttcagatctccaaggaatacgagagattttccaagtacatgcctaatgtcaaggtggcggtgttttttggcggtctctctataaagaaggacgaggaagtcttgaaaaaaaattgtccccatatcgtagttggcacccccggaaggattctggccctagccagaaataaaagtttgaacctgaaacacatcaagcattttatactggatgaatgcgataaaatgctagagcagctagatatgcggagagacgtacaggaaatcttcaggatgacacctcacgagaagcaagtcatgatgttctccgccacattatccaaagagattaggccagtctgccgtaaatttatgcaggatccaatggagatcttcgtcgatgatgaaaccaagctgactctccacggactgcagcaatactatgtgaagcttaaggacaacgagaaaaacaggaagctcttcgacctgctggatgtattggaatttaaccaggtggttatttttgtcaagtctgttcagcggtgcatagctctggcgcagctcctggtggagcagaattttcccgctatagcaattcatcggggaatgccccaggaagagagattgtcccggtatcagcagttcaaagacttccagcgacgtattctggtggctacgaatttgtttggacgtggcatggatattgagcgggtaaacattgccttcaactacgacatgccagaagactccgatacatacctgcaccgtgttgcacgcgctggtcgatttggtacaaaggggcttgctatcacattcgtaagcgatgaaaatgatgcaaagatcctcaacgacgtacaagaccgatttgaggtgaatattagcgagctcccagacgaaatcgacataagctcttatatcgagcagacccggtag

SEQ ID NO: 220236 - DNA, 411 bp, synthetic construct
  misc_feature 1..411: note = Description of Artificial Sequence: Synthetic coding sequence
  source 1..411: mol_type = other DNA
atgggcggtggacgcaggccatacgacgtctttttcagtaaggttatggccgaaaacgacgtggacaacgaactcctcgattacgaggacgacgaggtcgaaaccgctgccggaggagacggtgcggaggcccctgctaagaaggatgtgaaggggagttacgtgtctatccacagctcaggcttccgggatttcctgctcaaaccagagctgctgcgcgcaatcgtggactgcggattcgagcaccctagcgaagtgcagcacgaatgtatcccacaggcaatcctgggcatggatgtgctgtgtcaggctaagtccgggatgggcaagacggcagttttcgtgctggcaacactgcaacaacttgaaccagttacaggacaggtttccgtcctggtgatgtgtcattag

SEQ ID NO: 220237 - DNA, 987 bp, synthetic construct
  misc_feature 1..987: note = Description of Artificial Sequence: Synthetic coding sequence
  source 1..987: mol_type = other DNA
tgagcaaccctgcaacagttggaaccagtcaccggccaggtttctgtgttggtgatgtgccatacgagagagctcgcgtttcaaatttccaaagagtacgaacgcttctcgaaatatatgcctaacgtgaaggttgcggtcttttttggaggactcagcattaaaaaggatgaggaggtgctgaaaaaaaattgtcctcatattgtggtgggcacgcccggtcgcattcttgctctggcccgaaataagagcctgaatcttaaacatatcaaacactttattttggacgaatgcgacaaaatgttggaacaacttgacatgaggagagatgtgcaggagattttccgcatgactccacacgagaagcaagtgatgatgttcagcgctacactcagtaaagagatccgccctgtgtgtagaaagttcatgcaggatcccatggagatcttcgttgatgacgagacaaaactcaccctgcacgggctgcagcagtattacgtgaaactcaaagataatgaaaagaacagaaaactgttcgaccttctcgacgtcttggaatttaatcaggtggtgatcttcgtcaagtctgtgcagagatgtattgccttagcccagttgcttgtggaacagaactttcccgcaatcgccatacatcggggtatgccgcaggaagagcgcctctcaagataccagcagttcaaggactttcagcgtcggatcctggtcgcaaccaacttgttcggacgcggtatggatatagagagagtgaacatcgcttttaactatgacatgcccgaggactctgacacgtacttacatagagtggctcgggcagggagatttggaactaaaggcttagccatcacctttgttagcgacgagaatgacgctaagattttaaatgatgtgcaggacaggtttgaagttaacattagcgaactgcccgatgaaatcgacatctcgtcatacattgaacaaactcgttag

SEQ ID NO: 220238 - DNA, 399 bp, synthetic construct
  misc_feature 1..399: note = Description of Artificial Sequence: Synthetic coding sequence
  source 1..399: mol_type = other DNA
atggctgagaacgacgtggacaacgaattgctcgactatgaagacgatgaggtggagactgccgctggcggtgacggagcagaggcacctgcaaaaaaagacgttaaggggtcttatgtctctatccactcctcaggtttcagggacttcctactaaagcccgagttactccgggctattgtcgactgcggctttgagcatccaagtgaggttcagcacgaatgtataccccaggccatactggggatggatgtgctgtgccaggccaagtccggaatgggcaagaccgcagtctttgtgctggccacccttcagcagctggagcccgtgacagggcaagtgtgtttttgtgactcacatttcccacggggagacaatgaggaactgcatctgccttag

SEQ ID NO: 220239 - DNA, 420 bp, synthetic construct
  misc_feature 1..420: note = Description of Artificial Sequence: Synthetic coding sequence
  source 1..420: mol_type = other DNA
atggcggaaaatgacgtagataatgaattacttgattatgaggatgacgaggtggaaacagcggctgggggagatggtgctgaagcaccagcaaaaaaggacgttaagggtagttatgtttcaattcacagcagtggatttcgcgatttcttacttaagcctgaactgttaagagccatcgtggactgtggattcgaacacccgagtgaggtgcagcacgagtgcataccacaggcaatactcggaatggatgtgctctgtcaggccaaaagcggtatgggtaagaccgcggtgttcgtgttggctacgttgcagcaactggaaccggtgactgggcagtcgcacgagcacatgaccagcgtaaccttggataacctcaccgcggttggggatgtgctttcccaagcctgggggtcctag

SEQ ID NO: 220240 - DNA, 717 bp, synthetic construct
  misc_feature 1..717: note = Description of Artificial Sequence: Synthetic coding sequence
  source 1..717: mol_type = other DNA
atggccgagaacgatgtggacaacgagcttctagattacgaggacgacgaagttgaaacagctgcaggaggggacggagcagaagctcctgcgaagaaggatgtgaagggctcctacgtatcaatccactcttcgggcttcagggatttcctcttgaagccggagctcttacgggcaatcgtggattgtggatttgagcaccccagtgaggtgcagcacgagtgcatcccacaggcaatccttgggatggacgtcctatgccaggccaaatcaggaatgggcaagacagctgttttcgtgctggctacactccagcaattggaacccgtgactggtcaggtgtctgtactggtgatgtgccacactcgcgagctggcctttcagatctctaaagagtatgaacgcttttcaaagtacatgccaaatgtaaaggtagccgtcttcttcgggggactttcaattaaaaaggatgaagaagtactgaaaaaaaattgtccgcatatagtggtggggactccaggacgcatactggcactggcaagaaataaatctttgaacttgaaacacatcaaacacttcattcttgacgaatgtgataaaatgctagagcagctagacatgcgcagggatgtacaggaaattttcagaatgactccccatgagaaacaggtgatgatgtttagcgccaccctctcaaaggagatccgtcctgtgtag

SEQ ID NO: 220241 - DNA, 564 bp, synthetic construct
  misc_feature 1..564: note = Description of Artificial Sequence: Synthetic coding sequence
  source 1..564: mol_type = other DNA
atgggttcgtcccacataggaggcctgtctattaacgagcggcgtagaagcgccagcctcggcctggtgatggcagaaaatgatgtcgacaacgagctgcttgattatgaagacgacgaggtggaaaccgcggctgggggagatggtgctgaagctcccgctaagaaggatgtcaagggctcgtatgttagcatccatagttctggtttcagagactttttgctgaaacccgagttattgcgggcaattgttgattgcggcttcgaacatcccagtgaagttcagcacgagtgcatacctcaggccattctgggcatggacgtgctttgtcaggccaagtccggcatgggaaaaacagcagtgtttgtgttagctacactgcagcagctagaacccgtgaccggccaggtgagcgtactggtaatgtgtcacactcgtgaactggcgtttcagatctccaaggaatacgagcgattttctaaatacatgcccaacgttaaagtggccgtctttttcgggggactttcgatcaagaaagacgaagaggtcctcaagaagaattag

SEQ ID NO: 220242 - DNA, 711 bp, synthetic construct
  misc_feature 1..711: note = Description of Artificial Sequence: Synthetic coding sequence
  source 1..711: mol_type = other DNA
atggccgagaatgacgtggataacgagcttctggattacgaggatgatgaagttgagaccgccgcaggtggggacggtgcagaagcacctgctaaaaaagatgtcaagggcagttatgtgagcatccattctagcggcttcagggacttcctgctcaagcccgagcttttgcgtgcaattgtggattgcgggtttgaacaccccagcgaggttcaacatgaatgtatccctcaggctatactggggatggatgtgctgtgtcaggccaagagcggcatgggcaagactgccgtcttcgtgcttgccactctgcagcaactggagccggtgactgggcaggtttccgtgttggtcatgtgccacacacgcgagttggcattccagatttccaaagagtatgagcggttttcgaaatacatgccaaacgtgaaggtggccgttttctttgggggattgtccataaaaaaggacgaggaagtcctgaaaaaaaattgtcctcacatcgtggtgggcactcccggacgcatcctggccctggcaagaaataagtcgttaaacctgaagcacatcaagcacttcatactggacgagtgtgataagatgttggagcagctggacatgcggcgagatgtgcaggaaatattccggatgaccccgcatgagaaacaggtgatgatgttttccgccaccctcagcaaggagataagatag

SEQ ID NO: 220243 - DNA, 1278 bp, synthetic construct
  misc_feature 1..1278: note = Description of Artificial Sequence: Synthetic coding sequence
  source 1..1278: mol_type = other DNA
atggctgaaaatgacgtggacaacgaattgctggactacgaagacgatgaagtggaaaccgctgcaggtggcgatggagccgaggcccctgcgaaaaaagacgtgaaggggtcatatgtgagcatccattcttccggattcagggacttccttctcaaaccggagctcttgagagcgatcgtcgactgtgggtttgagcatcccagtgaagtgcagcatgagtgtataccccaagctatcttgggaatggatgtcctctgtcaggcaaaatcagggatgggaaaaacagcggtgtttgtacttgcgaccctccagcagctggagcccgtcactggacaggtttcagtactcgtcatgtgccacacaagagaacttgcctttcaaatcagcaaagagtacgaacgtttttctaaatatatgcctaatgtgaaggtcgcagtgttctttggaggcctgtctattaaaaaagatgaggaggtcctgaaaaaaaactgcccccatatcgtcgtgggtacaccgggacgaatcttagccctggcgaggaacaagtcccttaacctgaagcatatcaaacacttcatactggacgaatgcgataaaatgttggagcagctggacatgcggagggatgtgcaggagatcttccggatgacaccccatgagaaacaagtgatgatgttttccgcgactctctccaaggagattcgtcctgtgtgcaggaaatttatgcaagaccccatggaaatttttgtggatgacgaaacaaagctgaccctgcacgggctgcagcagtactatgtcaagctcaaagataatgagaaaaaccgtaaactatttgacctgcttgacgtcctggagttcaaccaggtggtgatatttgttaagagtgtacagagatgcatcgcccttgcccagctgctcgtagagcagaacttccccgctatagctatacaccgcggtatgccacaggaggagaggttgtcccgttatcagcagttcaaggacttccagcgcagaatcctggtagccaccaatctgttcggccgtggtatggatattgaacgggtgaacattgctttcaactatgatatgcctgaggactctgacacttacttgcacaggtgttaccccctgtctccctctcgatggccagaacaggctggcctggccccacgggcatggttgtctcatctgtgtcccatgaggatgatgcccagatcttccatgatgtgtagaatcgcgctgcgtagcatactcgtttcatgcttgatgaggtag

SEQ ID NO: 220244 - DNA, 696 bp, synthetic construct
  misc_feature 1..696: note = Description of Artificial Sequence: Synthetic coding sequence
  source 1..696: mol_type = other DNA
atggctgagaacgatgtcgacaatgagcttctggactatgaagatgatgaagtggagaccgccgcaggcggagatggagcagaggccccagctaaaaaggacgtgaaaggcagctacgtcagcattcatagttcagggttccgcgatttccttctcaagcctgaactcctcagagctatcgttgactgtggctttgagcaccctagtgaggttcagcacgaatgtattccgcaagcgatcctgggaatggatgtgctgtgtcaggcgaaaagcggaatggggaagaccgctgtatttgtcctcgcaaccctccagcagctggagcctgtgacgggccaggtatccgtactcgttatgtgccacacccgggaactggccttccagattagtaaagaatatgaaagatttagcaagtacatgcctaatgtaaaagttgccgtgttcttcggagggctctctatcaaaaaagatgaagaagtattaaagaagaattgtccgcatattgtggtcgggactccagggagaattctggcactcgcacggaacaagtcactgaacctgaaacatatcaaacattttattctggacgaatgtgacaagatgttagagcagctcgacatgcgaagagacgtccaagaaatttttcgcatgacgcctcatgagaaacaggttatgatgttcagcgccacactgtag

SEQ ID NO: 220245 - DNA, 99 bp, synthetic construct
  misc_feature 1..99: note = Description of Artificial Sequence: Synthetic coding sequence
  source 1..99: mol_type = other DNA
tgagctaccctgcaacagctcgaacccgtcactggtcaggtttgtttctgtgactctcatttccctaggggggacaacgaagagctacatttgccctag

SEQ ID NO: 220246 - DNA, 399 bp, synthetic construct
  misc_feature 1..399: note = Description of Artificial Sequence: Synthetic coding sequence
  source 1..399: mol_type = other DNA
atggcagagaacgacgtagacaatgagttattggattacgaggacgatgaggtggaaacagccgcaggaggcgacggtgctgaggcccctgcaaagaaagatgttaagggctcatatgtgagcattcactcttctggattcagggatttcctgcttaagcctgagctattgcgtgccatcgtggactgtggctttgagcacccatcagaggtccaacacgagtgtatccctcaagcaatactcgggatggacgtcctgtgccaggcaaaaagcggcatgggtaagactgcggttttcgtcctcgccaccctgcagcagttagaacctgtgaccgggcaggtctgcttttgcgacagccatttccccagaggcgacaacgaggagctgcatctaccttag

SEQ ID NO: 220247 - DNA, 399 bp, synthetic construct
  misc_feature 1..399: note = Description of Artificial Sequence: Synthetic coding sequence
  source 1..399: mol_type = other DNA
atggcagaaaacgacgtcgacaatgagctgctggactacgaggatgacgaggtcgagaccgccgctggcggagatggagccgaggctcctgcgaaaaaagacgtgaagggaagctacgtgtctatccactccagtgggtttcgcgatttccttttaaaacccgaactcctccgggctatcgtggactgcggtttcgaacatcctagcgaggtacagcatgaatgtataccccaagctattctggggatggacgtactttgccaagcgaaaagcggtatgggaaagaccgcggtgttcgtgctggctacactgcagcagcttgagcctgtgaccggacaggtgtgcttttgtgattcacatttcccccgaggtgacaacgaagagcttcacctcccatag

SEQ ID NO: 220248 - DNA, 738 bp, synthetic construct
  misc_feature 1..738: note = Description of Artificial Sequence: Synthetic coding sequence
  source 1..738: mol_type = other DNA
atgtggacaatgagcagctggaccatgaagatgatgagatggcgccagcaacttggcgagatggggctccgtccgctgcctagacgcatgtcaagagcccctatgagtcccagcacagctctcgctttcgtgacctcctgctccagtcagtcctgcagtgggccactgtcaacagtggccttgagtattagacagaaggtagcagttttctttggcggactttccatcaagaaggacgaggaagtgctcaaaaaaaactgtccccatatcgtcgtcggtacgcccggacgcatcctggcgcttgcgagaaacaagtcattaaatctgaagcatataaaacatttcattctagacgagtgcgacaaaatgttggagcagctggacatgaggcgcgacgtgcaagagatctttcggatgacaccccacgaaaagcaggtgatgatgttcagcgccaccttatctaaagaaattaggcccgtttgcaggaaattcatgcaggatccaatggagatcttcgtggacgacgagactaaactcacacttcacggcctgcagcagtactatgtgaaactgaaggacaatgagaagaaccggaaactgttcgacctgttagacgtcctagaatttaatcaagttgttattttcgttaaatctgtgcagcgatgtattgctctggcccagctcctggttgaacagaatttccccgctatagcaattcaccgaggcatgccacaatag

SEQ ID NO: 220249 - DNA, 696 bp, synthetic construct
  misc_feature 1..696: note = Description of Artificial Sequence: Synthetic coding sequence
  source 1..696: mol_type = other DNA
atggccgaaaacgatgtggataatgagctgctcgactatgaagatgacgaagtagaaaccgctgccggaggagacggagccgaagcacctgctaagaaggacgtaaaagggtcttatgtgtccatccatagctcggggttcagggacttcctgctcaagccggagttgctgcgtgcaattgttgactgcggctttgaacacccaagcgaagttcaacacgaatgcatccctcaagctattctcggaatggacgtattgtgtcaggctaagagcggtatgggcaagaccgctgtcttcgtccttgccacactgcagcagctggaaccagtcactggccaggtgtcagtgctggtgatgtgtcacacacgtgagctcgcatttcagatctccaaagagtatgagagattctctaaatatatgccaaacgttaaggtggcagttttcttcggagggctaagtatcaagaaagacgaggaagtcttaaaaaaaaattgccctcacattgtggtgggaactccgggacgtatactggccttggctcgaaacaagtctctgaacctgaaacatataaaacattttatcctggacgaatgcgataaaatgctggagcagcttgacatgagaagggacgtccaggagatctttcgaatgactccgcacgagaaacaggtaatgatgttctccgctaccctttag

SEQ ID NO: 220250 - DNA, 732 bp, synthetic construct
  misc_feature 1..732: note = Description of Artificial Sequence: Synthetic coding sequence
  source 1..732: mol_type = other DNA
atgtggactatgagtagctggactatgaagatgatgaggtggaggcagcagcttggtgagatgggcctaaggcctctgcctagaaggatgtctcgcgcacccatgagcccctcaacagctctagcattcgtaacttcatgttcctcccaaagttgctcaggtcctttgagcacggttgctctgagtatccgccagaaagtgtcagtcctagtgatgtgccatactcgggagctcgcttttcagatatctaaggagtacgagagattctcgaaatacatgcccaatgttaaggtggctgtgttttttggaggcctgtctatcaaaaaggacgaggaagttctgaaaaaaaactgtccccacatagtggtgggtacccctggtcggatcctggcactcgcccgaaataagagtctcaatctcaaacacattaagcacttcattctagatgagtgtgacaagatgctcgaacaattggacatgcgacgggacgtgcaagaaatattccggatgactccgcacgagaagcaggtgatgatgttctcagcaaccctgtctaaggagatcaggccggtttgccggaagttcatgcaggacgtcaacacattgctccctagcctgcctcccctgcctgctcggtgtctgttacccttcttagcgttattcctacggctcccatgtcattccagtgccaagaaggctgcctgcgcccaactgggcgtgatgactccttag

SEQ ID NO: 220251 - DNA, 1287 bp, synthetic construct
  misc_feature 1..1287: note = Description of Artificial Sequence: Synthetic coding sequence
  source 1..1287: mol_type = other DNA
atggccgagaacgatgtggacaatgaactgttagactacgaagatgacgaagtcgagactgctgctggcggagacggcgcagaggcccctgcgaagaaggacgtgaaaggcagctatgtgtcaatccactcgagtggtttccgcgacttcctcctgaagccagaactgctgcgggctatcgttgactgcgggttcgagcacccatctgaagttcagcacgagtgcatcccacaagcaatcctgggaatggatgtgctatgccaggcaaagtccggcatgggaaaaaccgccgtcttcgttctggcaacgctgcaacagctggagccagtcactggacaggttagcgttctcgtgatgtgccacacgcgagaactggcatttcagatctcgaaggagtacgagaggttttctaagtatatgccaaacgtcaaggtggctgtgtttttcgggggtttgtccattaaaaaagatgaagaagttcttaagaaaaattgtcctcacatcgtggtgggtacaccaggcagaattctggctctcgcacgcaacaagtccctgaatttgaagcatattaagcattttatcctcgacgagtgcgacaagatgctcgagcaactggacatgaggagagatgtccaagagatcttcaggatgacaccacacgagaaacaggtgatgatgttctctgcaactctctctaaagagattcgccctgtgtgcaggaagttcatgcaggatcccatggaaattttcgtcgacgacgaaacgaagttgaccttgcacggcctgcagcagtattatgtgaagctgaaagacaatgagaagaacaggaagctgtttgacttgctcgacgtactggagttcaaccaggtagtgatattcgtaaagtctgtccagcgctgcatcgcactcgcccagttgctcgttgagcagaattttcctgctatcgctattcatcgcggaatgccccaggaggagcggctttcaagataccagcagtttaaggacttccagcgtagaatcctggttgcaacaaacctctttggaagagggatggacatagagcgcgtgaatatagcatttaattatgatatgccagaggatagtgatacttatttgcacagagtggccagagccggacggtttgggacaaaagggttggccattacgtttgttagcgacgagaatgacgcaaagatactcaatgacgtccaagaccgcttcgaggtgaacatctctgagctgccagacgagatcgacatctcctcgtacattgagcagactaggtag

SEQ ID NO: 220252 - DNA, 1278 bp, synthetic construct
  misc_feature 1..1278: note = Description of Artificial Sequence: Synthetic coding sequence
  source 1..1278: mol_type = other DNA
atggcggaaaacgatgtcgataacgagctgctggattacgaggacgatgaagtcgagaccgctgccggaggggatggagcagaggcaccggctaagaaggacgtgaagggaagttatgtatccatccattcctcagggtttagggatttcttactgaagcctgagctgcttcgcgcaattgtggactgcggcttcgagcatccctctgaggttcagcacgaatgtatccctcaggccatcctcggcatggacgtcttgtgccaggctaagtcagggatgggcaagaccgccgtgtttgtattagcaaccctgcagcaactggagcccgtgactggccaggtgagcgttctggtcatgtgtcataccagggaactggcttttcaaatctccaaggagtacgaacggttctctaaatacatgcccaacgtcaaggtcgctgtcttttttggtggactgtccatcaaaaaagacgaggaggtcctcaagaaaaattgcccacacatcgtcgtgggtacacctggtcgtatactggcattggcccgaaataagagtcttaatctgaagcacattaagcattttattctagacgaatgcgacaagatgcttgaacagcttgatatgaggcgcgacgttcaggagatcttccgaatgacacctcacgaaaagcaggtgatgatgtttagcgcaacactctccaaggagatccgaccggtgtgcaggaagttcatgcaggaccccatggaaatatttgttgatgacgagacaaagctgaccctgcatggcctgcaacagtactatgttaagttgaaggacaacgagaagaaccgcaagctgttcgacctactcgatgttttggagttcaatcaggtggtgatatttgtcaaatccgttcagaggtgcatcgcactggcccagttgctggtggaacagaatttcccagcaatcgccattcacagagggatgccccaggaggagcgtctttctcggtatcagcagttcaaagatttccaacgcaggattctggtggctacaaatctgttcggaaggggcatggatatcgaaagggtcaacatagcattcaactacgatatgccggaagactcagacacttatttgcataggtgttaccccctgtcaccctctagatggccagagcaggctgggctcgcacctcgagcgtggctcagccacttgtgtccgatgagaatgatgcccaggtcgagcatgatgtgccgaatcgccctacgttccatcctggtaagctgcctgatgcgctag

SEQ ID NO: 220253 - DNA, 291 bp, synthetic construct
  misc_feature 1..291: note = Description of Artificial Sequence: Synthetic coding sequence
  source 1..291: mol_type = other DNA
atggctgaaaacgatgtagacaatgaattgttagattacgaagatgacgaagtggagactgcagccggaggagacggcgcagaagctccagccaagaaggacgtgaaaggatcctatgtatcaattcactcgagcggattcagagattttctgttaaaaccagagcttctgcgcgcaatcgtggattgcggctttgaacatccctcagaggttcagcacgagtgcattcctcaggctatcctcggtatggacgtcctctgccaggcaaagtctgggatgggcaagacctag

SEQ ID NO: 220254 - DNA, 411 bp, synthetic construct
  misc_feature 1..411: note = Description of Artificial Sequence: Synthetic coding sequence
  source 1..411: mol_type = other DNA
atgggcggtggcagacgaccatatgacgtcttctttagtaaggtgatggccgagaacgatgtggacaatgagctcctggattatgaggatgatgaggtcgaaaccgctgcgggaggggacggggctgaggctcctgctaagaaagatgtaaagggatcttacgtgtctatccatagttctgggttccgcgatttcctgttaaaaccagagctgctgcgagcaatcgtggattgcggctttgaacacccgtcggaagtgcagcacgagtgcatcccacaggcaatcctgggaatggatgttctgtgtcaggctaagagcgggatgggtaagaccgccgtttttgtcttggccacactgcagcagcttgagcccgtgactggccaggtctcagtgcttgtgatgtgtcattag

SEQ ID NO: 220255 - DNA, 564 bp, synthetic construct
  misc_feature 1..564: note = Description of Artificial Sequence: Synthetic coding sequence
  source 1..564: mol_type = other DNA
tagtctgaggaacgagacattggcaagccaatggaaatctttgtggacgacgaaaccaagcttaccttgcacggcctgcagcaatactacgttaaactcaaggacaacgaaaagaatcgcaagctctttgacctgcttgacgtgctggaattcaaccaggttgttatctttgttaagtcggttcagaggtgcatcgccttggcccagttgttagtcgagcagaacttccccgcaattgctatccacagaggcatgccccaggaagagaggttaagccgataccaacagtttaaagacttccagagacgaattcttgtcgcgacaaatctttttggcaggggcatggatatagagcgtgtgaacatcgcctttaattacgacatgcccgaggattccgatacttacctgcatagggtggctcgcgctgggaggttcggaacaaaaggattggccatcactttcgtcagtgatgaaaacgacgctaaaattctgaatgacgttcaggatcgtttcgaagtcaacatttcagaactgcccgacgagattgatatcagttcttactag

SEQ ID NO: 220256 - DNA, 717 bp, synthetic construct
  misc_feature 1..717: note = Description of Artificial Sequence: Synthetic coding sequence
  source 1..717: mol_type = other DNA
atggctgaaaatgatgtcgacaacgaattactggattacgaagacgacgaggtggagactgcagcaggtggcgatggagccgaagcccctgctaaaaaagatgttaagggcagctatgtatcgatccattcaagtggattcagggactttttgctgaaaccagagctactgagagcaatcgtggactgtggctttgaacacccgagtgaagtgcagcacgaatgcatccctcaagccattctggggatggatgtgttgtgtcaggctaagtccggaatgggcaaaactgccgtgttcgtactggccacacttcaacagctggaacctgtcactggtcaggtcagcgtattagttatgtgtcacaccagagaacttgcgttccagatctcaaaagagtatgagcgcttctccaagtatatgcccaatgttaaggtagccgtgttcttcgggggtctgtcaattaagaaggatgaagaggtgctgaagaagaactgccctcacatcgttgtcgggactcctggcaggatccttgccctcgccagaaacaaatcactgaatctcaagcatatcaaacacttcattctggatgaatgcgacaaaatgttagaacagctggatatgcgaagagatgtacaggagatcttcagaatgactccacatgaaaaacaggtgatgatgttcagtgctaccttatccaaggagatacggcctgtttag

SEQ ID NO: 220257 - DNA, 417 bp, synthetic construct
  misc_feature 1..417: note = Description of Artificial Sequence: Synthetic coding sequence
  source 1..417: mol_type = other DNA
tgagccaccctgcagcagctagagcccgtgaccgggcaggtttccgtacttgtcatgtgccatacacgggagctggcctttcaaatcagcaaagaatatgaacgctttagcaaatatatgccaaatgtcaaagtggcagtcttctttggcggtctgtccatcaagaaggatgaagaagtgctaaaaaagaattgccctcacattgtggtgggcaccccaggacggattcttgcgcttgccagaaacaaaagcctgaacctaaagcacatcaagcatttcatcttggatgaatgcgacaagatgttagagcaactggacatgcgacgggatgtacaggaaattttccgcatgacacctcatgagaaacaggtgatgatgttttcggcaaccttgagcaaagaaattaggcccgtctag

SEQ ID NO: 220258 - DNA, 870 bp, synthetic construct
  misc_feature 1..870: note = Description of Artificial Sequence: Synthetic coding sequence
  source 1..870: mol_type = other DNA
atggctgagaacgacgtggacaatgagcttctagactacgaagacgacgaagtcgaaactgcggctggtggcgatggtgcagaggccccagccaagaaggatgtgaagggatcttatgtcagcattcactcgagtggcttcagagattttctcctgaagccagagctcctgagagctatagtggattgtggctttgaacacccctcggaggtgcagcatgaatgcatccctcaggctattctgggcatggatgtcctctgtcaagccaaatcagggatggggaaaacggctgtgttcgtcttggccacccttcagcaactggagccagtcactggacaggtgtccgtcctcgtcatgtgccatacaagagagctcgccttccagatctcaaaagagtatgagaggttcagcaagtacatgccaaacgtcaaggtggcggtcttttttggcggactgtcaatcaagaaagacgaagaagtcctcaagaaaaattgtcctcacatcgtagtaggaactcccggacgaatcctcgcgctggcccgaaacaagtctttgaacctcaaacatattaagcatttcattctggacgagtgcgacaagatgctggagcagctggatatgagacgggatgtgcaggaaatcttcaggatgactccccacgaaaagcaggtcatgatgttcagtgcaactctctcgaaagagatccgtcctgtttgcagaaaatttatgcaggacccaatggagatattcgtagatgatgaaacaaagctcaccctccatggcctccagcagtactatgtgaaactgaaagataatgagaagaatcgcaagctgtttgatctgctggacgtcttggagtttaaccaatag

SEQ ID NO: 220259 - DNA, 1287 bp, synthetic construct
  misc_feature 1..1287: note = Description of Artificial Sequence: Synthetic coding sequence
  source 1..1287: mol_type = other DNA
atggcagaaaacgacgtggacaatgaattgcttgattatgaggacgatgaagtggaaactgccgctggcggtgatggagcagaagctcccgcaaaaaaagacgttaaggggagctatgtttcaattcacagttccggattccgggacttcctgctaaagcctgagctgctgcgggctatcgttgactgcgggtttgagcacccgtccgaagttcagcacgaatgcataccacaggccattctgggcatggatgtcttatgccaggccaaatccggaatgggtaagactgctgtgttcgtgctggccacactccagcagctcgagcccgttaccggacaagtgtccgtccttgttatgtgtcatactcgagagctagcatttcagatctctaaagaatatgaacgattcagcaagtacatgccaaatgtgaaggtggctgtgttcttcggagggctttcaataaagaaggacgaagaggttttaaagaaaaactgcccccatatagtggtcgggacaccgggtcgaattcttgcactggcccgtaacaaaagtctaaacctcaagcacataaagcattttatactggatgagtgtgataaaatgctggagcagttagatatgcgcagagacgttcaagagatattcagaatgactccacacgagaaacaggttatgatgtttagcgccacactgtctaaggagattaggccagtgtgcaggaagtttatgcaagacccgatggaaatttttgtagacgatgagacgaagctgacactacatggcctgcagcaatactacgttaaattgaaggacaacgagaaaaatagaaagttgttcgacctgcttgacgttctggagtttaatcaggtggtgatctttgtgaagagcgtgcagcgctgtatcgctttggcacaactcctggtcgagcaaaattttcccgctatcgctattcacagaggcatgccacaagaagagcggctgagccgatatcagcaatttaaagactttcagcgccgtatattggtggcaacgaacctgttcggaaggggaatggatattgaaagggtgaatattgcttttaattacgacatgccagaagacagtgacacctacctccaccgggtggcaagagcaggaagattcggcacgaagggattggccattaccttcgttagtgatgagaacgatgcgaaaatactcaatgatgtgcaggaccgattcgaagtgaatattagcgagctgcccgacgaaattgatatttcatcgtatattgaacagacacggtag

SEQ ID NO: 220260 - DNA, 696 bp, synthetic construct
  misc_feature 1..696: note = Description of Artificial Sequence: Synthetic coding sequence
  source 1..696: mol_type = other DNA
atggccgagaacgacgtcgataacgagctgctagattatgaggacgacgaggtcgagactgcagcaggaggcgacggtgccgaagccccagccaagaaggacgtgaaggggtcctacgtttcaattcacagtagtggctttagagattttcttctaaagccagagcttctaagggccattgttgactgcggcttcgagcacccaagcgaagttcagcacgaatgcatcccccaggctattttaggcatggacgtgctctgccaagccaagagtggaatgggcaaaacggccgtgtttgtccttgccactctgcagcagctagagccagtcacgggacaagtttccgtgctggtgatgtgtcacacgcgcgaactcgccttccagatctctaaggagtacgagcgcttctcaaagtacatgcctaacgtgaaagtcgccgttttttttggcggactcagtataaagaaagatgaggaggtgctgaagaagaactgcccccacattgttgtgggcacgcctggtagaattctggcgctcgccaggaacaagagcctgaatctcaaacacattaagcattttatcttagacgagtgtgacaagatgcttgaacagttggacatgcggcgtgacgtccaagagatcttcagaatgacaccgcacgagaagcaggtgatgatgttcagcgcaacgctgtag

SEQ ID NO: 220261 - DNA, 1287 bp, synthetic construct
  misc_feature 1..1287: note = Description of Artificial Sequence: Synthetic coding sequence
  source 1..1287: mol_type = other DNA
atggccgagaatgatgtcgataacgagctactggactatgaggacgacgaagtagagaccgctgctgggggtgacggcgctgaagcaccggcaaagaaggatgtcaagggaagctatgtttccatacatagcagtgggtttcgagatttcctcctgaaaccggagctgctccgggctatcgttgactgtggctttgagcatccttccgaagtccaacatgagtgcatccctcaggccatcctaggcatggatgtgctctgccaggccaagtctggtatggggaagacggcggtcttcgtactcgccacgcttcagcagctcgagcccgtgacaggacaggtgtccgtgctggttatgtgtcatacccgagagctagctttccagatctctaaggaatacgagcgcttctctaaatatatgcccaacgttaaggtggccgtcttcttcggaggtttatccattaagaaagacgaggaggtgttgaaaaaaaactgcccgcacatcgtggtaggtacacccggacgaatcctggccctcgccaggaataagtccctgaatctcaaacacatcaagcatttcatcctggatgaatgtgacaaaatgcttgagcagttagacatgcgccgagacgtccaagagatctttcgaatgacccctcatgaaaaacaggttatgatgttcagtgctacgttgtcgaaagagattagaccagtgtgccgtaaattcatgcaagacccgatggaaatttttgtggacgacgagaccaaactcaccttacatggcctccagcaatattatgtgaaactgaaagacaatgagaaaaaccgaaagctattcgatttactcgacgtattggagttcaaccaggtggtgatctttgtgaaaagcgtccaaagatgcattgctctggctcaactgctcgtggagcagaactttcctgctatcgccatccatcgaggcatgccccaagaagagcggctcagtagataccagcagttcaaagacttccaacgtcggattttggtagcaacaaatttgtttggccgtggcatggacatcgaaagggtgaatatcgcattcaattacgacatgcctgaggactctgatacctatctgcatagagtggccagggcagggaggttcggtactaagggactggccataacctttgtgagcgacgaaaatgacgcaaagattttgaatgatgttcaggataggtttgaggtgaacattagtgaactgccagatgaaattgacatctcctcatacatcgagcagacaaggtag

SEQ ID NO: 220262 - DNA, 378 bp, synthetic construct
  misc_feature 1..378: note = Description of Artificial Sequence: Synthetic coding sequence
  source 1..378: mol_type = other DNA
atggcagagaacgacgtggataatgaactgctggattacgaagatgacgaagtcgaaactgccgctggtggggatggcgcagaggcccctgccaagaaggatgttaaaggcagttacgtatctatacactctagcggatttcgcgattttctactgaagcccgagctcctgcgcgctatcgtggactgtggttttgaacacccttcagaggtccagcacgaatgcatccctcaggctatcctgggcatggacgtcctctgccaggccaaatccggaatgggcaaaactgcagtcttcgtgctcgcaactctgcaacaacttgagcctgtgactgggcaggtctcggtgttagtcatgtgtcacactcgagaactctag

SEQ ID NO: 220263 - DNA, 294 bp, synthetic construct
  misc_feature 1..294: note = Description of Artificial Sequence: Synthetic coding sequence
  source 1..294: mol_type = other DNA
taggccaccctccagcagttagaacccgtgacagggcaggtgtgtttctgcgattcccactttcccagaggtgacaacgaggagctccatctcccctacgtgtccgtgtattttctgcccaaggtaagcgtgttggtcatgtgccacacccgggaactcgcatttcagatcagcaaggagtatgaacggttcagcaagtatatgcccaacgtcaaggttgctgtctttttcggaggtttgtccatcaagaaggacgaggaggtcttgaagaagaattgcccacacatcgtgtag

SEQ ID NO: 220264 - DNA, 291 bp, synthetic construct
  misc_feature 1..291: note = Description of Artificial Sequence: Synthetic coding sequence
  source 1..291: mol_type = other DNA
atggcagaaaatgatgtcgataatgagctcctggattatgaagatgatgaggtcgaaaccgccgctgggggagacggcgctgaggcacccgcaaagaaggacgtgaagggttcttatgtgtccatacatagttcaggcttccgtgacttccttctgaagcccgagttgcttagagccattgtggattgtggctttgaacatccttccgaggtgcagcacgaatgtatcccccaggctattctcggcatggatgttctctgtcaggccaagagtgggatgggcaagacctag

SEQ ID NO: 220265 - DNA, 291 bp, synthetic construct
  misc_feature 1..291: note = Description of Artificial Sequence: Synthetic coding sequence
  source 1..291: mol_type = other DNA
atggcagaaaacgacgtggataatgagttactcgactatgaggatgatgaggtagaaacagcggcaggtggtgatggagccgaagccccagcaaaaaaggatgttaaaggcagctatgtgagtattcacagttctggattcagagatttcctgcttaaaccagaactcctgcgagctatagtagactgcggcttcgagcacccttccgaggtgcagcatgaatgcatcccacaggcaatcctgggaatggacgtcttatgccaagcaaagtcagggatgggaaagacctag

SEQ ID NO: 220266 - DNA, 1287 bp, synthetic construct
  misc_feature 1..1287: note = Description of Artificial Sequence: Synthetic coding sequence
  source 1..1287: mol_type = other DNA
atggcagagaacgacgtcgataacgagctcctggattacgaagatgatgaggtggaaactgcagcgggtggagacggcgctgaggcacccgctaagaaggacgtcaagggttcctatgtctctatccattcttccggcttcagggatttcctcttgaaacccgagcttcttagagccatagtggactgtggcttcgaacacccaagcgaggttcaacacgagtgtatccctcaggctatactcggaatggacgtcctctgccaggccaaatccggaatgggcaagaccgcggtattcgtgctagccacactgcagcagctggagcctgtgacggggcaggtgagtgtgctggtgatgtgtcataccagggagctggcgtttcagatcagcaaagaatacgagcgtttcagtaagtatatgcctaatgtgaaagtggcggtctttttcggaggactgtcaataaaaaaagacgaagaagtcctcaagaaaaactgtcctcacatcgttgtgggtactccgggtaggatcctcgccctcgcgagaaataagtctttgaacctcaaacacataaaacacttcatcctggacgaatgcgataagatgctcgagcaattggacatgaggcgggatgtgcaggagatttttcggatgactcctcacgagaagcaagtgatgatgtttagtgctaccttatcaaaggagatccggcctgtctgccgtaaattcatgcaggaccctatggagatctttgtggatgatgaaacaaaattgaccctgcatgggttgcaacaatattatgtcaagctcaaagacaacgagaaaaaccggaagctgttcgacctgctcgacgtgctcgagttcaaccaggtggtgatattcgtaaagtctgtgcaaaggtgtattgccctggcccaactgctggtagagcaaaacttcccagccattgccatccaccgtggcatgccccaagaggaaaggctaagccgttaccagcagttcaaagacttccagaggcgaatcctggtggcaaccaatttattcggcagagggatggatatcgaacgcgtaaatatcgccttcaattacgatatgcccgaagactctgacacctacttgcaccgcgtagccagagcaggacgctttgggacaaagggacttgccatcacatttgtatccgacgaaaacgacgcaaagatcctgaatgatgttcaggaccgcttcgaggtcaacatctctgaactgccagatgaaatagacatctcttcctacattgagcagacgcgctag

SEQ ID NO: 220267 - DNA, 732 bp, synthetic construct
  misc_feature 1..732: note = Description of Artificial Sequence: Synthetic coding sequence
  source 1..732: mol_type = other DNA
atgtggactatgagttcctggactatgaagatgatgcggtggcggcagcagctgggtgagatgggattgcgccctcttccaagacggatgagtagagccccaatgtccccaagtacggcattggccttcgtgacctcctgctccagtcagtcctgcagcggccctctctcgacagtggctctgtccataaggcagaaggtgtcagttctggtcatgtgccacactagggagctggccttccagatatccaaagaatacgaacgattctccaaatatatgccaaacgtgaaggtcgccgtgtttttcggtggactgtccataaagaaggatgaggaagttcttaagaagaactgccctcatattgtcgtcgggacacccggacgtattctggctctagcacgaaacaaaagcctgaatcttaagcatattaagcactttatcctagatgagtgtgataaaatgctggagcagttagatatgcgcagagatgtgcaggagatttttcggatgacaccacatgaaaagcaggtcatgatgttctcagccacactgagcaaggagattcggccagtgtgtaggaaattcatgcaggatgtgaatacactgctcccttctttaccccctctgcccgcaagatgtttgctaccttttcttgcgctattcctgcgcttgccttgccactccagcgccaaaaaagctgcctgtgcacagctgggtgttatgaccccatag

SEQ ID NO: 220268 - DNA, 972 bp, synthetic construct
  misc_feature 1..972: note = Description of Artificial Sequence: Synthetic coding sequence
  source 1..972: mol_type = other DNA
atggcagagaatgacgttgacaacgagctcctggactatgaagatgatgaggtcgagacggcagcgggaggcgatggcgctgaagctcccgctaaaaaggatgtgaaaggatcctacgtgtccatacattcaagcggatttcgcgatttcctactaaaaccagagctgctgagggctattgttgactgtggtttcgagcatccatccgaggtccagcacgagtgcatccctcaggcgatcttggggatggacgtgctgtgtcaggccaagagcgggatgggtaaaaccgccgtttttgtgctagcgaccctacaacaacttgagccggttacaggacaggtgtcagtgctcgtcatgtgccacacccgcgagctggctttccaaattagcaaagaatacgaacgattctcaaagtacatgccaaacgtaaaagtagccgtctttttcgggggtctgtctattaaaaaggacgaagaggtgctgaagaagaactgtccacacattgtggtgggcacaccaggacgcatcctcgccctggccagaaacaagtcactgaacctgaaacatattaagcatttcatactagacgagtgcgacaaaatgcttgaacagctggatatgagacgtgacgtccaagaaatcttcaggatgacacctcacgagaagcaagtgatgatgttttcagcaaccttaagcaaggaaatcaggcccgtgtgccggaaattcatgcaggaccccatggaaatctttgtggatgatgagactaaactgacactacatggcctgcagcaatattacgttaaattaaaagacaatgagaaaaataggaaactatttgatctgctcgacgtgctcgagttcaatcaggagattacctgcaaatcagtccagcgtttcagcaccaccaattcttgtggctaccagccaatttggccacgacacggtcacagagcaggggaacactgcttctag

SEQ ID NO: 220269 - DNA, 972 bp, synthetic construct
  misc_feature 1..972: note = Description of Artificial Sequence: Synthetic coding sequence
  source 1..972: mol_type = other DNA
atggccgagaatgatgttgacaacgagctgctggattacgaggacgatgaggttgagaccgcggctggcggagatggggctgaggccccagctaagaaggatgtgaagggcagttacgtttcaatccactctagtggattcagagattttctgctcaagcccgaactcctgcgcgctatcgtggattgtggcttcgagcacccatccgaggtccagcatgaatgcattcctcaggcgatcttagggatggacgtcctgtgtcaggctaaatcaggtatgggtaaaacagccgtatttgtactcgcaacattacagcagttggagcccgtgacaggccaagtttctgttctcgtaatgtgtcatacacgtgagctcgcctttcagatctctaaggagtacgagagatttagtaagtacatgcccaatgtcaaagtggcggtgttttttgggggtctcagcatcaagaaggatgaagaagtgttaaagaagaactgtccacatattgtcgttggcacaccaggcagaattctcgcgctcgccaggaataaatctctgaatctgaaacacatcaaacactttatcttagacgagtgtgacaagatgttggagcagctggatatgagaagagatgtgcaggagattttccggatgaccccccatgagaaacaggtcatgatgttctctgcaaccctttccaaggagattcgacccgtgtgcaggaaattcatgcaggaccccatggagatctttgtggacgatgagactaaactaacattacatggacttcaacagtattacgtgaagctaaaggacaacgagaaaaatcggaagctcttcgatctactggatgttctggagttcaaccaagagatcacctgcaaatctgtgcagcgcttctccacaacaaattcttgcggatatcagccgatttggccacgacatggacacagggctggagagcattgtttttag

SEQ ID NO: 220270 - DNA, 1332 bp, synthetic construct
  misc_feature 1..1332: note = Description of Artificial Sequence: Synthetic coding sequence
  source 1..1332: mol_type = other DNA
atggccgaaaacgacgtagataacgaactcctggattacgaggacgacgaggtggagaccgcggctggtggcgatggggctgaagccccagctaaaaaggatgtcaaaggctcctatgtctcaatccacagctcagggtttcgggacttccttctgaaaccagaactgttgagagccatcgttgattgcgggtttgaacacccttcagaagtgcagcacgaatgcatccctcaggccatactaggaatggatgtgctgtgccaggccaagtcaggtatgggcaagacagcagtctttgtgctggcgaccttgcagcagttagagcctgtcacaggacaggtgtacctgggcagggtgttaggcagaggcttctggtgcgtattcgtgtcggtgctggtgatgtgtcacacccgcgagctggcgtttcagatttcgaaagagtatgaaagattcagtaagtatatgccaaatgtgaaggtggcagtcttcttcggtggtctgtctataaagaaggatgaagaagtgctgaagaagaactgccctcacatcgtggttggcacacccggaaggatcctggccctggcccgtaataaatccctcaacctgaagcacattaagcatttcatactcgatgagtgtgataaaatgctggagcagttggacatgcgcagggacgtccaggagatctttaggatgaccccgcatgagaaacaggtcatgatgtttagcgcaacgctgtccaaagaaattagacctgtctgccgaaagttcatgcaagatcccatggagatctttgttgatgacgaaaccaaactcactctgcacggtctgcaacagtactacgtcaagcttaaagacaatgaaaaaaacaggaagctgttcgatctcctggacgtgctggaattcaaccaagtcgtgatattcgtgaaaagcgtccagaggtgcattgcactggctcagctgttggtagaacagaacttccccgcaatcgctattcatcggggaatgcctcaggaggagaggctgtccaggtaccagcagtttaaagattttcaacgcagaatcctagtagccacgaacctgttcggcagagggatggacattgaaagggtcaacattgctttcaattacgatatgcccgaggattctgatacatacttgcatcgtgttgcgagagccggaaggtttggaactaaaggtttggcgataactttcgtgtccgacgagaacgacgccaagatcctgaatgacgtgcaagataggttcgaagttaatatatccgaactgcctgatgaaatcgacatcagctcttatatcgagcagacacgctag

SEQ ID NO: 220271 - DNA, 732 bp, synthetic construct
  misc_feature 1..732: note = Description of Artificial Sequence: Synthetic coding sequence
  source 1..732: mol_type = other DNA
atgtggaccatgagtagctggacaatgaagatgatgcgttggagacagcaactgggagaaatgggacttaggcccctccccaggcggatgagcagggcacctatgtctccctcgacagcactggcctttgtgacaagctgtagctcccagtcttgctcagggccactgagcacagtggcattaagcattcggcaaaaagtaagcgtgctggtcatgtgtcacacacgcgagctggctttccagatctccaaggaatatgagcgatttagtaagtacatgcccaatgtgaaagtcgccgtattcttcgggggattatcaattaagaaagatgaagaagtactcaagaagaactgcccgcacattgtcgtcggaactcctggcagaattcttgctctcgctcggaacaagtcactgaacctaaagcatataaaacactttatactagacgaatgcgataagatgctcgaacagctggacatgagacgagatgtccaagagatttttcgcatgacacctcacgaaaaacaggtgatgatgtttagcgccactctctctaaggagatccgacccgtttgtcgcaaatttatgcaggacgttaacaccctgcttccgagcctgccaccacttcccgctagatgcctcctgccgtttctggccctctttttaagactgccctgccactcttctgccaaaaaagccgcatgtgcacagctgggagtcatgaccccatag

SEQ ID NO: 220272 - DNA, 1332 bp, synthetic construct
  misc_feature 1..1332: note = Description of Artificial Sequence: Synthetic coding sequence
  source 1..1332: mol_type = other DNA
atggcggagaatgatgtagataatgagctgttggattacgaagatgacgaggttgagactgcggctgggggagatggggctgaggcgccagcaaagaaagacgtgaaaggctcctatgtttccatccatagcagcggcttccgcgattttctgctcaagcccgagctcctgcgagctatagtggactgtgggtttgagcacccctctgaggtccaacacgaatgcattcctcaagccattcttggcatggatgttttgtgccaggccaaatcgggaatgggcaaaacagcagtatttgtactggccactcttcagcagctggagccagtcaccggacaagtatatctcggaagggttctgggcaggggcttttggtgtgtgttcgtatccgtccttgttatgtgtcatacgagagaactcgccttccaaatctcaaaggagtatgagagatttagcaagtacatgcccaatgtcaaggtggcagtgtttttcggtgggctttctatcaagaaggacgaggaggtgttgaaaaagaattgtccgcatatcgtagtcggcactccaggtcgtatactagcactggctagaaataaaagcttaaacttaaaacacataaaacacttcattctggatgagtgcgacaaaatgttggagcaactggatatgcggagagacgtgcaggagatattccggatgacacctcatgaaaaacaggttatgatgttctccgccaccctgtcaaaagagatcagacccgtttgtagaaaattcatgcaggaccctatggagatattcgttgacgacgaaacgaaactcaccctgcacggtttacaacaatattatgtcaagctgaaagacaacgaaaagaacaggaaactgttcgatctgctggatgttctagagttcaaccaggtggtaatttttgttaaatccgtacagcgctgtattgctcttgcacagttgctggttgagcagaacttccccgctatcgcaatacaccgcggaatgcctcaagaagagcgattgagccgctaccagcaattcaaggacttccagagacgaatcttggtggccacgaacctcttcggcagaggcatggatatagagagggtcaatattgccttcaattatgacatgcccgaagatagcgatacctatctccacagagtggctcgtgctgggagattcggcacaaaggggctggcaataacattcgtatcagacgaaaacgacgcaaagatcctgaacgacgtccaagaccgcttcgaggtgaacatctcagagctgccggatgagatcgacatctcctcctacattgagcagacccgctag

SEQ ID NO: 220273 - DNA, 420 bp, synthetic construct
  misc_feature 1..420: note = Description of Artificial Sequence: Synthetic coding sequence
  source 1..420: mol_type = other DNA
atggccgagaacgacgtggacaatgagctgctcgactacgaagatgatgaagtagagacagcagccggtggagacggcgcagaggctcctgcgaagaaagatgtcaagggcagctatgtgagcatccactcgtcaggctttagagacttcttgctaaaacccgagctgcttcgtgcaattgtggattgtggtttcgagcaccccagcgaggttcagcacgaatgcatcccacaagctattttggggatggacgtgctgtgtcaggccaagtccggcatgggcaagactgccgtgtttgtgcttgccaccctgcaacagctggagccagttacaggacagtctcacgagcatatgacatctgttacccttgataacttgactgccgtgggcgacgttttgtcacaggcctggggttcctag

SEQ ID NO: 220274 - DNA, 732 bp, synthetic construct
  misc_feature 1..732: note = Description of Artificial Sequence: Synthetic coding sequence
  source 1..732: mol_type = other DNA
atgtggacaatgtcctcttggactatgaagatgatgaggtggcgtcagcagctcggagaaatggggctccgccctttgccacggcgaatgtcccgggcacccatgtccccctcaaccgctttggccttcgtcacgtcctgttcttcgcagagttgttctggcccacttagtactgttgccctgtccatccgtcagaaggtctcagtcttggtgatgtgccatacccgggagctcgctttccagatatctaaagagtacgagcggttctccaagtatatgccaaatgtaaaagtggcagttttcttcggcggtctaagcatcaagaaagatgaggaagtccttaaaaaaaactgcccacatattgtggtcggcacccccggtaggatcctcgccttagccagaaataaatctctcaaccttaaacatatcaagcatttcatccttgacgagtgcgataaaatgcttgaacagcttgatatgaggcgagacgtccaggagatattcagaatgacccctcatgagaagcaggtgatgatgttttctgccactctcagcaaagagattcgcccagtgtgcaggaagtttatgcaagatgtcaatactttacttcctagcctcccacctctgcccgctagatgcctgcttcccttcctggccctatttctaagactcccctgccattcatccgcaaagaaggccgcttgcgctcagttgggggtgatgaccccatag

SEQ ID NO: 220275 - DNA, 732 bp, synthetic construct
  misc_feature 1..732: note = Description of Artificial Sequence: Synthetic coding sequence
  source 1..732: mol_type = other DNA
atgtggactatgtccagctggacaatgaaaatgatgaggtggaggcagcagctaggcgagatggggctgcggccactgccacgcagaatgtcgcgagcacccatgtctccatccaccgcccttgcttttgtgaccagctgtagttcacagagctgcagcggacctttaagcaccgtggcactttcaattaggcagaaggtttccgtcctggtgatgtgtcacacaagagaactggcctttcaaatcagcaaggaatacgagagatttagcaaatatatgcctaacgtgaaggtcgctgtgttcttcggtggcctgtccatcaagaaagatgaagaagtcctgaaaaagaactgtcctcacatcgtagtaggtaccccgggacgcatcctggctctggccaggaacaagagtctgaacctgaagcacatcaagcactttattctggacgaatgtgataagatgctcgaacagttggatatgcgccgtgatgttcaggagatctttcgtatgaccccccacgagaagcaggtgatgatgttttctgccacgttatcaaaggagattaggcctgtgtgtcgtaaatttatgcaggacgtaaacacactgctgccctccctgccccctctcccagcgagatgtctgttgcccttccttgccttatttctgagactcccatgccattccagcgccaagaaggccgcatgtgcccagcttggagtcatgacaccctag

SEQ ID NO: 220276 - DNA, 420 bp, synthetic construct
  misc_feature 1..420: note = Description of Artificial Sequence: Synthetic coding sequence
  source 1..420: mol_type = other DNA
atggccgagaatgatgtggacaacgagcttctggactacgaagatgacgaggtggagacagctgcaggcggagacggcgcagaggcaccagccaaaaaggacgttaaaggtagctatgtttcgattcattcatctggctttcgggattttctgctgaagcctgagctccttcgtgctattgtggactgtgggttcgaacacccctcggaggtgcagcatgagtgtattcctcaggctattttggggatggacgtcctatgccaagctaagagcgggatgggcaaaaccgctgttttcgtgcttgctacacttcagcagttggagccagtgactggccagagtcacgagcatatgacctccgtgacactggataacctcaccgccgtgggggacgtgcttagtcaagcatgggggagctag

SEQ ID NO: 220277 - DNA, 972 bp, synthetic construct
  misc_feature 1..972: note = Description of Artificial Sequence: Synthetic coding sequence
  source 1..972: mol_type = other DNA
atggccgaaaacgacgtagataacgagctactggactacgaggacgacgaagtcgaaacagctgccggaggagatggcgctgaagcaccggcaaaaaaggacgtgaagggatcctacgtttccatacattcttcaggattccgcgactttctacttaaacccgagctcctgcgggctatagttgactgtgggttcgagcatccctccgaggtgcagcacgaatgcataccacaggctatacttgggatggatgtcctgtgtcaggctaagagcggaatgggtaagactgctgtgttcgtgctcgctacgcttcaacaactggaacccgtgacaggccaggtaagcgttctggtgatgtgtcatacacgcgagttagcatttcagattagcaaggaatatgagcggtttagcaagtatatgcccaatgtgaaagtggcagtcttcttcggagggttgagtatcaagaaagacgaggaagtgctgaagaaaaattgtccccatattgttgttggtactcctgggaggatcctggcgctggcaaggaataagtcactgaacctgaaacacataaagcatttcatcctagacgaatgcgacaaaatgttagaacagttggacatgagacgggacgtgcaggaaatctttagaatgactccgcatgaaaagcaagtgatgatgttcagtgctaccctgtctaaggagatcagacccgtgtgcaggaagttcatgcaggacccgatggagatcttcgtggacgacgaaactaagttaacgcttcatggcctgcagcaatactacgttaaactgaaagacaacgaaaagaataggaagctatttgatttactcgatgtgcttgagttcaatcaggaaataacttgtaagagcgtgcaaaggttctcaacaacaaattcctgtgggtaccagccaatttggcccagacatggccaccgagcaggggagcactgcttctag

SEQ ID NO: 220278 - DNA, 1332 bp, synthetic construct
  misc_feature 1..1332: note = Description of Artificial Sequence: Synthetic coding sequence
  source 1..1332: mol_type = other DNA
atggccgaaaatgatgtggacaatgagcttttggactatgaggatgacgaggtcgagacagctgctggcggagatggggctgaagctccagccaagaaagacgtgaagggctcctatgtgtccattcactcttctgggtttagggacttccttctgaaaccggaactcctccgtgctatcgtggactgtgggttcgagcacccttctgaggtccaacacgagtgcatcccccaggccatcttgggaatggacgttctgtgtcaggctaaatcaggcatgggcaaaacagccgtgttcgtgttagctaccctccagcagttggaacccgtcaccgggcaggtctacttgggtagagtccttggtcgcggattttggtgcgtattcgttagcgtgcttgtgatgtgtcacacaagggagctggcatttcagattagcaaagaatatgaacgcttctcaaagtatatgccaaatgtgaaagtggcggtgttttttggcggtcttagcataaaaaaagatgaagaagtgctgaagaaaaattgcccacacatcgtggtaggtaccccagggaggatccttgctctcgccaggaataaaagtctgaatttgaagcacatcaaacattttatcttagatgaatgtgataaaatgctagagcagttggacatgaggcgcgacgtacaggagatattcagaatgacaccacatgagaaacaagtgatgatgttctcagccactctgagtaaagagattcggcctgtgtgtcggaagtttatgcaagacccaatggagatttttgtggacgatgaaaccaagctgactctacatggacttcagcagtactatgtgaaacttaaggataatgaaaaaaacaggaagttgtttgatttgcttgatgtgcttgaatttaaccaggtcgtgatttttgttaagtcagtgcagaggtgtattgccctagctcaacttttggtggagcagaattttccagctatagccatccacaggggcatgcctcaggaggaaagactctcaaggtatcagcagtttaaagattttcagagacggattctcgtcgctaccaatctattcgggagaggcatggatatcgagagggttaacatcgcctttaactacgatatgcctgaggattctgatacatatctccacagggtcgcacgggctgggaggtttggtaccaaaggactagcgatcacgtttgtatctgacgagaacgacgctaagattctcaatgacgtgcaggatagattcgaagtgaacatctccgagttgccagacgaaatcgacatctcaagctacatagagcagacccggtag

SEQ ID NO: 220279 - DNA, 732 bp, synthetic construct
  misc_feature 1..732: note = Description of Artificial Sequence: Synthetic coding sequence
  source 1..732: mol_type = other DNA
atgtggactatgtcttcttggaccatgaagatgatgcgatggcgacaacagctgggcgagatgggcctgaggccgctgcccagaagaatgtcacgggctcccatgtcgccctctactgctcttgccttcgttacatcctgcagttcacagagttgttccgggcctctatctaccgttgcattgtccatcagacaaaaggtaagtgttcttgtgatgtgtcacacgcgggagctggccttccaaatttcaaaagaatacgagaggttttcgaagtacatgccaaacgttaaggtggccgtgttctttggaggtttgtctatcaaaaaggatgaggaggtcctgaaaaagaactgcccccacatcgtggtcggaacacctgggaggatcctcgccctggctaggaataaatcattgaacctgaaacacataaaacacttcatattggatgagtgtgacaaaatgcttgaacaactggacatgcggcgtgatgtgcaagaaatattcaggatgacacctcacgagaagcaggtgatgatgtttagtgccactctcagcaaagaaataagaccagtctgccggaagtttatgcaggacgttaacaccttgttgccatccctcccaccgctccccgcacgttgcctcctcccattcctggccttgttcctgcggttaccttgccacagcagcgctaagaaagcagcatgcgcccagttaggagtgatgactccatag

SEQ ID NO: 220280 - DNA, 1053 bp, synthetic construct
  misc_feature 1..1053: note = Description of Artificial Sequence: Synthetic coding sequence
  source 1..1053: mol_type = other DNA
atgtggactatgtcttcttggaccatgaaaatgatgagatggcgacaacagctgggagaaatgggcttgagaccactgcccagaagaatgtcaagagctcccatgtccccttcaacagctttggccttcgtgacttcttgctcttcacagtcatgttcagggcctctgtccactgttgccctttccatcagacagaaagtggctgtgttctttggcggtctgtcaataaaaaaagacgaagaggtcctgaaaaagaactgcccccatattgtggtcggaacgcccggtcgcattctggcactcgcacgcaacaagtcccttaatctgaagcatattaagcactttatcctggacgagtgcgataagatgctggaacagttggacatgcggagggatgttcaggagatcttcagaatgacacctcacgaaaagcaggttatgatgttttccgccacactcagtaaggagataaggccggtgtgcagaaaatttatgcaggatcctatggaaatcttcgttgacgacgaaactaaactcaccctgcatgggcttcagcaatattatgttaagctgaaggataatgaaaagaaccggaagctctttgatctgctcgatgtcttggaatttaatcaggttgtcatcttcgtgaagtcagtacaacggtgtattgcactggcacagctgttggttgagcagaattttccagccatagccatccatcgcggtatgccacaagaggaacgcttgagtcggtaccaacaattcaaggacttccagaggcgcattttggtcgcgactaacctcttcgggcgaggcatggatatcgagagggtgaatattgcttttaattacgatatgccggaggatagtgatacatacttgcatagagtggccagagccggacggttcggcaccaaaggtctggcaattacattcgtgtctgatgaaaacgatgccaaaatccttaatgacgtgcaggaccgttttgaagtgaatatctccgaattgcctgacgagatcgacatctcctcgtacatcgagcaaaccaggtag

SEQ ID NO: 220281 - DNA, 1332 bp, synthetic construct
  misc_feature 1..1332: note = Description of Artificial Sequence: Synthetic coding sequence
  source 1..1332: mol_type = other DNA
atggccgaaaatgacgttgacaacgaacttcttgactatgaggacgatgaagtggagactgcagctgggggagatggagccgaggcgcctgctaagaaagacgtgaaagggagctacgtgagtatccattcatccggctttagggatttcttattaaagccggaacttctgagggcaatcgtggattgtggattcgaacatccgtctgaggtccagcacgagtgcatccctcaggccatactggggatggacgtgctctgtcaggccaaatcaggaatgggaaagaccgcagtatttgtgttggcaactctacagcagttggaacctgtcaccggccaagtgtaccttgggagggttctcggccgaggcttttggtgtgtgttcgtctccgtgcttgtcatgtgtcacaccagagagctcgcctttcagatcagtaaggaatacgaacggtttagcaagtatatgccgaatgtgaaagttgccgtctttttcggagggcttagtatcaaaaaagacgaggaagtcctcaagaaaaattgcccccacatagtagtgggcacacctgggcgtatcctcgcgcttgcaaggaataaaagcctgaacctcaagcacatcaaacacttcatcttagacgagtgcgacaaaatgctggagcagctggacatgaggagagatgtacaggagattttcagaatgactccccacgaaaagcaggtcatgatgttctccgccacactgagtaaggagattagacccgtttgtcgcaaatttatgcaggatcccatggaaatctttgttgatgacgagaccaagctcaccctccatggcctgcagcaatactacgtcaagctaaaggataacgaaaagaaccggaaactgttcgatctgctggacgtgctggaatttaatcaggtcgtgatattcgtgaagtctgttcaaaggtgcatcgcccttgctcagctgctcgttgaacaaaatttccctgccatagccattcaccgcggtatgccccaggaggaacggctgtcccgataccaacagtttaaggatttccagcgtcggatcctcgtggccacgaacctgttcgggaggggaatggacatcgagagagtgaatatcgcctttaattatgatatgcctgaggatagtgatacctatctgcatagggtcgcccgagccggaagattcggaaccaagggactggctattacttttgtctcagacgagaacgacgccaaaatcctaaacgacgtgcaggatcgatttgaggtaaatattagtgagctcccagacgagatcgacattagcagctacattgagcagaccaggtag

SEQ ID NO: 220282 - DNA, 1053 bp, synthetic construct
  misc_feature 1..1053: note = Description of Artificial Sequence: Synthetic coding sequence
  source 1..1053: mol_type = other DNA
atgtggaccatgtcatcatggacgatgaagatgatgcgctggcgacaacagttgggtgaaatggggttgagacccctacctcggaggatgtcaagggccccaatgagtcctagtactgctctggcgtttgtcacgtcttgctccagccagagttgttctggtcccctatccactgttgcgttatccattcgtcagaaagtggcggtcttctttgggggtttatccattaagaaagatgaggaagtgcttaagaaaaattgcccccacatcgtggtgggcacaccaggccgtatactggccctagccagaaacaagtccctgaatcttaaacacattaaacattttattctggacgagtgcgacaagatgctggagcagctggatatgcggagagacgtgcaggagatttttcgcatgacgccacacgagaagcaggtgatgatgttctctgcaaccctgagcaaggaaattaggccggtgtgccgtaagtttatgcaggatcctatggaaatattcgtcgatgacgagaccaaactgacactgcacgggttgcagcagtattatgtgaaattgaaagataatgagaaaaatagaaaattgtttgacctactggatgttttggagttcaatcaggtggtgatttttgtcaagtctgtccaacggtgcatcgcactggcgcagctcctcgttgagcagaatttcccggctattgcaattcaccgaggcatgcctcaggaggagcgcctgtccaggtatcaacagttcaaggactttcagcggaggattttggtggccacaaatctgtttggcaggggcatggatattgagagggtgaacatagcttttaattacgacatgccagaggactctgacacttatcttcacagggtggctcgggcaggcagattcggaactaaggggctggccatcaccttcgtcagtgatgagaacgatgctaaaatcctgaatgatgtgcaggatcggtttgaggtcaacatctctgagttgcccgacgagattgacatcagctcctacatcgaacagaccagatag

SEQ ID NO: 220283 - DNA, 732 bp, synthetic construct
  misc_feature 1..732: note = Description of Artificial Sequence: Synthetic coding sequence
  source 1..732: mol_type = other DNA
atgtggactatgagctcctggactatgaaaatgatgaggtggagacagcagttgggcgagatgggtctcagaccactcccgaggcgcatgtccagggcccctatgagtccttcaacagctctcgcgttcgtaacctcctgctcgtcccagagctgcagcggtcctctgagtactgtggctctgtctatccgtcaaaaagtgagcgtgttggtgatgtgtcacacccgggaacttgcctttcagatatctaaggaatatgaacgttttagtaagtatatgcctaacgtcaaagtggccgtctttttcgggggtctctctatcaagaaagacgaagaggtcctcaagaaaaactgcccacacatcgtcgtcggtacccccggtcgcatactggctcttgccaggaacaagagcctgaacttgaagcacatcaagcatttcattctcgacgagtgcgacaagatgttagagcagctggatatgaggcgtgatgtgcaagaaatcttccgcatgactcctcacgagaagcaagttatgatgttttcggcaacactcagtaaggagatcagacctgtttgccgcaagttcatgcaggatgtcaacaccttactgccctccctaccaccgttgcctgctagatgcctcctcccatttctagccctgttcctcagacttccctgtcattcttcagctaaaaaagctgcctgcgctcaactgggggtcatgacgccttag

SEQ ID NO: 220284 - DNA, 420 bp, synthetic construct
  misc_feature 1..420: note = Description of Artificial Sequence: Synthetic coding sequence
  source 1..420: mol_type = other DNA
atggctgaaaatgatgttgataacgagctgctggactatgaggacgatgaagttgagactgccgctggcggagacggtgccgaagctccggcaaaaaaagatgtaaaaggcagttatgtctctatccacagttcaggcttcagagactttctgctcaaaccagaactccttagagcaatcgttgactgtggattcgaacatcctagcgaggtgcagcatgagtgtatccctcaggcaatcctgggcatggacgtgctgtgccaagccaagtccgggatgggtaaaaccgctgtgttcgttttggccacccttcaacagctggagccagtgaccggccagagccatgagcatatgacctctgtgacattagacaatctgaccgccgtgggcgacgtgctctcccaagcatggggatcctag

SEQ ID NO: 220285 - DNA, 1053 bp, synthetic construct
  misc_feature 1..1053: note = Description of Artificial Sequence: Synthetic coding sequence
  source 1..1053: mol_type = other DNA
atgtggactatgagttcttggaccatgaagatgatgagatggagacagcagctcggcgaaatgggcttacgtccattgcctcggcgaatgtctcgcgcacccatgtcaccatcaacagccttagccttcgtgacaagctgtagtagccagtcatgttccgggccactctctacggtggcattatccatccggcagaaagttgccgtatttttcggcggactgagtattaagaaggacgaagaggtgcttaaaaagaattgcccccatatagtggtcggcacaccaggcagaattctggcactcgctcggaataaatccttaaatctcaaacatatcaagcactttatcctcgatgaatgtgacaagatgctcgagcaattggacatgcgacgtgatgtgcaggagatctttcggatgacaccgcatgagaaacaggtcatgatgttctctgcaactctctctaaggagatccggcctgtgtgtcgcaagttcatgcaggatcctatggagatttttgtggatgatgaaaccaagcttacattacacggcctgcaacaatattacgtgaagctcaaggacaacgaaaagaaccgaaaactattcgaccttctcgacgtactggaatttaatcaggtggtcatcttcgttaaatccgtccagcgctgtatcgctctcgcccagctgctggtcgagcagaatttcccagctattgctatccaccgcggaatgccccaggaggaacgcttgagccgctatcaacaatttaaggactttcagcggagaattctggttgcaacaaacctttttggacgtggcatggatatcgagcgggtgaacatagctttcaattacgacatgcccgaagacagtgatacctacctacatcgagtggcccgagcaggccgtttcggcacaaaaggcctggctataacatttgttagtgatgaaaacgatgccaaaatcctgaacgatgtgcaggacaggttcgaggtgaacatttccgagctcccagacgagattgacatatctagctatatcgaacagaccagatag

SEQ ID NO: 220286 - DNA, 972 bp, synthetic construct
  misc_feature 1..972: note = Description of Artificial Sequence: Synthetic coding sequence
  source 1..972: mol_type = other DNA
atggccgagaacgatgtggacaacgaactactggactacgaggatgatgaggtggagacagccgcaggaggtgacggcgcagaggctcccgctaagaaggacgtgaagggctcttatgtgagcatccatagttccggctttagggactttcttcttaagcccgaactgttacgggctattgtcgattgtggatttgagcacccaagtgaggtccagcacgagtgtattccgcaggccattctaggtatggacgtgctgtgccaggcaaagtccggcatgggtaagactgcggtgttcgtgctggctactttgcagcagctcgaacctgttaccgggcaggtgtctgtgcttgtgatgtgccacactcgggagctggccttccagatatcgaaagagtacgagagatttagcaaatacatgccaaacgttaaagtggctgtctttttcgggggactttctattaaaaaggatgaggaagtgctgaaaaagaactgtccgcacatcgtggtgggcactccaggtcggatactcgccctcgcaaggaataaatccctgaacctcaaacacatcaagcacttcattcttgatgaatgtgacaagatgcttgaacaattagacatgcgcagggacgtgcaggagatttttagaatgaccccgcacgagaaacaagtaatgatgttctctgcgactttatctaaagaaatacgacctgtgtgcaggaaattcatgcaggatcccatggagatcttcgtggatgatgaaacaaagctgaccctgcacggactgcagcagtattacgtcaagcttaaagacaacgaaaagaatcggaaactgtttgacttgctggacgtgctggagttcaaccaggagatcacatgtaaatccgtgcagaggttcagcaccaccaattcctgtggctatcagcccatctggccaaggcacggacatagggcaggggagcactgtttctag

SEQ ID NO: 220287 - DNA, 1053 bp, synthetic construct
  misc_feature 1..1053: note = Description of Artificial Sequence: Synthetic coding sequence
  source 1..1053: mol_type = other DNA
atgtggacaatgagttcgtggaccatgaagatgatgcggtggaggcaacagctcggcgaaatggggctccgcccattgccacggcgtatgtctcgggcaccaatgagcccttccacagctctagcattcgtgacaagctgtagctcccaatcctgctccggtccattaagtacagtggccctgtctattcggcagaaagtggccgtgttctttggcggactcagcataaaaaaagatgaagaagtgctgaaaaagaattgcccacacattgttgtgggcactccgggacgcatcctcgccctcgcacgcaataagagcctgaatttgaagcacattaaacattttattcttgacgaatgcgacaagatgctggagcagttggatatgcgcagagatgttcaggaaatcttccgcatgacgcctcacgagaagcaggtgatgatgttcagcgcgactctgagcaaagagatccgcccagtctgcagaaagtttatgcaagatccgatggagatttttgtggatgacgagactaagttgaccctccatgggctccagcagtattacgtgaaacttaaggacaacgagaagaaccgcaaactgttcgatctgctcgacgtcctggaatttaatcaggtggtgatcttcgtgaaaagcgtgcaacgctgtatcgctttagcccaactgctggtagaacaaaactttcctgccattgctatccacagggggatgcctcaggaggaacgcctatcaagatatcagcagttcaaagatttccagcgccgaatactggtggctactaatttgttcgggcgaggtatggatattgaacgggttaacattgcgttcaactacgacatgcccgaagacagtgacacatatctgcacagggtggcacgtgctgggagatttggaaccaaaggccttgccattacatttgtgagtgacgaaaacgatgccaagatcctgaacgacgtgcaagataggttcgaggtgaatatttcggagctgcccgacgagattgatatttcatcatacatagaacagacaaggtag

SEQ ID NO: 220288 - DNA, 420 bp, synthetic construct
  misc_feature 1..420: note = Description of Artificial Sequence: Synthetic coding sequence
  source 1..420: mol_type = other DNA
atggcagaaaatgatgtggataacgagttattggactatgaagatgatgaggttgagactgctgccggaggtgacggggctgaggcccctgccaaaaaagacgtaaagggatcttatgtgtccattcacagcagcggctttagggactttctcttaaaacccgaactgctcagggcgatcgtggattgcggttttgagcacccctccgaggtccagcatgaatgcatccctcaggctattctggggatggatgttctctgccaagccaagagcggaatgggcaagaccgcggtgttcgtgcttgctacattgcaacaattagagccagtgaccggacaatcccatgaacatatgacatctgtgaccctagacaatctaacggctgtgggagacgtgctttcccaagcatggggatcttag

SEQ ID NO: 220289 - DNA, 1332 bp, synthetic construct
  misc_feature 1..1332: note = Description of Artificial Sequence: Synthetic coding sequence
  source 1..1332: mol_type = other DNA
atggctgagaacgatgtagacaatgagttactggactacgaagacgacgaggtggaaacggccgcagggggagatggcgctgaagcgccagcaaagaaggacgtcaagggtagctacgtatccatccattctagcggtttcagggactttctgttgaagcctgagctgctgcgcgctatcgtggactgcggattcgaacatccttccgaggtacaacatgaatgtatacctcaggccatactggggatggacgtcctgtgccaggctaagagtggcatgggcaaaaccgccgtctttgtgttggccaccctacagcaactggagcctgtgacagggcaggtgtaccttgggagggtgctggggcgagggttttggtgtgttttcgtgagtgtgttagtgatgtgccatacccgagaactagcctttcagatatctaaggagtacgaaaggtttagcaagtatatgcctaatgtcaaagttgctgttttctttggaggactctctattaagaaagatgaggaagtgctcaaaaagaattgtccccacattgtggttggaacaccagggaggatactcgctttggcgaggaataaaagtctgaatctcaaacacatcaaacactttatcttagatgagtgtgacaaaatgttggagcagttagatatgcgcagggacgtgcaggaaatcttccggatgacgccccatgagaaacaggttatgatgttcagcgccaccctcagtaaggaaatacgtcccgtctgccggaagtttatgcaagaccccatggagattttcgtggacgatgaaaccaaacttactctgcatggactacagcaatattatgtgaagctgaaagataatgaaaagaatcgcaaactcttcgatcttctagacgtcctcgagtttaatcaggtggtgattttcgttaagagcgtgcaacgatgcattgccttggcccagctgcttgttgaacaaaatttcccagcaattgccatccacagaggcatgccgcaggaagagaggttgagtcggtaccagcagttcaaggattttcagcggaggatcctggtggcaacaaacctgttcggtcgtggcatggatatagagagagtgaacatcgccttcaattacgacatgccagaggacagcgacacgtacctgcaccgcgtcgcacgcgctgggaggttcggcactaagggcctggctatcacgttcgtatccgatgagaacgacgctaagatactgaatgatgtacaggatcgtttcgaggttaacatttccgagctacctgatgagatcgatattagtagctatattgagcagacacgatag

SEQ ID NO: 220290 - DNA, 972 bp, synthetic construct
  misc_feature 1..972: note = Description of Artificial Sequence: Synthetic coding sequence
  source 1..972: mol_type = other DNA
atggccgagaacgatgtcgacaacgaattactcgactacgaagacgatgaagtggaaaccgctgctggcggagatggcgctgaagctcccgctaagaaagacgttaagggttcatatgtgtccatccacagctctggttttcgtgatttcttgctcaagcccgaactactgcgggctatcgtcgactgcgggtttgagcacccctcagaggtgcagcacgaatgcattccccaggcaatcttaggtatggatgtcctttgtcaggccaaatctggcatggggaagacagcagtgtttgtccttgctaccctgcagcagctggagccagtcaccggacaggtgtccgtgctggtgatgtgccacacaagagagttagcgtttcagatctcaaaggagtacgaaaggttcagcaagtacatgccaaatgtgaaagtggctgttttcttcgggggactttctataaagaaggatgaggaagtcctcaagaagaattgccctcacattgtggtcggaacgcccggtaggattctggccctggccagaaataagagtctcaacctgaaacacattaaacactttatcttagacgagtgcgataagatgctggagcaactggatatgcgcagggacgtgcaagagatcttccggatgactcctcacgaaaagcaggtaatgatgttctccgcaacactgagtaaagagatacggcctgtttgcagaaagtttatgcaggaccctatggagatctttgtggatgacgagactaagcttactctgcatggtctgcagcagtactacgttaaactgaaggataacgaaaaaaacagaaagctgtttgatttactggacgtgctggagtttaatcaggagatcacctgtaagtcggtgcagaggttctccaccacaaatagttgtggctaccaacctatttggcccagacacggacaccgagccggtgagcactgcttctag

SEQ ID NO: 220291 - DNA, 972 bp, synthetic construct
  misc_feature 1..972: note = Description of Artificial Sequence: Synthetic coding sequence
  source 1..972: mol_type = other DNA
atggcagagaacgacgtcgacaatgaactgctcgattacgaggacgacgaggtcgaaacagcagccggtggagacggcgcagaggctcccgctaaaaaagatgttaagggttcttatgtatccatccacagcagcggcttcagagactttctccttaagccagagttactgcgagccattgtagactgtggattcgaacatccaagtgaagtacaacatgaatgcataccccaagcaatcctcggcatggacgtgctttgccaagccaagagcgggatgggtaagacagcagtgttcgttcttgccacgctgcagcagctggagcccgttactggtcaagtatccgtactggttatgtgtcatactcgggagctggcctttcagatctccaaagagtatgaaagattctccaagtacatgccaaatgttaaagtcgcagtctttttcggcggactatccataaagaaagatgaagaagtcctgaaaaagaactgtccccatatcgtggttggtactcctggccgaattcttgctctcgcccgtaataagtccctcaatctcaagcacattaagcacttcatcctggacgagtgcgataagatgttggagcagttggatatgcggcgtgacgtgcaggagatcttcaggatgaccccacacgaaaaacaggtgatgatgtttagcgccacccttagcaaggagatacgcccagtgtgcagaaagttcatgcaggatcccatggagatctttgtagatgatgagacaaaactaactttacacggtctccaacagtactatgtcaagctcaaggacaatgaaaaaaataggaagttgttcgacctgctggatgtactggagtttaaccaagagataacttgtaagtcagtccagaggttttctaccactaactcgtgcggataccaaccaatctggccaagacacggccaccgtgctggcgaacactgcttttag

SEQ ID NO: 220292 - DNA, 1053 bp, synthetic construct
  misc_feature 1..1053: note = Description of Artificial Sequence: Synthetic coding sequence
  source 1..1053: mol_type = other DNA
atgtggacaatgagtagctggacaatgaagatgatgagatggaggcaacagctgggagagatgggtttacgtccactcccaaggcgcatgagcagagcgccaatgagcccctcaacagccctggcattcgtaacatcttgctcctcccagagctgcagcgggccactcagcaccgtagccctctccattcgacaaaaggttgctgtgttctttggagggctttctataaaaaaggacgaagaggtgctgaagaaaaattgtccacacatcgtggtgggtaccccaggaaggattctggcactggcaagaaataagtccctgaacctgaaacatatcaagcatttcatcttagacgaatgcgacaagatgctggagcaactcgacatgcgcagagatgtccaggagatcttcagaatgacgcctcatgaaaaacaggtcatgatgtttagtgccacactgtcaaaggagattcggcctgtgtgtcgcaagttcatgcaggaccccatggaaatcttcgtagacgatgagacgaaattaaccctgcacgggctccagcagtattacgtgaaactcaaagataatgagaagaacagaaagctgttcgaccttttggacgtcctcgaattcaaccaggtggttattttcgtgaagagtgtgcagcgttgtatcgccttggcccagctccttgtggaacaaaattttcctgctatcgccatccaccgcggaatgccacaggaggagcgattgtccaggtaccagcagttcaaggattttcagcgtcggatcctggtggccacaaatctctttgggagaggaatggatattgagcgtgtaaacattgccttcaactatgacatgccagaagattcagacacctatctgcatagggtggccagggccggacgctttgggaccaagggactggcaatcacattcgtatccgatgagaacgatgcgaagatcctgaatgatgtccaggacagatttgaggtcaacatttcagagttgccagacgagattgacatcagtagctacatcgagcagacacggtag

SEQ ID NO: 220293 - DNA, 420 bp, synthetic construct
  misc_feature 1..420: note = Description of Artificial Sequence: Synthetic coding sequence
  source 1..420: mol_type = other DNA
atggcggagaatgacgtcgacaatgagctactggactatgaggatgacgaggtcgagaccgccgctggaggagacggagcagaagctcccgctaaaaaggatgtaaagggatcttatgtgtctatccatagctccggttttagggactttttactgaaacccgaattgctcagggcaatcgtggactgtggcttcgaacatcctagcgaagtccagcacgaatgtataccacaggcaatacttggaatggacgtgttgtgccaggccaaaagtggcatgggtaagactgcagtctttgttttagctacgctgcagcaactcgagcccgtcactgggcagtcacacgaacacatgactagtgtcacattagataacctgacggcagtcggggatgtcctgtcacaggcttggggcagttag

SEQ ID NO: 220294 - DNA, 1053 bp, synthetic construct
  misc_feature 1..1053: note = Description of Artificial Sequence: Synthetic coding sequence
  source 1..1053: mol_type = other DNA
atgtggacaatgagcagctggactatgaagatgatgcgttggcgacagcagctgggtgagatgggcctgagacctctccctcgaagaatgtctagggctccaatgtcaccgagcaccgccctggcctttgtcacctcatgcagtagccagtcttgctcggggccactatccactgtggccctgagtatccgccagaaagtggctgtttttttcggagggctcagtattaaaaaagatgaagaagtgctgaaaaaaaactgcccccacattgtagtgggaaccccaggccgtatactggctttggccagaaataaatctctaaatctcaagcacattaagcacttcatcttggacgaatgtgataagatgcttgaacagttggatatgcggagagatgtgcaggagatttttcggatgacacctcatgaaaaacaggtgatgatgttctccgctaccctgagtaaagaaatccgccctgtctgccgcaagttcatgcaggacccaatggagattttcgtagatgacgagactaagctcacgctccacgggctgcagcagtattacgtgaagctgaaggataacgaaaaaaataggaagctctttgatctgcttgacgtgctggagttcaaccaggtggtgatttttgtgaaatcagtccagcgttgtatcgcactggcacagcttctggtggagcagaacttcccagctattgctatacatcggggtatgcctcaagaggaacggttgtcccgttaccaacaatttaaagacttccaaagacgtatcctcgttgctactaatctgtttggcagaggcatggacatcgaacgtgttaacattgcgttcaattatgacatgcctgaggactcagatacctacctccatagagtagccagggccggaagattcggcacaaaaggactggctattacgttcgtcagcgacgaaaatgacgctaagattctcaacgacgtgcaggacaggttcgaggttaatatttctgagttacccgatgagattgacatctcatcatatattgaacagacacggtag

SEQ ID NO: 220295 - DNA, 420 bp, synthetic construct
  misc_feature 1..420: note = Description of Artificial Sequence: Synthetic coding sequence
  source 1..420: mol_type = other DNA
atggctgaaaatgacgtggataacgagcttctggattatgaggacgatgaggttgaaacagctgccggtggggacggtgcagaggcgccagctaaaaaggatgttaagggtagctatgtctcaattcactccagcggattccgggatttcctattgaaacctgagctgctgagagcaattgtggattgtggcttcgaacatccctccgaggtccagcacgaatgcattccccaagcaatacttggaatggacgttttatgtcaagctaagtccggtatgggcaagactgccgtattcgtcctggccaccctgcaacagctggaaccggtgaccggacagtcccacgaacacatgacgagcgttacactggacaatcttactgccgtgggggacgttctgtcgcaggcctggggcagttag

SEQ ID NO: 220296 - DNA, 1332 bp, synthetic construct
  misc_feature 1..1332: note = Description of Artificial Sequence: Synthetic coding sequence
  source 1..1332: mol_type = other DNA
atggctgaaaatgatgtggacaacgaactgctggactacgaagacgatgaggtggaaaccgcagctggcggagacggcgctgaggcccctgccaaaaaagacgttaaggggtcttatgtctcaatccatagctctggatttagggatttcttattgaaacctgagttgctgcgcgcaatcgtggattgtgggtttgaacaccccagtgaggtccagcatgagtgtatcccgcaggctatcctgggaatggacgtgttgtgccaggctaaatctggtatgggtaagaccgccgttttcgtactagcgactcttcagcagctcgagccagtcaccggccaggtctacttaggtcgggtgctgggcaggggtttctggtgcgtgtttgtgagcgtgctcgtgatgtgccacacccgcgagcttgcctttcaaatctctaaagaatacgagcgattctctaagtacatgccaaacgtgaaagttgccgtatttttcggcggtctttccatcaagaaagatgaagaggttttaaagaaaaattgcccacacatcgttgtggggacaccagggaggattctagctctggccaggaataaatctcttaatcttaagcacataaaacattttatactcgacgaatgcgacaagatgctggagcagctggacatgagacgtgacgtccaggagatttttagaatgacgcctcatgagaagcaggtgatgatgttctctgctacattgagcaaagaaataaggcccgtctgtcgaaagtttatgcaggaccctatggaaatctttgtggacgacgaaaccaaattgacattgcatggtctgcagcagtattatgtgaaactgaaggataacgagaaaaatagaaagctgtttgatcttctggatgtgttggaattcaatcaagttgttatttttgttaagtcagtgcagcggtgtatagcactagctcaactgctggtggagcagaactttccagctatagccattcatagaggtatgccgcaggaggagcgcctgtcgcgctaccagcagtttaaagactttcagaggcgcatcctcgtggctactaacctgtttggcagagggatggacatagagagggtgaatattgcctttaactacgatatgcccgaagattctgacacttatctacaccgggttgcccgagccggaagatttggtaccaaagggctggccatcacatttgtgtcggacgaaaatgatgccaaaattctcaatgatgtacaggatcgattcgaggttaatattagtgagctgccggacgagatcgacatcagttcttacatcgagcagacaaggtag

SEQ ID NO: 220297 - DNA, 552 bp, synthetic construct
  misc_feature 1..552: note = Description of Artificial Sequence: Synthetic coding sequence
  source 1..552: mol_type = other DNA
atggagatcttcgtcgacgatgaaaccaaactgacactacacggcctgcagcagtattatgtaaagcttaaagataacgagaaaaacagaaaactgttcgacctgttggacgtactagaattcaatcaggtggttatcttcgtcaagagcgtccaaaggtgcatcgcgctggctcagctgttagtagagcaaaattttccagctatcgcgatccatcgcggaatgccccaggaggaacggtggctttctcggtaccagcagtttaaagacttccaacggagaattcttgttgcgaccaatctttttggtcgtggcatggatatcgaacgggttaacatcgctttcaattatgacatgcctgaagactctgacacttatctccatcgggtggcgagagcagggagattcggcactaaggggttagccataacctttgtcagcgacgaaaacgatgcgaagatactaaacgatgtccaggacaggttcgaagtaaacatttctgagctacccgacgagattgatattagtagttacattgagcagaccaggtag

SEQ ID NO: 220298 - DNA, 2073 bp, synthetic construct
  misc_feature 1..2073: note = Description of Artificial Sequence: Synthetic coding sequence
  source 1..2073: mol_type = other DNA
atgggagatgaagactgggaagcggagatcaaccctcacatgagctcatacgtgccgatcttcgagaaggatcgctatagcggcgagaatggggataacttcaatcggaccccggcatcctctagcgagatggatgatggcccatcccggagagaccatttcatgaaatctggctttgctagtggcaggaactttgggaaccgcgacgcgggtgagtgcaataagagagacaatacatccaccatgggcggtttcggagtggggaaaagcttcggtaatagaggtttctctaattctagatttgaagatggggacagctctgggttctggcgggaatcctcgaatgactgtgaagataatcccacccggaaccgaggcttctccaagaggggcgacaacgaccttgacccggatgagtgcatgcaaaggactgggggtctgttcggttcacgcagaccagtcctcagcgggactggaaatggtgacacctcccagagccgttccggatcaggctccgagaggggagggtataaaggacttaatgaagaggtaattacagggagcgggaaaaactcttggaaaagcgaagctgagggcggagagtccagcgatacccaaggtcccaaggttacctatatccccccacccccaccagaggacgaggactccatctttgcacattatcagaccggaatcaattttgataagtatgacacaatactggtggaagtttccggccatgatgcaccacccgcaatcctaaccttcgaagaggctaatctgtgccagaccctgaataacaatatcgcaaaggccggttacactaaacttacgcccgtgcaaaaatatagcataccaattattctggccggaagagatttgatggcctgcgcccagactggttctgggaagacagcggcattcctactacctatactggcacacatgatgcatgatggaatcacagcttcaagattcaaagagctgcaggagcctgagtgtatcatcgtcgcaccaacccgcgagctggtgaaccagatttacctggaggccagaaagttttcttttgggacctgcgtgagggccgtcgtgatctatggcggaacccaattgggccactctatacggcagattgttcagggctgtaatattttatgcgccaccccgggaaggttaatggacataatcggtaaggaaaagatcggcctgaagcaaattaagtacttagttctagacgaggcagaccgaatgttggatatgggctttgggcctgaaatgaagaaacttatcagctgccctggtatgccatctaaggaacagagacagactctcatgttttctgccacctttccggaggagattcaaaggctggcagcggaattccttaagagtaattatttgttcgtcgccgttgggcaagtggggggtgcttgtcgggacgtgcagcagaccgtgttacaggtcggacaatttagtaagcgggagaagctggtagagatactgcgaaatatcggcgatgaacggacgatggtctttgttgaaactaaaaaaaaagctgactttatagccacttttctgtgtcaggaaaagatcagcacaaccagtattcacggtgaccgggagcaacgcgagagagaacaggcacttggtgacttcagatttggcaaatgccccgtactcgtggctacctctgttgctgccagaggactcgacattgaaaatgtgcagcacgtgattaattttgacctgcccagcaccatcgacgaatacgtgcaccggattggtagaaccggacgttgtgggaatacggggagagccataagtttcttcgaccttgagtcggacaatcaccttgcccagcccctcgtgaaggtgctcactgatgctcagcaggatgtgcctgcttggcttgaagaaatcgccttttcgacatacattccgggttttagtggttcaaccaggggcaatgtgttcgcttccgttgacactaggaaaggaaagagcacactgaacaccgcagggttcagcagctctcaggctccaaatcccgtcgatgatgagagctgggactag

SEQ ID NO: 220299 - DNA, 2073 bp, synthetic construct
  misc_feature 1..2073: note = Description of Artificial Sequence: Synthetic coding sequence
  source 1..2073: mol_type = other DNA
atgggagatgaagactgggaagctgagatcaatccccatatgagctcatatgtcccgattttcgaaaaagaccgatacagtggcgaaaatggcgataattttaatagaactcccgcttcctcttctgagatggatgatggtccatcaaggagggaccatttcatgaaatcgggcttcgctagtggacgcaacttcgggaaccgggatgctggagagtgtaataagcgggataatacgtccacgatggggggattcggggtaggaaagagctttggtaatcgaggtttttccaattccagatttgaggacggcgacagtagcggattttggcgggagtcctcgaatgactgtgaagacaaccccactcgtaataggggcttttccaagaggggtgacaacgatctggatcccgacgagtgcatgcagcggaccggtggcctttttgggagccgccgtccagtgctctccggaacaggcaatggagacacctcacaaagtcgaagtgggagcggatccgaaagaggtggatacaagggcttaaatgaggaggttataactggctctgggaagaacagctggaaatccgaggctgagggcggagagtcatcagacacacaggggccaaaggttacctatattccccctccaccccctgaagacgaggacagcatctttgcccattaccagacagggattaattttgataaatacgatacaatcctggtggaggttagcggacacgatgcacctccagccatcttaaccttcgaagaggcaaatctgtgtcagactcttaacaacaatatagctaaagcgggatacaccaaactcacccccgtgcagaagtactctataccaattattttggctgggagggacctgatggcatgtgcgcaaacgggaagcgggaagaccgccgctttcctcttgcctatcctggctcatatgatgcacgacggaattacggctagtcggttcaaagagttacaggagccagaatgcattatagtggccccaacccgggaattagtaaaccagatctatttggaggccaggaaattcagcttcggaacatgtgtgcgcgcagttgtgatctatggaggcacacagcttggacactccatcagacagattgtccaggggtgcaatatcctttgtgcaactcctgggagacttatggatataataggcaaagagaagattgggctcaaacagattaagtatttggtgttggacgaggctgaccgtatgttggatatgggtttcggacccgagatgaaaaaacttataagttgtcccggaatgccatcaaaagagcagcgtcagaccctcatgttctcagccacattccccgaggaaatccagcgcctggctgccgagtttctgaaatctaattatttgttcgtggccgttggacaagtggggggtgcttgtagagatgtgcagcagacagtgctccaggtgggacagttctctaaaagagagaaactggtggagatactgcgaaacataggagatgaaagaacaatggtcttcgtggagaccaagaagaaagccgatttcatcgcgactttcctctgtcaggagaagattagtacaacctctattcacggcgatagagagcagcgcgaacgagaacaagcccttggcgattttcgttttggtaagtgtccagtgcttgtggctacaagcgtggctgcccgaggactcgacatcgagaacgtgcagcacgtcatcaactttgatctcccatcgactattgacgaatatgttcatcggatcggcaggacaggaaggtgcggcaacacaggcagagccatatccttttttgatcttgaatccgacaaccacttggcccaacctctggtgaaggttttgacagacgctcagcaggacgtgcctgcttggctggaagaaatagcgttttccacgtacatccccggtttctctggatccacccgcggaaatgtctttgcctctgtcgacacacggaaaggaaaaagcactctgaacaccgcgggattctcctcaagccaggctccaaatccggtggatgatgagtcttgggactag

SEQ ID NO: 220300 - DNA, 2175 bp, synthetic construct
  misc_feature 1..2175: note = Description of Artificial Sequence: Synthetic coding sequence
  source 1..2175: mol_type = other DNA
atgggggacgaggactgggaggcggagattaatccacatatgtccagctatgtgcctatcttcgaaaaagacaggtactccggcgagaacggggacaattttaataggacgcccgctagctctagcgaaatggacgacgggccatcgagacgggatcatttcatgaagtcagggtttgcctccggacgaaattttggaaacagggacgccggagagtgcaacaagcgagataatactagtacaatggggggattcggcgtgggcaagtcatttggtaaccgaggcttcagtaattcccggttcgaggatggtgattcctcaggcttttggcgtgagagctctaatgattgtgaggacaatccaacccgcaataggggtttcagcaaaagagggggataccgggatggcaataacagcgaagcctcgggcccttataggcgtggaggtcgtggcagttttaggggctgtcggggaggctttggtctgggctctcctaataacgacctagacccagacgagtgtatgcaaagaacagggggattgtttggctcacggcgtccggtcctcagtggcacggggaacggggacaccagtcagtcgcgtagtggctctggatctgaacggggtgggtataaaggactgaacgaggaagtgataacaggtagtggaaaaaacagctggaagtcagaagcagaaggcggagagagctcggacacccaggggccaaaggttacatacatccccccaccacccccagaagatgaagatagtattttcgcccattaccagaccgggattaacttcgataaatacgatactattttggtcgaggttagcggccacgatgcccctcctgccatcctgacatttgaggaggctaacctgtgccagacacttaataacaacatcgctaaggccggttatacaaagttgacccccgtgcaaaagtactctataccgatcatcctcgccggtagggacctcatggcatgcgcccagacgggctctggcaagacagcggctttcctgctgccaatactggcgcatatgatgcatgacggaataacggcaagcaggtttaaggaactgcaggaaccagagtgcatcatagtggctccaacgagggaactggttaatcagatataccttgaggctaggaagttttcctttggcacctgcgtgagagccgtagtgatctacgggggaactcaactgggccactcaatccgtcagattgtgcagggctgtaacatcctgtgtgcaactccaggtagactgatggatatcattgggaaagagaagataggtttgaagcagatcaagtacctggtgctcgacgaagccgataggatgctcgacatgggatttgggcctgagatgaagaagctgatcagctgccctggaatgcccagcaaggaacagcgccaaactctgatgtttagcgccacattccccgaagagatacagagattggcagcagagtttttaaaaagtaattatttgtttgtggccgtcggccaggtaggtggcgcttgtagagatgtgcaacagactgtgttacaggtcggccagttcagcaaaagggaaaagcttgtggagattctccgaaacatcggagatgagcggaccatggtgttcgtggaaaccaagaagaaggcggatttcatcgcaacattcttgtgccaggagaagatttcgacaaccagcatccacggcgaccgagaacagagggaacgggagcaggctttgggcgacttccgcttcggaaaatgccccgtgctggttgcgactagcgttgccgcacgtggattggacattgagaatgttcagcatgtgatcaatttcgatcttccctcgaccatagatgaatatgtacacaggattggaagaacgggcagatgtgggaatacaggccgagccataagcttctttgatctcgagtctgataatcacctggcccagccccttgtcaaagtcctgaccgatgcacagcaggatgttcccgcatggttggaggagatcgcattctcaacctatattcccggtttttccggctccacaagaggcaacgtgtttgcaagcgtggacaccagaaaaggcaagtcgaccctgaatacagctgggttttcatcttctcaggcccctaatcctgtagatgatgaaagctgggattag

SEQ ID NO: 220301 - DNA, 318 bp, synthetic construct
  misc_feature 1..318: note = Description of Artificial Sequence: Synthetic coding sequence
  source 1..318: mol_type = other DNA
atgggggatgaagactgggaggccgagataaacccacatatgtcctcctacgtgcctattttcgagaaagatcgatactctggcgagaatggagataactttaataggacacccgcatctagttcggagatggatgacggcccaagcaggcgagatcatttcatgaagtcaggattcgcgtctggcagaaattttgggaacagggacgcaggagaatgtaacaagagggacaatactagcactatggggggttttggagtcgggaagagctttgggaatagaggtttctctaattctcgatttgaagatggtgattag

SEQ ID NO: 220302 - DNA, 2115 bp, synthetic construct
  misc_feature 1..2115: note = Description of Artificial Sequence: Synthetic coding sequence
  source 1..2115: mol_type = other DNA
atgggggatgaggactgggaggcggagattaatccccacatgtcaagctatgtccctatcttcgaaaaggacagatacagtggcgaaaacggcgataatttcaacagaactccagcgagctcctcagaaatggacgacggaccctccagaagagaccacttcatgaaatcaggcttcgcctcagggcgaaatttcgggaacagagacgctggtgaatgcaataaacgggacaatacctcaacaatgggcggattcggagttggaaagtcttttgggaacaggggcttttccaacagcaggttcgaggatggggattcctcagggttctggcggggataccgtgatggtaataactctgaagcttctggaccttatagacgaggaggaagggggtcattccgaggctgtagagggggatttggcctgggttccccaaataacgacttggatccagatgagtgcatgcagaggaccggtggcctcttcggctccaggcgccctgtccttagcggcacgggcaatggggacacctcccagtctcgatcaggctccgggtctgaaaggggcggatacaaggggcttaacgaagaagtgataaccggaagtgggaagaacagctggaaatctgaggccgaaggcggagagtccagtgacacccagggacccaaagtcacgtatattcctcctcctccacctgaggacgaggattccattttcgcgcactaccagaccggcatcaacttcgataagtatgacaccatcttagtcgaagtaagcggccatgacgccccaccagcaatcctgacattcgaggaagcaaatctctgccagactcttaacaacaatatagccaaggcgggatacacaaagctgacgcctgtgcagaagtattccatacctattatcttggcgggtcgtgacctcatggcctgtgcccagactggtagcggcaaaactgccgcttttctcttgccaatcctagcccacatgatgcacgatgggatcacagcgtcaaggttcaaagaattgcaagagcccgagtgcatcatcgtcgctcctacccgggagctcgtgaaccaaatttatctggaggccaggaagttctcattcggaacctgtgtgagggctgtcgttatatacggaggcacacagctcggtcacagtatccgtcaaattgtccaaggctgtaacatcctgtgcgctaccccaggacgtctgatggatatcatcggtaaggaaaaaatcggtctgaagcagatcaaatacctcgtattggacgaagcggatagaatgctggacatggggttcggtccagagatgaaaaagctgatctcctgtcctggaatgccctctaaggagcagagacaaacactgatgttcagcgcaacctttcctgaagagattcagagattggccgcagagttcctgaagtctaactaccttttcgtggccgtcggacaggttggcggagcgtgccgggacgtacagcagaccgtattgcaggtcgggcagttctccaagagagaaaaactggtggaaatcctgcgcaacataggggacgaacgtacaatggtcttcgttgagacaaaaaagaaggctgactttatagccaccttcttatgtcaagagaaaatttcgacgacatccattcatggtgatagggagcagagagagcgcgaacaggccctaggagatttccgcttcgggaaatgcccagtgctcgtggccacctccgtggccgcaaggggactggatattgaaaatgtccagcacgttatcaattttgacctcccttctaccatcgatgagtatgtgcacagaatcgggcgtacagggagatgcgggaataccggcagggccatctctttctttgatttggaatcagacaaccacctagcacaaccgctggtaaaggttctaaccgatgcccaacaagacgttccggcatggctcgaggagatcgcttttagcacatatatcccgggtttttccgggtcgaccagagggaacgtctttgcctcagtcgacactcgcaaggggaagtctaccttaaacacagccggatttagttcgagtcaggctcctaaccctgtggacgatgagtcctgggactag

SEQ ID NO: 220303 - DNA, 480 bp, synthetic construct
  misc_feature 1..480: note = Description of Artificial Sequence: Synthetic coding sequence
  source 1..480: mol_type = other DNA
atgggagatgaagattgggaggccgagatcaatccacacatgtcttcctacgtgcctatcttcgaaaaagatcgctactctggggagaatggcgataactttaatcggacccctgcatcttcatcagagatggatgacgggccttcaagacgagatcattttatgaagtcaggctttgcttctggacggaacttcggcaaccgcgacgcgggagaatgtaacaaacgagacaacacctccacaatggggggatttggtgtaggtaagtcctttgggaacagaggtttctcaaattccaggttcgaagacggcgattcatctggattttggagagagagttcaaacgactgcgaagacaatcctacccgtaatcggggattttccaagcggggtggctatcgagacgggaataactcagaagcttccggtccataccggagggggggaaggggaagctttcgaggctgcaggggcggatag

SEQ ID NO: 220304 - DNA, 1728 bp, synthetic construct
  misc_feature 1..1728: note = Description of Artificial Sequence: Synthetic coding sequence
  source 1..1728: mol_type = other DNA
atggggtcaaggaatctgttcctcaccaactccccagagagttcaaatgactgtgaggataaccccaccagaaaccgcggattcagtaaacgtggagataacgacctggaccccgatgaatgcatgcagaggactgggggtctatttgggtcacgcaggcctgttctgagcggaacggggaacggagacaccagccagagtcgaagcggctccggttctgagagggatagttggaagtctgaagctgaaggaggcgagagtagcgacacccaggggcctaaagtgacctacattccaccccctcctcccgaagacgaggatagtatcttcgcacactaccaaactgggatcaactttgacaaatatgataccatattagtggaagtaagtggacatgacgccccacctgccattctgactttcgaagaagctaatctctgccaaaccctaaataataacatcgctaaggccggttataccaagctcacgccagtgcagaagtattccatccctattatattagccggtcgagatttgatggcctgtgcccagactgggagtggaaagacagcggcattcttattgcctatcctggcccatatgatgcatgatggcatcactgcaagccgattcaaagaactgcaggaacccgagtgtatcatagtagcccctacacgcgaactggttaaccagatctatctggaagccaggaagttttcctttggcacttgcgtgagggccgtggtgatatacggaggaacgcagctcggacacagcatccgacagatcgtgcaggggtgcaatatattatgcgctaccccgggacgactgatggacattattgggaaggagaaaattgggcttaagcagatcaagtaccttgtgctggacgaggctgaccgaatgctcgatatgggtttcggtcctgagatgaaaaagctgatctcctgccctggcatgcctagtaaggagcagcgacaaacactcatgtttagtgccacattcccagaagagattcaacggctggcggcagaatttctcaagtcgaattacctttttgttgccgtgggccaggttggaggcgcatgcagggacgtgcagcaaactgtactacaggtcggccagttctccaagagagagaagctcgtagagatactacgcaatattggagacgagaggacaatggtttttgtcgagacaaagaaaaaagcagactttattgccacattcctctgtcaggaaaagatctctactaccagtattcatggggacagagagcagagggaaagggaacaggccttgggcgattttcggttcggaaagtgtcccgtgcttgtagccacctcagtggcagccaggggcttagatattgaaaatgtccaacatgtgatcaacttcgacctaccatccaccattgacgagtatgtgcacaggattgggaggactggaaggtgcggaaatactgggcgtgccatctcgttcttcgacttggagagtgataatcacctggcgcaacctttggtgaaggtgctgacagatgcccagcaggatgtccccgcatggctcgaggaaatagctttttcaacatacataccagggttctcagggtcaaccaggggtaatgtgtttgcctctgttgatacacgtaaaggtaaaagcacccttaatactgctggatttagttcctcacaagcaccaaatccggtggatgatgaatcctgggattag

SEQ ID NO: 220305 - DNA, 1869 bp, synthetic construct
  misc_feature 1..1869: note = Description of Artificial Sequence: Synthetic coding sequence
  source 1..1869: mol_type = other DNA
atggaggaaagcgagcctgaaaggaaacgtgctcgcaccgatgaagtgccggcaggtggctcaagatcagaagcagaagatgaggacgatgaggactatgtgccttatgtgcccttacggcagagacgccaactgctactccagaagctgctccagcgccgacgcaagggcgcagctgaagaggaacaacaggacagtgggtccgagcctaggggggacgaggacgacattcccctgggtcctcagtccaacgtttctctgcttgatcagcaccagcaccttaaagagaaggctgaggcccgtaaagaaagtgccaaagagaagcagctcaaggaggaagaaaagatactcgagagtgtggccgaaggacgcgctcttatgtctgtcaaggaaatggctaaggggatcacctatgacgatcccattaagacgtcatggacacccccaaggtacgttttgtctatgagcgaggagcgacatgaacgcgtcagaaagaagtaccatattcttgtagaaggcgatggcatcccaccacctatcaagtcatttaaggagatgaagtttccggcagctatcttgagaggcctgaaaaaaaaaggaatacatcaccctacccctattcagattcaagggatccccacaattcttagcggcagagatatgattggaattgcgttcaccgggagcggaaaaaccctggtattcacacttccagtaattatgttctgtctggagcaagaaaagcgactccctttcagcaaaagggaggggccatacggactgatcatctgcccgagcagggagcttgcaaggcagactcatggcatattagagtattactgccgtctcttgcaggaggactctagtccattgctaagatgtgcactctgtatcggaggtatgagcgtaaaagagcaaatggagaccattagacacggggttcacatgatggtcgccacacccggaagactcatggacctgctgcagaaaaagatggtgtcactggatatttgccgctatctggcattagacgaagcggacagaatgatcgatatgggattcgaaggggatataagaaccatttttagctactttaaaggacagcgccagaccctgcttttctccgcaaccatgcccaaaaagatccaaaacttcgcaaaaagcgcgctcgtcaaaccagtgacaataaatgtgggcagagcgggagccgcatccctggacgtgatccaggaggtagagtacgttaaagaggaggccaaaatggtttacctgctcgagtgtctccaaaagactcctccgccagtcttgatctttgcagaaaaaaaggccgacgttgacgctattcacgaatacttgctgcttaaaggcgtcgaggccgtggccatccatggtgggaaagatcaggaggagaggacaaaagcaattgaagcattccgtgagggcaagaaagatgtgttggtggccacagacgttgcttccaagggacttgacttcccagctatccagcatgtcattaactatgacatgcccgaagagatcgagaactatgtacatcgaatagggagaacaggtcggagcggcaacaccgggatcgcaacaacctttattaacaaggcctgtgatgagtctgtgttaatggatcttaaggcgcttttgctggaggctaagcagaaggtgcctccagtgttgcaggttctgcattgtggcgatgagtcaatgctggatataggaggggagcgcggttgcgccttctgcggcggactgggtcacaggattactgactgtcccaagcttgaggccatgcagacaaagcaagtatcaaatataggcaggaaagactacctcgcacatagctccatggatttttag

SEQ ID NO: 220306 - DNA, 1881 bp, synthetic construct
  misc_feature 1..1881: note = Description of Artificial Sequence: Synthetic coding sequence
  source 1..1881: mol_type = other DNA
atgcaccagataaggaagagcgagtacacccaaccaactcccattcagtgtcagggggtccctgtggcccttagcggcagagacatgatcggcattgctaagactggaagcggaaagactgctgctttcatttggccaatgctaatccatattatggatcagaaggagttggaacctggcgatggcccaatagccgtgattgtttgtcctactagagagctgtgccagcagattcatgccgagtgtaaacgctttggtaaggcctacaacctcagaagtgtggcggtctacggcggaggctcaatgtgggagcaggccaaggccctgcaggagggcgcagaaattgtagtgtgtacccctggtagacttatcgatcacgtcaagaaaaaggccactaacctccagagggtgagttatctcgtcttcgacgaagctgatagaatgtttgacatgggcttcgagtaccaggtccgttcaatcgcctctcacgtgcgcccagaccgacagacacttctgttctcagccacgttccggaaaaagatcgagaagcttgcacgggatattctgattgaccctattcgtgttgttcagggcgatattggggaggctaatgaagacgtcacccagatcgtcgagatacttcactcggggccttcaaagtggaattggctcactagacggctcgttgagttcacttcctcgggcagcgtgttgctgttcgtgactaaaaaagctaatgccgaagaactagcaaacaatttgaagcaggagggtcacaaccttggtctgctacacggagatatggaccagagcgagcgaaataaggtgatctcagatttcaaaaaaaaagacatcccggttctggttgccaccgatgtcgcagcccgtggtctggacattccctctataaaaaccgtgatcaactacgacgtcgcccgtgatatcgatacactgctgacacctaaggactctaacttcgccggagaccttgtgaggaacctcgaaggagccaatcagcatgttagcaaggagctgctggatcttgccatgcagaatgcttggtttcgaaagagccggtttaaaggaggcaagggtaagaaactaaacataggcggtggcggactaggctaccgggagcgcccaggactcgggtctgaaaatatggaccggggaaacaacaacgttatgagcaactatgaagcctacaagcctagtaccggtgctatgggagatcggctcacagccatgaaagcagcgttccagagccaatataaatctcacttcgtagctgcctctctgagcaaccagaaggctgggagtagtgcggcaggcgcttctgggtggaccagcgccggatccctcaattctgttcctaccaacagcgctcagcagggtcacaacagtcctgactcccccgtaacatcagccgctaaggggatcccgggtttcggcaataccggcaatatttccggcgcacctgtgacgtatccgagcgctggcgctcagggcgtgaataacacagccagcgggaacaattcccgggaaggaaccggcggatccaacggtaagcgggagcggtacactgagaatagggggagctctcgccatagtcatggagagactgggaacaggcactcggactcaccccgacatggagatggaggtaggcacggtgatggttaccggcaccccgaatcgtcatctaggcacacagatggtcatagacatggggagaacaggcacgggggtagcgcagggaggcacggggagaacagaggcgctaacgatggcagaaacggcgaatcacgcaaggaggcattcaaccgcgagagcaaaatggaacctcctcccaagcgtaagaaaagcaggtgggactcctag

SEQ ID NO: 220307 - DNA, 2817 bp, synthetic construct
  misc_feature 1..2817: note = Description of Artificial Sequence: Synthetic coding sequence
  source 1..2817: mol_type = other DNA
atgaattggaataagggaggtccaggcactaaacggggttttggattcggtggtttcgccatctctgctgggaagaaagaagaacctaaactgccacagcagagccacagtgccttcggcgcaacatcaagttcatccggctttggtaaatccgctccccctcagctgccctctttttataaaatcggatccaagcgagctaacttcgacgaggagaacgcctattttgaggacgaggaggaggactccagtaacgtggatctgccctatatccccgcagaaaactctccgacacgtcaacagttccacagcaagccggttgacagcgactccgacgatgaccccctcgaggcctttatggctgaagtggaggaccaggccgcaagagacatgaagcgtttggaggaaaaagataaggagagaaagaatgtgaagggcatcagggacgacattgaagaggaagatgaccaagaagcctattttcggtacatggcggagaaccccaccgctggcgtcgtgcaagaggaggaagaggacaacctggaatatgatagcgacgggaacccaatcgctcctacaaagaagattattgatcccctgcctcccatcgatcattcggagattgattacccaccattcgagaagaatttttataatgagcacgaggagattaccaaccttacaccacaacagctgatcgatctgcgacacaagctcaatctgcgggtgtcaggggctgcgcctcccaggccaggatccagctttgcgcattttggtttcgatgagcagctaatgcatcagatccggaaatctgagtatacgcagccaacccctatacaatgtcaaggtgtgcccgtggctttgtctggcagagatatgattgggatagccaagacaggctccgggaagacggctgccttcatttggccgatgctgattcacattatggatcaaaaagaacttgaaccaggtgacggccctattgctgtgatcgtatgtccaactcgcgaactgtgtcagcagattcacgccgagtgtaagcgtttcggaaaagcctacaacctgcgatccgtggcggtgtacggaggcggatcaatgtgggagcaggcgaaggccctccaggagggcgctgaaattgtggtatgcacacctggcagactaatcgatcatgttaagaaaaaggcaaccaatcttcaacgggtttcttatctggtgttcgacgaagcagaccgcatgtttgacatgggcttcgaataccaggtacggagcatcgcaagccacgtccgccctgacaggcagactttgttgttctcagctacatttcggaagaaaatcgagaagctggcgagagacattctcattgacccaatccgggtcgtacagggcgacataggggaggctaatgaggatgttactcagattgtcgagattctgcactcagggcctagcaagtggaattggctcacaagaagactcgtggaattcacctcatcaggttccgtgctgctgtttgtgaccaagaaagctaacgctgaagagctcgccaacaaccttaagcaggagggacataacctgggcttactgcatggggatatggaccagagcgagcgaaataaagttatctcggactttaagaagaaggacatacccgtcctggtcgccaccgacgttgctgctcggggactcgacattccttctattaagaccgtcatcaactacgatgtggcaagggatatcgacacccatacacacaggatcggacggacgggcagagctggcgaaaagggtgtggcttacaccctgcttacacctaaagacagtaatttcgccggtgatctggtgcgaaacctggagggagccaatcaacacgtttctaaggaactgttggaccttgccatgcagaatgcttggttccgtaagagcaggttcaagggcggtaaaggaaaaaaactgaacattggcggaggtggattgggttatcgagagaggccaggcctgggtagcgaaaacatggataggggcaacaataacgtaatgtcgaactacgaagcctataagcctagcacaggagcaatgggcgatagactgactgctatgaaggccgcttttcagagtcagtacaaatcccattttgtggccgcatctctgtccaatcaaaaagccggaagctccgctgccggtgcaagcggctggacttcggccggttcccttaatagcgtacctacgaacagtgcccaacagggtcataatagcccagactcgcctgtaacctccgccgctaagggaatccctggcttcgggaatacagggaacatctctggggcaccggtcacttacccctccgcaggggcacagggcgtcaataatacggctagcggcaacaactctagggagggtaccgggggttccaacggcaaacgcgagagatacactgagaaccgagggtcttcccgccacagtcacggagagactggcaaccgacatagtgacagtcctcgccatggtgatggtggcaggcacggcgacggatatagacacccagagagctcaagtaggcacacggatgggcatagacacggggagaataggcatgggggatcagccggaagacacggggagaatagaggagcgaacgatgggagaaatggtgagtcgagaaaagaggctttcaacagggagagcaaaatggagccaaagatggagcccaaagtggattcgagcaagatggataaggtcgacagtaagacggataagaccgcagatgggttcgcagtccctgagccgcctaaaaggaagaagtccagatgggactcttag

SEQ ID NO: 220308 - DNA, 2817 bp, synthetic construct
  misc_feature 1..2817: note = Description of Artificial Sequence: Synthetic coding sequence
  source 1..2817: mol_type = other DNA
atgaactggaataagggaggacctggtaccaaacggggtttcggcttcggcggatttgcgatcagtgctggaaagaaagaagagccaaaactgcctcagcagtcacactccgcattcggagcaacctcctcgagttctggcttcgggaaatcagctcccccacagctgccgtcattctacaagatagggtccaagcgggcaaacttcgacgaagaaaatgcctatttcgaagatgaagaagaggactcttcaaatgttgatctgccatacatccctgctgaaaacagtcccactcgccaacagtttcactccaagcccgttgactccgatagcgacgacgaccccctggaagcgtttatggcagaggtggaggaccaggccgctcgggatatgaagaggttggaagagaaggataaggaacgcaaaaatgtaaagggtataagggacgatatcgaagaggaagatgaccaagaggcctatttccgatatatggctgaaaatccgacagccggagtagtgcaggaggaggaggaagataacttggagtatgactctgacggaaatccaatagcccctacgaagaagatcatcgatcctctcccccctattgatcactccgaaattgattaccccccatttgaaaaaaatttctacaacgagcacgaggagataacaaacctgacacctcagcaactcattgaccttagacacaagctgaatctgagggtcagcggcgctgcccctccccgaccaggatcctcattcgcacatttcggattcgatgaacaactaatgcatcaaattcgaaagtccgagtacacccaacctaccccaatccagtgtcagggcgtccccgtagctctgtcgggccgagacatgatcggcatcgccaagaccgggtccggcaagacagctgcattcatctggcccatgttaatacatatcatggatcagaaggagctggaacctggtgatggaccaatcgccgtgattgtctgtcctacacgggaactgtgccagcagattcatgctgaatgcaaaagattcgggaaggcctacaatctccgcagcgtagccgtctatggcggaggctccatgtgggagcaggcgaaggcacttcaggagggagctgaaatcgttgtatgcaccccaggaaggttaattgatcatgtcaagaaaaaagccacgaacctgcagcgggtgtcgtacctcgtgtttgatgaagctgacaggatgtttgacatggggtttgaataccaggtcaggtctattgcgtctcatgtccgtcctgaccgccagactctgttgttttcggctacatttcgcaaaaagattgagaaactggccagggacattttgatcgaccccatcagagtagtccagggcgacattggggaggccaacgaggatgtcacccagattgtcgaaattctacatagcggtccttccaagtggaactggctgacgagaaggctcgtggaattcactagcagcggctctgtgttgctttttgtgacaaagaaagcaaatgccgaggagctcgcaaataatctgaaacaagagggccacaatctcgggctgctacacggcgatatggatcaaagcgaaaggaacaaggtaatctctgatttcaaaaagaaggatatccccgtcctggtggccactgacgttgccgctcgcggtttggatatacccagtattaaaactgtgattaactatgacgttgcaagggacatcgacacgcacacgcaccgtatcggaagaacagggagggcaggagaaaagggagtggcatacaccctgttgaccccaaaggactctaacttcgcaggagatctagtacgcaatcttgaaggagccaatcaacatgtgtctaaagaacttttggacctagccatgcagaatgcttggtttcgcaagagcagattcaaaggagggaaggggaagaagctgaacatcggtggtggcggattgggataccgtgaaaggcccggattgggatccgaaaacatggacagagggaataacaacgtcatgagcaactacgaagcctacaagccctccaccggcgcaatgggagaccgacttaccgcaatgaaggccgcatttcaatcgcagtacaagtcacatttcgtggccgctagtcttagtaatcagaaagcaggctcttccgccgcaggcgcatccggctggacaagcgcgggatccttgaattccgttccgactaacagtgcacagcagggtcacaactcccctgattccccagtcacgagcgccgctaaaggaatccccggtttcgggaatacaggcaatatttccggtgccccagtgacatacccgtctgcaggcgcacagggggtgaacaataccgccagcgggaacaattctcgggagggaactgggggttccaatggtaaaagagagcgatacaccgaaaaccgaggcagcagcagacatagccatggggagaccggaaataggcattctgactcccctcggcacggcgatggcggtaggcatggtgatggctacaggcatccggaaagttctagtcgacacaccgatggacataggcatggcgagaatagacacgggggatccgctgggaggcacggagagaaccggggagcgaatgatggtcgcaacggcgaatcccgaaaggaagcgttcaaccgcgagtctaagatggagcctaagatggaacccaaggtcgattcgagcaagatggacaaagtggatagcaaaacagacaaaacagcggatggtttcgctgtgcctgagcctcctaaacgcaaaaagtcccgttgggactcttag

SEQ ID NO: 220309 - DNA, 2817 bp, synthetic construct
  misc_feature 1..2817: note = Description of Artificial Sequence: Synthetic coding sequence
  source 1..2817: mol_type = other DNA
atgaattggaacaagggaggccctggaaccaagcgcggatttggctttggtgggtttgctatcagcgcaggaaaaaaggaagagccaaagttgcctcagcagagccatagtgccttcggagctacctcctcatccagcgggtttgggaaaagtgcgccaccccaactgcctagcttttacaagatcggtagtaaacgggctaatttcgacgaggagaatgcttactttgaggatgaagaagaagatagcagtaacgtggatctcccatacattcccgcagagaattcgcctacacggcagcaattccactccaagccagtcgattccgactccgatgacgacccattagaggccttcatggccgaagtagaagaccaggccgctagagatatgaagaggctggaggagaaagataaggagcgtaagaacgttaaaggcattcgggacgatatagaggaggaagacgatcaggaggcttactttcggtatatggctgaaaatcctacagctggagtagtgcaagaggaagaggaagataatctggaatatgacagcgatgggaaccccatcgccccaacgaaaaagataattgatccgctgcccccaatagaccactctgagatagattatcccccatttgagaaaaacttctacaacgaacacgaggaaataacaaacctaacacctcaacagctcattgacctgagacacaagctgaatctgcgagtgtcaggagccgctccgccacgccctggctctagcttcgcacactttggcttcgacgagcagcttatgcaccaaattcgtaagtctgaatatacacagccaacccctatccagtgtcaaggggttcctgtggctttgagtgggcgtgatatgataggcatcgcaaagactggctcagggaagaccgccgcattcatctggccaatgctcatccatataatggatcaaaaggagctcgagccaggggacggtccgatcgcggtcatagtgtgtcccactcgggagctatgccagcagatccacgcagaatgcaaaaggttcggcaaagcatataatctccgatctgtcgcagtctatggcggaggctctatgtgggaacaggccaaggcactccaggaaggcgctgagatcgttgtgtgcacaccaggacggctcattgaccacgttaagaaaaaagctactaatttacagcgcgtgtcttatttggtattcgatgaggctgacagaatgttcgatatgggattcgagtaccaagtgagatccatcgcctcccacgttagacccgaccggcagactctgcttttttctgccacattcagaaaaaagattgaaaaactcgctcgagacatactcatcgatcccatccgggtggtgcagggagacatcggggaagccaatgaggatgttacccagattgtggaaatcctgcactcaggccctagcaagtggaattggctgacacggcgtctggtagaattcactagttctggctctgtccttttgtttgtgactaaaaaagccaacgccgaggagctggccaacaacctgaaacaggagggccacaacctcgggctcctgcacggagacatggaccagagtgaacgaaataaagtgatttcggactttaaaaagaaggatattccagttctcgtcgcgaccgacgtggcggcaagaggcttagacatcccaagtataaagacagtgataaattatgatgtggctcgggacattgatacacacacacatcggataggtagaacagggagggccggagagaaaggtgtagcctacaccttgcttaccccgaaggattctaatttcgcaggcgatttggttcggaacctcgagggcgcaaaccagcatgtgagcaaggaactactggacctcgcaatgcagaatgcttggtttaggaagtcccgcttcaaaggagggaaagggaaaaagcttaatattggtgggggagggctaggatacagggagaggcccggtttgggaagcgagaatatggaccgtggtaataacaacgtaatgtcgaactacgaagcgtacaagccgtcgaccggagcaatgggtgatcgtctcaccgccatgaaagcggcatttcagagccagtacaagagccatttcgttgcggcatcactctcgaatcagaaagcaggctcatctgccgctggcgcttcaggatggacgagcgcaggatcattaaactccgttccaactaactctgcacaacagggccataactcacccgacagtcctgttacctcagccgctaaggggatacccggattcggcaataccggcaatatttcaggcgcacctgtgacatacccctcagctggggctcagggtgtgaacaacaccgcatcagggaacaattcccgtgaaggcacaggtggctccaacggtaagcgggaacgctacaccgaaaatcgcggtagctccaggcactcccacggcgagactggaaacaggcattccgactcgccccgtcacggggacgggggtcggcacggagacggataccgccatcccgagtcttcaagtaggcatacagacggccatcgccacggcgaaaatagacatggtggatctgctggcaggcatggagaaaaccggggagccaacgacggcagaaatggtgagagccggaaagaggcattcaatagagaaagcaaaatggagccgaagatggagcccaaggtggacagctcaaagatggacaaagtggactcaaaaacggacaagactgcagacggctttgctgtgcccgagccaccaaagcggaaaaagtcccgatgggacagttag

SEQ ID NO: 220310 - DNA, 2817 bp, synthetic construct
  misc_feature 1..2817: note = Description of Artificial Sequence: Synthetic coding sequence
  source 1..2817: mol_type = other DNA
atgaactggaacaaagggggacccggtacaaaacgtggtttcggcttcgggggattcgcaatttccgccggaaaaaaggaggagccgaagctgccacagcagtcccacagcgccttcggcgctaccagcagttcttctggctttggaaaaagtgccccaccccagcttcctagcttctacaagatcggtagcaagagggctaatttcgatgaagaaaatgcctatttcgaggatgaagaagaggatagctcaaacgttgaccttccctacatcccagcggagaactcacccaccaggcaacagttccattctaaaccggtcgactctgatagtgatgacgacccactagaggcattcatggcagaggttgaggaccaagccgcaagagacatgaaaagactcgaagagaaagataaggaaagaaagaatgtgaaaggcataagggacgacatagaggaagaagacgaccaagaggcttactttcgatatatggccgaaaaccctacagccggagtggtacaagaagaggaagaggacaatctggagtatgactcggacgggaaccccattgcccctacaaaaaagatcatagacccattgccacctatcgaccactccgagatcgactatccgccatttgagaaaaatttctataacgaacatgaggagattaccaacctgacaccccaacagttaattgacctgagacacaagcttaaccttagggtttccggcgctgcccctcctagacctggaagttcttttgcccactttggcttcgacgaacaattgatgcaccagatacgcaagagtgaatatacccaacctactcctatacaatgtcagggcgttccggtagccctttctgggagggacatgatcgggatcgccaaaaccggctctggcaagactgcagccttcatctggcccatgctgatccatatcatggaccagaaggaactggaacctggtgacggacccatcgctgtgatcgtctgtcctacgcgggaactgtgccaacaaattcacgcggaatgcaagaggttcggaaaagcctacaacctccgatccgtcgctgtgtacggaggaggttccatgtgggagcaggccaaagcacttcaggaaggagccgagattgtagtgtgtacaccgggaagactgattgatcacgtgaagaaaaaagccacaaatctccagcgtgtctcttacctggtgtttgatgaggctgatagaatgttcgacatggggtttgagtaccaggttcgctctattgctagccacgtccggccagatcggcagacactgctattctccgctacatttagaaagaagattgaaaagctcgccagggatattttaattgatcccatccgggtggttcaaggggatattggagaggctaatgaagatgttacccagattgtagagatcttgcacagcggacccagcaagtggaactggctgacgcggagattagtcgagtttacctcaagcggtagcgtcttgttgttcgtgactaaaaaagctaacgcggaagagttggctaacaatctcaagcaggagggccacaacttggggctgttgcatggggacatggaccagtccgagaggaataaggtgatctctgacttcaagaaaaaggatatcccagtactggtagcgactgatgtcgcagctcgcggtctcgatatcccaagcataaagaccgtgataaactacgatgtggctagggatatcgatactcatacgcatcgaattggccgtaccggtcgtgccggtgagaaaggggtagcatatactttattgactcccaaggattcaaattttgcaggtgacctggtcaggaacctcgaaggtgcaaatcagcacgtatcaaaggagctgctggatctcgcgatgcagaacgcttggttccgcaaatcccgatttaagggaggcaaaggaaagaagctcaacattggaggaggtgggctgggctaccgtgaacggccaggactcggcagtgagaatatggacagaggtaacaataacgtcatgagcaattatgaagcctacaagccgagtaccggggctatgggagacaggctgacagctatgaaggcagctttccagtcccagtataaatctcactttgttgcagcgagtctgtctaaccagaaggcgggatcctcggccgcaggagcaagtggatggacttctgccggtagtttgaattccgtgcccaccaattccgcccagcagggccacaatagccccgactcccctgttacatcagccgctaagggcatccccggattcggcaatactgggaacatcagtggagctcctgtgacatacccaagtgcaggcgcacagggagtcaacaacaccgcaagtggcaataattcccgggagggaaccggaggttccaacggcaaacgcgaacgttacacagagaatcggggttcatctcggcattcccacggcgaaacaggaaaccgccactccgactcgcccaggcacggtgacgggggtcggcacggggacgggtataggcacccagaaagctcttcccgccacactgatggccatcgccacggcgagaataggcatggcggaagcgccggacggcacggcgagaatcggggagcgaatgacggacggaatggagaatctcgaaaggaagcattcaatcgggagtctaaaatggaacctaagatggagccaaaagtggactcatccaagatggacaaggtcgacagcaaaactgacaagacagccgatggatttgccgtgccagaaccacccaagagaaagaagtcccgatgggattcttag

SEQ ID NO: 220311 - DNA, 1947 bp, synthetic construct
  misc_feature 1..1947: note = Description of Artificial Sequence: Synthetic coding sequence
  source 1..1947: mol_type = other DNA
atgtctcatcatgggggtgccccaaaagcatcaacatgggtcgtagcatccagaaggagttccacagtgtctcgcgcaccggaacgcagaccagccgaggagctgaaccggacgggccctgagggatactctgtcgggaggggcggacgatggcggggaaccagccgtcctccagaggctgtcgctgcgggtcacgaggagctccccctgtgtttcgctttgaagagtcactttgttggcgcagttatcggccgaggaggctcgaaaatcaagaacatccagagcactacgaatactaccatacagattatccaggagcagcccgagagcctcgtgaaaatatttgggtctaaagccatgcagaccaaggcaaaagccgtgatcgacaatttcgtgaagaagctcgaggaaaattacaattccgaatgtggcattgataccgcttttcagccttcagtcggcaaggacgggagtactgataacaatgtagttgctggtgatcggccactgatcgattgggatcagattagggaggaaggactcaaatggcagaagacgaaatgggccgatcttccacctataaaaaaaaatttctacaaggagagcacagccaccagcgccatgtcaaaggtagaggctgatagttggagaaaggaaaattttaatataacttgggatgacctgaaagatggagaaaaacgcccaattccgaaccccacctgcacgttcgatgacgcatttcagtgttacccagaggttatggaaaacattaagaaggctgggttccaaaaaccgacccctatccagtcccaggcatggcctatcgtgcttcagggcatcgacctgatcggcgtagcccaaacaggaacaggcaagacactttgttacctcatgcccggttttattcatctggttctgcagccctcgctgaaaggtcagaggaacaggcctggtatgctcgtgctgacgcctactcgcgaactagctctacaggtggaaggagaatgctgcaagtactcctacaagggacttagaagcgtttgtgtttatgggggaggtaatcgggacgaacagatcgaggaactaaaaaagggcgttgatataataatcgcaaccccaggacgtctcaatgacctgcagatgtccaactttgttaatctcaaaaatattacctatcttgtcctggatgaggctgacaaaatgctggacatggggttcgagccacagataatgaaaatcctcctggatgtccggcctgacagacaaacagttatgacctcagcgacatggcctcattctgtgcaccgtttggcacagtcttaccttaaagagccaatgattgtctatgtgggcacgcttgacctcgtggccgtgtccagcgtcaaacagaacatcatcgtgacgactgaggaagagaagtggtcacacatgcaaacctttctgcaatctatgtcaagtactgacaaggtcatcgtctttgtgtcccgcaaggcagtcgctgatcacctcagctcagatctcattctcgggaatataagtgtggagtccctacatggagaccgagagcaaagggaccgtgaaaaggcactggaaaactttaagacaggcaaggttagaattttgattgccacagatttggctagccgaggactagatgtacacgacgtgactcatgtatataattttgatttcccacgaaatattgaagaatatgtgcatagaatcggtagaactggacgggcaggccgtactggcgtgtctatcactaccttaaccaggaatgattggagggttgcgtccgaacttattaacattctggaaagagccaatcaatcgatacctgaagagttggtttcaatggcggaaagattcaaagcccaccagcagaagcgggagatggaacgcaagatggagaggccccaaggacgaccgaagaaattccattag

SEQ ID NO: 220312 - DNA, 588 bp, synthetic construct
  misc_feature 1..588: note = Description of Artificial Sequence: Synthetic coding sequence
  source 1..588: mol_type = other DNA
atgagtcatcatgggggtgccccaaaagcctctacatgggtggtggcgtcccggagatcttcaaccgtgtctagggcaccggagcgcagacctgcggaagaactcaacaggactggccctgagggctactccgtcgggaggggaggcagatggaggggcacctcccggcctcctgaggcagtggcagcaggtcacgaggagttgccgttgtgttttgccctgaagtcccacttcgtgggggctgtgatcggtaggggtgggtcgaagataaaaaacattcaatctacaaccaatacaaccatccagattatacaggaacagcccgaaagccttgtgaaaattttcggttcaaaggctatgcaaactaaggcgaaggcagtcatagacaattttgtaaagaaactggaggagaactacaattccgagtgcgggattgacaccgcattccaaccatctgtgggtaaagacggatcaaccgacaataatgtggtggccggtgaccgccctttaattgactgggaccagatccgcgaagaaggcttgaagtggcagaagacaaaatgggcaggcaagaaaatattgatctag

SEQ ID NO: 220313 - DNA, 675 bp, synthetic construct
  misc_feature 1..675: note = Description of Artificial Sequence: Synthetic coding sequence
  source 1..675: mol_type = other DNA
atggaaagtggagcttatggtgctgctaaggcaggaggtagcttcgacctccgccgttttctgacccagccccaggtggtggctagagcggtgtgccttgtctttgcactgattgttttttcttgcatatatggggagggatatagtaacgctcatgaatcgaaacaaatgtattgcgtcttcaaccgaaacgaggatgcctgtagatacggcagcgcaattggggtgttggcctttctggcctccgccttctttttggtggtggacgcctactttcctcagatcagcaatgcaacggaccggaaatatctggtgatcggcgaccttctgttcagtgccctttggacattcctctggttcgttggtttctgctttcttaccaaccagtgggcggtgacaaatcccaaggacgtgctcgttggagcggacagcgtccgcgcagctatcacattctcattcttttcgatcttctcctggggagtgctggcatccctcgcatatcagcgctataaggctggcgtcgatgactttatccaaaactatgttgaccccacaccagaccctaacacagcatatgcatcttacccaggcgctagcgtcgacaactatcagcagccaccctttacccagaacgccgaaacgactgaaggctatcagccgccacctgtgtattag

SEQ ID NO: 220314 - DNA, 1635 bp, synthetic construct
  misc_feature 1..1635: note = Description of Artificial Sequence: Synthetic coding sequence
  source 1..1635: mol_type = other DNA
atgtctgggtactcctccgaccgcgaccggggaagggaccgtggctttggtgcaccaagatttggtggatctagagctggtcccctgtcaggcaagaaattcggcaaccccggagaaaagcttgtgaaaaagaagtggaatcttgatgaattgcccaaatttgaaaagaatttttaccaagaacaccctgacctggctaggcgtacagcccaggaggtagaaacataccggtacctgctgcccgcaatcgtgcacatcaaccaccagccatttctggagcgaggagatggtccaatatgtttggttctcgcccctaccagagagctcgcacaacaagtgcagcaagtcgccgcagagtattgcagggcatgccggctgaaaagcacgtgtatctacggaggagctccaaaaggtcctcagatcagagatctagagcgtggagtggaaatttgcatcgcaacacctggtcggctgattgatttcttagaatgcggcaagactaacttgaggaggactacatacctggtgctagatgaagccgaccggatgctcgatatgggattcgaaccgcaaatccgtaagatcgttgaccagattcggccagatcggcaaacgttgatgtggtctgccacttggccaaaagaagtccgccagttggccgaggacttcctaaaggactacatccacatcaacataggggctctggagcttagcgcaaatcacaatattctccaaatagtcgatgtctgtcatgatgtcgagaaagacgagaaattaatccgcctgatggaagagattatgagcgaaaaggagaataagactatcgtctttgtggaaacgaagaggcgctgtgatgaactgacgcgcaagatgagacgtgatggttggcccgcaatggggattcacggggacaagtcgcaacaagagagagattgggtcctgaatgagtttaagcacggaaaggcgcctattctcatcgcaaccgatgtcgccagccggggattggacgtggaagatgtgaaatttgtcatcaattacgattatcctaacagcagcgaggactatatccaccggatcgggagaactgcacggtccaccaagaccggcacagcctacactttctttactccaaacaatatcaagcaggtcagtgatctcatctcagtcctgcgcgaggccaaccaggcgattaacccaaaactcttgcagttggtcgaggaccgcggatccggtcggagtcgcggacgcggagggatgaaagatgacagacgtgatagatacagtgctggaaagcgtggaggctttaatacctttcgtgacagggagaactatgatcgcggttacagcagcttactgaagagagacttcggagcgaaaactcagaacggcgtctacagtgccgcaaattacacaaatgggtccttcggaagtaacttcgtgtccgccggaatccagacttcgttccgcacaggaaacccgactggcacataccagaacggctatgacagcacccagcagtacgggtcgaacgtgcctaacatgcataatggaatgaaccagcaggcatacgcgtacccggcaactgctgcagcacctatgattggatatccaatgcccactggttacagccagtag

SEQ ID NO: 220315 - DNA, 1845 bp, synthetic construct
  misc_feature 1..1845: note = Description of Artificial Sequence: Synthetic coding sequence
  source 1..1845: mol_type = other DNA
atgtccggctactccagtgatagagaccgaggaagggaccggggattcggggcacctagatttggaggatctcgggcaggaccgctgagcgggaagaaatttgggaacccgggtgaaaagctggtcaaaaagaagtggaatctggatgaacttcctaagttcgaaaagaacttctatcaagagcaccctgacctggctcggcgaacagcacaggaagtagagacttaccgacgtagcaaagagattacagttcgaggtcacaattgccctaaacctgtcctgaatttctatgaggctaattttcctgctaacgttatggatgtgatagcaagacaaaactttaccgagcccacggcaattcaggcacaaggatggcctgtggccctctctggccttgatatggtcggggttgcgcagactggatcgggcaagaccttgagttaccttctgcccgcaatcgtccatataaatcaccagcctttcctcgagcgaggagatggtcctatctgtctggtcctggcgccaactcgggaactggcccaacaagtgcagcaagtcgccgctgaatactgtcgcgcatgtagattaaagtccacatgcatctatgggggagcccctaagggtcctcagattagggacctggagaggggcgtagagatctgtattgctacgcccggaaggctgatcgatttcctcgagtgcggcaaaactaaccttagaaggacaacatatctcgtgctggatgaggcagataggatgctggacatgggatttgagccgcagattcgcaaaattgtggaccagatcaggcccgataggcagacactcatgtggagtgccacttggcctaaagaggttcggcaactcgccgaggacttccttaaagactacatccacattaatattggagctctggagctgagcgcgaatcataacatcctgcagattgtggacgtgtgccacgacgttgaaaaagatgaaaagttgatccggctgatggaggagatcatgagcgagaaggagaataagaccatcgtttttgtggagacaaaaagacgctgcgacgaactaaccagaaaaatgaggcgggacgggtggcccgctatgggtatacacggggataaaagtcagcaggaacgggactgggtgctaaatgagttcaagcacggtaaggcccctatcctaatagcgacagatgtggcttcccgcggactcgacgtcgaggatgtgaaattcgtcattaactacgactatcccaatagcagcgaagattacattcacagaattgggcgtactgcgaggtccaccaagaccgggactgcgtatactttttttaccccgaacaatatcaaacaagtgtctgaccttatcagcgttctcagagaagcaaatcaggccattaatccaaagctactgcagcttgttgaagataggggctcaggacgcagccggggacgcggtggtatgaaagacgaccggagagacagatattctgctggtaagcggggaggttttaacaccttccgggaccgggagaattacgatcgcggatactcttctctattgaaacgcgacttcggcgctaaaacacagaacggcgtgtattctgccgcaaattataccaacgggtcatttggctcgaattttgtttccgccggtattcagacttcattccgaacaggcaaccctacaggtacctaccagaacggctacgacagcacacaacagtacgggtccaacgtgcctaatatgcataacgggatgaaccagcaagcgtacgcttatccagctaccgccgctgcacccatgatcggttatccaatgcccacggggtatagtcagtag

SEQ ID NO: 220316 - DNA, 1800 bp, synthetic construct
  misc_feature 1..1800: note = Description of Artificial Sequence: Synthetic coding sequence
  source 1..1800: mol_type = other DNA
atggacgtccatgatctctttcggaggctgggagccggtgccaagtttgacacccgccgattttccgctgatgctgcacggttccagattggcaagcggaagtatgacttcgactcatcagaggtgctgcaggggttggatttctttggaaataaaaagagcgtgcctggggtctgcggtgcttctcagacacaccagaaaccgcaaaatggcgagaagaaggaggaatccctgactgagcggaaaagagaacaaagcaagaagaaaagaaagacgatgactagcgagatcgctagtcaggaggagggcgcaaccattcaatggatgagcagcgtcgaagcaaagattgaagacaaaaaggtgcagcgggagtccaaactgacgagcggtaagcttgagaatctgagaaaggaaaagattaattttctgcgcaacaaacataagattcatgtgcagggtactgatctgccggatcctatcgctacctttcagcagctggaccaggagtacaagattaatagccgacttctgcagaacatcctggatgctggtttccagatgcccacccctattcaaatgcaggccatacccgtcatgctccacgggagagaactgcttgcctccgctccaacaggcagcggcaaaactctggctttttctatccctattctaatgcagctaaaacagccagccaacaagggttttcgcgctctaattatttcgcctacccgagagctggcttcgcagattcaccgggaactgatcaagatctcagagggaacgggttttagaattcacatgatccataaagcagccgtggccgctaagaagttcgggcctaagtctagtaaaaaattcgatatcctcgttacaacacctaatcggctaatctatctgttgaagcaggatccacctgggatcgacttagctagtgttgaatggctggtcgtcgacgaatcggacaagttgttcgaggacggaaagaccggattcagagatcagctggccagtatcttcctagcgtgtaccagccataaggtcagacgtgctatgttttcagccaccttcgcgtatgacgtggaacagtggtgcaagctgaacctagataatgtaatttcagtttcaattggtgctcgaaatagcgccgtggagaccgtagaacaagaactgttgtttgtgggctctgagacgggaaagctgttggcaatgagggaactggtgaaaaaaggatttaatccaccggtgctcgtctttgttcaaagcatagagagggccaaagaactgtttcatgagctgatttacgagggtattaacgttgacgtgatccatgcagaacgtactcagcagcagcgcgacaacacagtccactcctttcgggcaggcaagatctgggttctgatctgcaccgcactactggccagaggcatagatttcaaaggagtcaaccttgtcatcaattacgattttcccacatcgtccgtcgagtatatccaccggatcggcaggacaggaagagctgggaataagggaaaggcaattaccttttttactgaagatgacaagccactgctgagatccgtcgccaatgtcattcagcaagccggttgcccggtacccgagtacataaaaggtttccagaagctgctgtccaagcagaaaaagaaaatgatcaaaaagcccttagagagagagagtatttctacaacccccaaatgttttctcgaaaaggcaaaagacaaacagaaaaaggtgacaggtcagaacagcaagaagaaagtggccctggaagataagtcctag

SEQ ID NO: 220317 - DNA, 1476 bp, synthetic construct
  misc_feature 1..1476: note = Description of Artificial Sequence: Synthetic coding sequence
  source 1..1476: mol_type = other DNA
atgtcatcagtggaggccaaaattgaggacaaaaaggtccagagagaaagtaagctgacatcgggaaagctggagaatttacgaaaggaaaaaataaatttcttaagaaataagcataagatacacgtacagggaactgatctgcccgatccgatagccacattccagcagctggatcaagaatacaagatcaattctcgactgctacagaacattttggacgctggtttccagatgcccacccctatccagatgcaagcgatcccagttatgcttcatggtagggaactcctggcctctgcgccaacaggatctgggaagacgctcgcgttttcaattcccatcctaatgcagcttaaacagccggcaaacaagggatttagggcgctgattatctcgcctacacgtgagctggcgagccagatacatagggaactaatcaagattagcgagggaaccgggttcagaattcacatgatccataaggctgccgtggccgctaaaaaattcgggccaaagtcaagcaaaaaattcgacattctagtgaccacaccgaaccggctaatctatctgctgaagcaggatcccccagggattgatcttgccagcgtggaatggttagtcgtggacgagtccgataagctctttgaggacgggaagacagggttccgtgatcagctggcgtcaatcttcctagcctgcacatcacacaaagtgaggcgcgctatgttttctgccacgttcgcttacgatgtcgagcagtggtgtaagctgaatttggacaacgtgatttccgttagcataggagcccgtaatagcgcagtggagacggtggaacaggaactgctgttcgtcggctctgaaactgggaaattgctggctatgcgcgaattagtcaagaagggctttaaccccccagtgctggtgtttgttcaatccatcgagagggctaaggagctttttcacgaactgatatatgaaggcattaacgttgacgtaattcacgccgaaaggacgcagcagcagagggacaacacggttcactctttccgagccggtaagatttgggtgctcatctgtactgctctactagcaagaggcatcgattttaaaggggtcaacctcgtgattaactacgattttcccaccagcagtgtcgagtatattcacaggattggtaggaccggtagggcaggcaacaagggaaaagcaatcaccttcttcaccgaggacgataaaccacttctgcgcagcgtcgctaatgtcatccagcaagcagggtgtcctgtaccagagtacatcaagggcttccagaagctcctatctaagcagaaaaaaaagatgattaaaaaaccgctggagcgagagtcaatttcaacgactcccaagtgcttcctggagaaagccaaggataagcagaagaaagtgacaggtcagaactctaagaaaaaagtggccctggaagataaaagctag

SEQ ID NO: 220318 - DNA, 2646 bp, synthetic construct
  misc_feature 1..2646: note = Description of Artificial Sequence: Synthetic coding sequence
  source 1..2646: mol_type = other DNA
atggcggctgataagggcccagctgccggtccacgttcccgagcggcaatggcccagtggaggaagaagaaaggccttaggaagcggcgtggcgctgcttcccaggcgcgaggctccgattccgaggacggcgaatttgaaatccaggctgaagatgatgctagggccagaaagctggggccagggagacctttacccaccttccctactagtgagtgcacttctgacgtcgaaccggatacgcgggagatggttcgagcccagaataagaagaagaaaaaaagcggcggtttccagtccatggggttgtcttaccctgtgttcaagggcatcatgaagaaggggtataaggtgcccacgcctatccagagaaaaactattcccgtaatcctggacggaaaagacgtagtggccatggcccgaaccggatcaggaaagaccgcctgcttcttattaccaatgttcgagcggctgaagacccactcggcacaaacaggcgcacgcgctctgatcttatctcccactcgggaactcgccctccaaaccttaaagttcaccaaagagctcggcaaatttactggactcaagactgcactaattcttggaggtgatcgaatggaagaccagtttgccgctctgcatgagaaccccgatatcataatcgcgactcccggtcgccttgtgcacgttgcggtagagatgtctttaaagctgcaaagtgttgaatacgtcgtgtttgacgaagcggatcggctcttcgagatggggttcgctgagcagctccaagagatcatcgcgagacttccagggggacaccagaccgtgttattttctgccaccctgcccaagctgctggtggagtttgctcgggcaggcctaactgagcctgtcttgattcgcttagatgtcgatactaagttaaacgagcagcttaagacttcttttttcctggtgagagaagataccaaggctgctgtcttgctgcatcttttgcacaacgtggtcaggccccaagaccaaaccgtcgttttcgtggcgacgaaacatcacgctgaatacctcaccgaactattgacaacccagcgcgtgagctgcgcccatatttattctgccttagaccctaccgctcgtaagatcaacctcgctaaatttactttagggaagtgctcgacacttatagtgaccgatctcgccgcaagagggttagacattccgttactcgataacgtgataaattattcgtttccggcaaaaggcaagctgtttttgcatcgagtgggtagggtggcacgcgctggcagatccggtactgcttattcccttgtggctcccgacgagattccttatctgctggatctgcaccttttcttgggacgtagtctcacccttgcccgacctttaaaagaaccttctggcgtggcaggcgtggatggaatgctgggacgcgtcccccagtccgtggtcgacgaggaggactcaggattacagtccacattggaagccagccttgaactgcgaggactggcgagagtggctgacaatgcccagcagcagtacgtgaggtcccgcccagctcccagtcctgagtcaatcaaaagggctaaggagatggatctggtgggcttaggactccaccccctgttctcatccagattcgaggaggaggagctgcagaggctgcgcctcgtagactcaatcaagaattatagaagccgagctacaatatttgagattaatgcctcgtccagggacttgtgcagccaagtgatgcgcgcaaaacggcagaaggatcggaaagccatcgcaaggttccagcagggacaacagggccgacaggaacagcaggagggcccagttggaccagccccatcaagaccagctttgcaagagaagcaacctgagaaggaagaggaggaagaagccggtgagtcagtagaagatattttcagtgaagtcgtcgggaggaaaagacagagaagtggacccaataggggagccaagagacgtagggaggaggccaggcagagggatcaggagttctacataccataccgaccgaaagactttgattctgagcggggtttatccattagcggagaaggtggggctttcgaacagcaggcagccggtgctgtcctggacctgatgggagacgaagcccagaatttaactcggggaagacaacaacttaaatgggacagaaagaagaagaggtttgtcggccagagcgggcaggaggacaaaaagaagataaagactgagagtggcaggtacattagcagttcttacaagagggacctctaccaaaaatggaagcaaaagcagaaaattgatgatcgagactctgacgaggaaggagcctcagacagacgcggacctgagagaaggggcggtaaaagagacagagggcagggagcaagccgaccacatgcgccaggtactccggcagggagagttcgaccagagctgaaaactaaacagcaaatcttaaagcagaggcgacgggcacagaagctgcattttttgcagcggggaggactgaagcagctgtccgcacgaaaccggcgtagagtccaagaacttcaacagggagcttttggcagaggagctaggtctaaaaaaggtaaaatgcgaaagagaatgtag

SEQ ID NO: 220319 - DNA, 2649 bp, synthetic construct
  misc_feature 1..2649: note = Description of Artificial Sequence: Synthetic coding sequence
  source 1..2649: mol_type = other DNA
atggccgctgacaagggtcccgctgcaggcccaaggagtcgagcagctatggcccagtggcggaagaagaaggggctgagaaagcgcagaggcgctgcttcccaagcgaggggatcggattcagaggacggcgaatttgagatccaggctgaggacgacgcgcgtgctcgaaaacttggacctggtcgccctctcccaactttccctacttctgagtgcacatcagatgtggagcctgacacacgagagatggtacgcgcacagaacaagaaaaagaaaaaatccggaggcttccagagcatgggtttgtcctatccagtgttcaaaggcattatgaaaaaaggatacaaggtccctactccaatacagaggaagacaattcccgtgattctggacggcaaggacgtcgtggcaatggctcggactgggtcagggaagaccgcctgcttcctgctccctatgtttgagagattaaagacacattcagcccagacaggcgcacgcgcacttattttgtccccaacacgcgaactagctctgcagactctaaaattcacaaaggaactgggaaaatttaccggcttaaaaaccgccttaatccttggtggagacaggatggaggatcagttcgcagctctgcacgagaatccagacatcattatcgccactcccggaaggctggtccatgtagctgtggagatgtcccttaagctgcagagcgtcgagtatgtggtttttgatgaagcagacaggttgtttgagatggggtttgccgaacagctgcaggagattattgcacgcctgccgggagggcatcagaccgtgttattctcagccacactacctaagctgctggttgagtttgcacgagcaggccttaccgagccagtgctgatccgactcgatgtggacacaaagcttaacgaacaattaaagacgtctttctttttggtgcgggaggacaccaaggccgcagtcttgttgcatttactgcataatgtggtgcggcctcaagatcagactgtggtttttgtggccacaaaacaccacgcggagtacctcactgagctgctgacaacacagcgtgtgagttgcgcgcacatctattctgcgcttgacccaactgccaggaaaattaacctggccaagttcacactgggcaaatgcagcaccctgatcgtgaccgatctggccgctcggggactggacatacctctgcttgacaacgtgatcaattacagttttccagctaaaggcaagctgttcttgcatcgggtaggcagagttgctcgggcaggccgttccggaacagcttacagtctggtggcacctgatgagataccttatctgctggacctgcacttatttctggggcgttccctcacgctcgcaaggcctctcaaagagccctccggagttgctggggttgatggaatgctcggtcgggtgccacagtcggtcgtcgacgaagaggattcaggactgcaaagcaccctggaagcctccttggagctccggggactggctagagtggcggacaacgcacagcaacagtatgtgagaagcaggccagctccttcacctgaaagcattaaaagggcaaaagaaatggacctcgtggggcttggcctccaccccctgtttagcagtaggtttgaagaagaggagctacaacgattgcgacttgtggacagtatcaaaaactaccgctcccgagctacaatcttcgaaatcaatgcttcatcaagagacttgtgttcccaggtgatgcgtgctaaaaggcagaaggatcgtaaggcgatcgcaaggtttcagcagggacaacagggtcggcaggagcaacaggagggcccagtcggaccggctccctctagacctgctctccaggagaaacaaccagagaaggaggaagaagaagaagctggagagtcagtcgaagacatcttcagcgaagtcgtgggcagaaaaagacagagatccggacctaatcgtggtgccaagagacgtagggaagaagcacggcagagagaccaggaattctacattccatatagacccaaagactttgattctgagcggggactgagtatcagtggagagggcggagcctttgagcagcaagctgcaggtgctgtgctggacctgatgggggatgaggcgcaaaatctgaccaggggtcgtcagcagctgaagtgggatcgcaagaaaaaacgcttcgtgggccaatcaggacaggaggacaaaaaaaaaatcaagaccgagagcggcagatacattagcagtagctataaaagggacttgtaccagaaatggaagcagaagcagaaaatagacgaccgtgactccgacgaggagggggctagcgatcgacgtggcccagagagaaggggaggcaaacgagatcgtgggcaagctggagcctcccgcccacacgcacctggcactccagcaggccgagttcggccagaactgaagactaaacaacaaattctaaaacaacggagaagagctcagaaactccacttcctgcagcggggtggactgaagcagctgagcgctcgcaacaggaggagagtgcaggaactgcagcagggggcttttggaaggggagccagatctaagaaaggaaagatgcgcaagcgtatgtag

SEQ ID NO: 220320 - DNA, 1452 bp, synthetic construct
  misc_feature 1..1452: note = Description of Artificial Sequence: Synthetic coding sequence
  source 1..1452: mol_type = other DNA
atgagcacggcacgcaccgagaacccagtcatcatgggactgtcatcccagaacggccaactgagaggacctgtgaagccaaccggcggtcctggcggtggcggtactcaaacccaacaacagatgaatcagcttaagaacacaaataccatcaacaacggcacccaacagcaggcccagtctatgacgaccactattaaacctggcgatgattggaaaaaaactttaaagcttcctccgaaggacctgagaataaagacgtcagatgtgacctcaaccaaggggaacgagttcgaggactattgcctgaaaagagagctcctgatgggcatctttgagatgggctgggagaaaccaagccccatccaagaggagagcatccccattgctctgtcaggacgggacattctggccagagccaagaacggaacggggaaaagtggcgcatacttgatcccattgctggagcggttagacctgaagaaagataacatccaagccatggtgattgtgccaaccagggaactggcactgcaagtctcccagatctgtatccaggtgtcgaagcatatgggcggagcgaaggtcatggccaccactggcggaactaacttgcgtgatgacatcatgaggctcgacgacaccgttcacgtggtgattgccactcccggaagaatcctggacttgattaagaagggagtggctaaagttgatcatgtgcaaatgatcgtgctcgatgaagccgataaactcctttcgcaagatttcgtgcagattatggaggatattatcctgactctgccaaaaaaccggcagatcttgttgtatagcgccacttttcctctgtcagttcaaaaattcatgaacagccatctacagaaaccatacgagatcaatctgatggaagagctgacgctcaaaggggtgactcagtactacgcgtacgtgacagagaggcagaaggtgcactgtctcaatacgctattttctagactgcagatcaatcagagcatcatattctgcaactcctctcagagagtggagctcctcgcgaaaaaaatttctcaactgggctacagttgcttctacatccatgctaagatgagacaggagcaccgcaaccgagtttttcatgacttccgcaacggcctttgcagaaacctggtgtgtactgatttatttacccgaggaatcgatatccaagcggtcaacgttgtcattaacttcgatttccctaaactggcggagacctatctgcaccgaataggcagaagtgggagatttggacatctaggactggctatcaatctaataacatacgatgaccgattcaatttaaagtcgatcgaggagcaactgggcacagagattaagcccattccctccaacatagataaatctctgtacgtcgctgagtatcactccgagcctgttgaagacgagaagccgtag

SEQ ID NO: 220321 - DNA, 1452 bp, synthetic construct
  misc_feature 1..1452: note = Description of Artificial Sequence: Synthetic coding sequence
  source 1..1452: mol_type = other DNA
atgtctaccgcccgaacggaaaaccctgttattatggggctgtcatctcagaacggccaactgaggggacctgtgaaaccaactggaggtccaggaggcggtggaacccagacacagcagcagatgaaccagctaaagaacaccaacaccattaacaacgggactcagcaacaggctcaatctatgaccaccacgattaaacctggggatgactggaaaaaaaccctgaaactgccgccaaaagatcttagaatcaagacatccgacgtaacctcgacaaagggaaatgaattcgaagactactgcctcaaaagagagttactcatgggaatttttgaaatggggtgggaaaagccttcaccaatccaggaagagagcatcccaatcgccttgagcggaagagacatcctggctagagccaaaaacggcactggaaaatccggcgcatatctgattccgctattagagaggctagatctgaagaaggacaatatccaggccatggtcatagttcctacccgggaattggcgctgcaggtatctcaaatatgtatccaggttagtaaacacatgggtggagcgaaggtgatggccacaactggtggtactaatctgagagacgacatcatgagactggacgacacagtgcatgtggtgatcgccaccccaggacgtattctagatttgatcaaaaagggagtggcaaaggtggatcacgtgcagatgatcgttctggacgaggcggacaagctgctctcacaggactttgttcagattatggaagatattattttaaccctcccaaagaatcggcagattctcttgtactctgctacgttcccccttagcgttcagaagttcatgaactctcacctccagaagccttacgagataaacctgatggaggagctgactttgaagggagttacccagtattatgcgtatgttactgaacggcagaaggtgcattgcctgaacaccctgttttcacggttgcagattaaccagtcgataatcttttgtaattcttctcaaagagtggagctcctcgccaagaaaatctcccagctcgggtactcctgtttctacatccacgcgaagatgaggcaggagcaccgcaaccgcgtcttccatgacttcagaaatgggttatgcagaaacttagtctgcactgacctgttcacaaggggcatagatatacaggccgtcaacgtcgtcatcaacttcgattttcctaaattagctgagacctacctccaccgaatcggcaggagcggacgcttcggtcacctggggctggcaataaacctgatcacctacgatgatcgcttcaatctgaagagtattgaagagcaactaggcaccgaaatcaagccaatcccatcaaatattgataaaagtctgtacgttgccgagtatcacagcgaaccagtggaagatgagaaaccatag

SEQ ID NO: 220322 - DNA, 1452 bp, synthetic construct
  misc_feature 1..1452: note = Description of Artificial Sequence: Synthetic coding sequence
  source 1..1452: mol_type = other DNA
atgtctacagcacggactgagaatccagtgataatgggcctatccagccagaacggccagctccggggacccgttaaaccaaccggtggcccaggcggaggagggacacagactcaacagcaaatgaatcagttaaagaataccaacaccattaataatgggacccagcagcaagcgcagtcaatgaccactacaattaagcctggtgacgattggaaaaagacgctgaaactcccgccaaaagatcttaggataaagactagtgacgtgaccagcaccaagggcaatgaattcgaggactattgcctgaagagagagctactaatgggcatatttgagatgggatgggagaagccctccccaattcaggaggaatctatccccatagccctctcaggtcgagacatcttagccagagccaagaatggtactggtaagagtggtgcctatctgattcccctactggagaggctggacctcaaaaaggacaatatccaggcgatggtcattgtccctacccgcgaactggctctccaggtctctcagatctgtatccaggtcagcaagcacatgggaggcgctaaggtgatggccacaaccggcggtaccaacttgcgcgacgatatcatgcgcctcgacgatacggttcacgtggttattgcaacccctgggaggattctggacttaattaagaagggggttgccaaggtggaccatgtccaaatgattgtgctggatgaagcggataagcttctgagtcaggatttcgtgcaaatcatggaggacatcatcttaactttgccaaagaacagacagattttgctatattccgccacattcccgctgtctgtccaaaaattcatgaatagccatttgcagaagccctacgaaataaatctgatggaagaattgaccttgaagggggtgacgcaatactatgcgtacgtgactgaacggcagaaagtgcattgcctgaataccctattttctcggctgcagataaaccaatctatcattttctgcaatagttcccagcgcgttgagctccttgcaaaaaagatctcacagctaggatacagttgtttctatatccacgcaaagatgcgccaagaacacagaaaccgagtgtttcatgactttcggaatggactgtgcaggaacttggtttgcaccgatctcttcacccgtggcattgacatccaggcagttaatgtcgttataaactttgacttccctaagctggcagagacctacctgcacagaatcggtagatccggacggttcgggcaccttggcttagccattaatctcataacatatgatgataggttcaatctgaagagcatcgaggagcagctagggacagagattaaaccgatcccgagcaacatcgataaatccctctatgttgctgagtaccatagtgagccagtggaggacgaaaaaccttag

SEQ ID NO: 220323 - DNA, 564 bp, synthetic construct
  misc_feature 1..564: note = Description of Artificial Sequence: Synthetic coding sequence
  source 1..564: mol_type = other DNA
atgtctaccgccaggacggaaaaccccgtgattatggggctctcctcccagaatggtcaacttcgcggacctgttaagccgaccggagggccaggcggtggtggaacccaaacacagcagcagatgaatcagcttaagaacaccaatacgattaataatgggacccaacagcaggcacagagcatgacaaccacaattaaaccaggcgacgactggaagaaaactctgaagctcccacccaaagacctgcgaatcaagacatcggatgtcacgtccacaaaaggaaatgagtttgaggactactgcctgaaacgggagctgctcatgggaattttcgagatgggctgggaaaagccttcccctatccaggaggagtcaatacctatcgctctatccggacgcgatatcttggcgagagccaaaaatggcaccggtaaaagtggcgcttacctcattcctctccttgaacgcctagacctgaaaaaggacaacattcaggccatggttatcgtgcccactcgtgaactggccctccaagtgtcccagatttgtaccgtctgttag

SEQ ID NO: 220324 - DNA, 5138 bp, synthetic construct
  misc_feature 1..5138: note = Description of Artificial Sequence: Synthetic coding sequence
  source 1..5138: mol_type = other DNA
atggaaagaaatgttctcacgactttttcgcaggaaatgtctcagcttatcctgaacgaaatgcccaaggctgaatatagctcactgttcaatgattttgtcgagagtgaattcttcctgatcgatggagattctcttctcatcacctgcatctgcgagatttcgttcaagccaggccagaatttgcatttcttttatcttgtggaaagatatctggttgacctgataagtaaaggagggcagtttaccattgtgttctttaaagatgctgagtatgcctactttaacttcccagagctgctctccctgcgaacagccctcatcctacatctacaaaagaacacaactatagacgtgcgaacaacctttagcagatgtctgtcaaaggaatggggtagttttttggaggagagctatccttattttcttatcgttgccgatgaaggtctcaacgacttacagacgcagcttttcaattttctgatcatccacagctgggccagaaaagttaatgtggtcttaagctccgggcaggaatccgatgttctgtgcctctacgcttacttacttccctctatgtatcgacaccagatcttctcgtggaagaataaacagaatatcaaagacgcctacacaactctcctcaatcagctagaacgctttaagttgtccgccttggccccactcttcgggtctttgaagtggaacaacattaccgaagaggctcataagacagtaagcctgctcacccaagtctggccggaaggcagtgatattagaagggtattttgtgtgacctcatgctcactgagcctaaggatgtaccaccggtttctggggaatagagagccatcaagcggacaggagaccgagattcaacaagtcaatagcaactgtctcacccttcaggagatggaggatctttgcaagctgcattgcctgacggtggtgttcctactgcatctgcctttaagtcagcgtgcttgcgcgagagtgattaccagtcattgggccgaggacatgaagccattgctgcagatgaagaagtggtgtgaatattttatcctgagaaatattcataccttcgaattctggaacctgaacctgatacatctgtccgacctgaacgatgagctcctgctcaagaatatcgctttttactatgagaacgaaaatgtcaaggggctgcacctcaacctgggcgacaccattatgaaggattacgaatacctgtggaacactgtttcaaaactggtgcgggacttcgaagtgggtcagccgtttcctctccgcaccacaaaagtatgctttctggaaaagaaaccgagtcctattaaagactctagtaacgagatggtcccgaatcttggctttatcccaaccagttctttcgtggtagacaagtttgctggggatatccttaaggacttgccttttctgaagagcgatgacccaatcgtgaccagtctggtgaaacaaaaggagttcgacgaactggttcattggcattcccacaagcctctttccgatgattacgatcgaagccgctgtcaattcgacgaaaaatcaagagatcccagggtcttgcgtagcgttcaaaaataccacgtctttcaaagattttatgggaattccttggaaacagtcagcagcaaaattatcgtgactcagactattaagagtaaaaaggacttctccgggcctaaatccaagaaagcacacgaaacaaaggccgagattattgctagggagaataagaagcggctcttcgctcgagaagagcagaaggaagagcagaaatggaacgcattgagtttcagtatcgaagaacagctcaaagagaatctgcatagtgggatcaaaagcctagaagatttcctgaagagttgcaaatcaagctgcgtcaaattgcaggtggagatggtgggcctgactgcatgcctcaaagcatggaaagagcactgccgaagtgaggaaggtaagactacaaaggatctctccattgcagtgcaggtcatgaaacgaatccattctctgatggagaagtattccgagctcctccaggaagatgatcgccagttaatcgcaagatgcttaaaatacttaggattcgacgagttggctagttccctgcatccggctcaggatgccgagaacgacgtcaaggtgaagaagagaaacaagtacagtgttggaatcggccctgctagatttcaactgcagtacatgggtcattatttaatacgcgatgagcgcaaggaccccgaccccagagtccaggatttcattcccgacacatggcagagagagttgttagatgtcgtcgacaaaaacgagagcgccgtgatcgtagcaccaacatccagcggaaagacttacgctagctattattgtatggagaaagtcttgaaggagtccgacgacggagtggtcgtatatgtggccccaacgaaagcgcttgtgaaccaagtggccgctacggtgcaaaacagatttaccaaaaatctgccaagcggagaggttctgtgtggagtttttacccgggagtaccggcatgatgctctaaattgccaagtgctcattaccgtgcctgcctgttttgaaattctcttgctcgctcctcatcgtcagaattgggtgaagaagattagatacgtgatattcgatgaagtacactgtctcggcggtgaaatcggcgctgaaatctgggagcatcttcttgtcatgattaggtgcccattcctcgccctgtcagccaccattagtaatcccgaacacctcacggagtggctccaaagcgtaaaatggtattggaagcaggaagacaaaattatcgaaaataacacagcatccaagagacatgtgggtaggcaagctggattccctaaggattacctacaggtgaagcagtcttacaaggtgcggttggtcctgtacggtgaaaggtacaatgatctggagaagcatgtgtgctctattaagcacggtgatattcactttgatcactttcacccttgtgcagctcttactacagaccacatcgaacgctacggattcccaccggatctgacgctgtcccctagagaaagcatccaactctacgacgccatgtttcaaatttggaaaagctggccacgagctcaggaactctgtcccgagaattttatccactttaataataaattggtgataaaaaagatggacgccaggaaatacgaggaaagcctgaaagcagagctcacctcctggattaagaatggcaacgttgaacaagcacggatggtgcttcaaaacttaagccccgaagcagatctgagtcccgagaacatgatcaccatgtttccgctccttgtcgaaaagctgcgaaaaatggagaagcttcccgcacttttttttctgtttaaactgggcgctgtggagaacgctgccgagtcggtgagtacttttttaaaaaagaagcaagagacaaagcgtcctccaaaggctgataaggaagcccacgtgatggccaataaattgcggaaggtgaagaaatctatcgaaaagcaaaagattatcgacgaaaagagccagaaaaaaacccggaacgtcgaccagagtctgatccacgaagcagagcacgataatctagtgaagtgcttggagaagaatctggaaatcccccaggactgtacctacgcagatcagaaggccgtcgataccgaaacactgcagaaagtattcggtcgtgttaagttcgagaggaagggagaagagctgaaagcccttgccgaacggggaatcggctatcaccatagcgccatgtctttcaaagagaagcagttagttgagatcctcttccgcaaggggtacctgcgcgtcgtaaccgctacggggactttggcactcggggttaatatgccatgtaagtctgtggtgttcgctcagaattccgtttatctggatgcactgaattatagacagatgagcggccgagcgggtagaaggggccaggacctgatgggtgacgtttatttttttgatattccattcccgaagatcggcaagctcattaagtcaaatgtacctgagctccgtgggcatttcccattgtccatcacactggtcctgcgtctgatgctcttggcttctaaaggcgatgacccggaagacgccaaagccaaagtgctgagtgtgctgaagcactcactgttgagtttcaaacagccgagagtcatggatatgttaaaactctacttcctttttagcttacagttcctggtgaaggaaggctacctggatcaagaaggtaaccctatgggattcgcagggctggtatcccaccttcactatcacgagccctccaatctggtgttcgtatcctttttggtgaacggcctgtttcatgatttgtgccagccaaccaggaagggttccaagcatttctcccaggacgtgatggagaagttggtgcttgttctcgctcatctgttcggcagaagatacttcccgcctaaattccaagatgcgcattttgagttttatcagagcaaggtgtttctggatgatctgcccgaggacttcagcgacgctctcgatgagtataacatgaaaataatggaggactttacgacattccttcgcatagtgtccaagttagctgatatgaaccaggaataccaattgccgctgagcaaaatcaagtttacagggaaggaatgtgaggacagccagctcgtgtcccatcttatgtcttgcaaggagggccgtgtagccattagccccttcgtgtgtctttcagggaactttgacgacgacttgctgagattagagacccccaatcacgtgactctcggaaccatcggtgtgaacagatcccaggctccggtgctgctgtcacagaaattcgacaaccggggtcgcaagatgtcccttaatgcatacgcattggatttctacaaacatgggtctctgattggactggtgcaggataaccgcatgaatgagggagacgcgtattacttgctaaaagatttcgccttgacaatcaaaagtattagcgtgtcactcagagaattgtgcgagaatgaggatgataatgttgtcctcgctttcgagcagctctccaccactttctgggagaaactcaataaggtgta

SEQ ID NO: 220325 - DNA, 363 bp, synthetic construct
  misc_feature 1..363: note = Description of Artificial Sequence: Synthetic coding sequence
  source 1..363: mol_type = other DNA
atggaacgcaatgtgctgactacattcagccaggaaatgagccagctgattctcaacgaaatgcctaaagcggagtacagtagcttgtttaacgacttcgtggaaagcgaattcttcctcattgacggtgactccctgttgatcacttgcatctgtgagataagttttaagcccggacagaatctccactttttttacctggtggaaaggtacttggtcgatctgatctccaaggggggacagttcaccatcgtgtttttcaaagatgccgaatacgcttatttcaactttcccgaactgctttcgctgcgtaccgcactgatcctgcatttacaaaagaacacgaccatcgacgtgagatag

SEQ ID NO: 220326 - DNA, 885 bp, synthetic construct
  misc_feature 1..885: note = Description of Artificial Sequence: Synthetic coding sequence
  source 1..885: mol_type = other DNA
atgattcggtgcccatttcttgctttgtcagctactatctctaatcccgagcatcttacagaatggttgcaaagcgttaaatggtactggaaacaggaggataagatcatcgaaaacaacactgcgtctaaaagacatgtgggtagacaggctggatttccgaaagattatctacaagtcaaacaatcatacaaggttcggctcgtgctttatggagaacgctataacgacctcgagaaacacgtatgtagtattaagcacggcgacattcacttcgatcacttccacccatgcgctgccctcaccacggaccacattgaacgttacggattccctccggacttaacactgtctcctagagaatcaatacaattgtatgatgctatgtttcagatttggaaaagctggcctcgcgctcaagaattgtgccccgagaattttattcatttcaataataagctggtgataaagaagatggatgctcgaaaatatgaggagtccctcaaggccgaactgactagctggattaagaatggtaacgtcgagcaggcaagaatggtgctgcagaacctttctcccgaggctgacctcagcccagaaaatatgatcacaatgtttcccttgctggtagagaagctgcgaaagatggaaaaactgcctgctctatttttcttattcaaactcggggctgttgaaaatgcagcggagtctgttagcacctttttgaagaaaaagcaggaaaccaagagaccacctaaggccgacaaggaggcacacgtcatggccaacaagttaagaaaagtgaagaagtccattgagaagcagaaaatcatcgatgagaagtcccagaaaaaccagaaatgtggaagcaagcccaacacctag

SEQ ID NO: 220327 - DNA, 1062 bp, synthetic construct
  misc_feature 1..1062: note = Description of Artificial Sequence: Synthetic coding sequence
  source 1..1062: mol_type = other DNA
atgcaatcaaagcgtgactgtgaattgtggtgcgagcgcgtgaatcctgagaataaggccgctctggaagcttgggttagagagaccgggataaggctggttcaggtgaatggtcagagaaagtatggagggccaccgccagggtgggtgggaagtcctcctcctgccggaagtgaggtgtttattggcaggctcccccaagatgtctacgagcaccagcttattcccctgtttcagcgagtgggccgactctatgagtttcgtctgatgatgaccttttccggcctcaaccgcggatttgcctacgctcgctacagctccaggcggggtgcccaggctgcaattgcaacactgcacaaccacccgctgcgccctagttgtccactgctggtttgccgctcaaccgaaaagtgtgagttatccgtggacggcttaccaccaaacctgacacgctcagcgttgcttctcgccctccaacccctcggacccggactccaggaagcaagactactcccgtctccaggtcctgcacctgggcagatcgctttgctcaaatttagctcccaccgtgctgctgccatggctaagaaggcactggtggagggtcagagtcacttgtgtggcgaacaggtggccgttgaatggcttaagcctgacttgaaacagcggctgcggcagcagctggtaggacccttccttcggagcccccagcctgaggggtcccagctggccctggcaagggataagttggggttccagggagccagggccaccctccaacttttgtgccagcgcatgaagctaggttcacccgtgtttctgacaaaatgcctgggcattggtccagctgggtggcatcgcttttggtaccaggtggtcattcctgggcatcccgtgcctttctctgggttgatatgggtggtgctaaccctcgatggcagggatggacatgaggtcgccaaggatgctgtgagcgtgagattactccaggcattatccgagtccggcgctaacctcctctggtctgccggtgccgaagctggcacaatggtgaagcaatag

SEQ ID NO: 220328 - DNA, 1491 bp, synthetic construct
  misc_feature 1..1491: note = Description of Artificial Sequence: Synthetic coding sequence
  source 1..1491: mol_type = other DNA
atgtttgcaaaagctacaaggaactttctacgagaagtggacgccgatggagacctgatcgctgtctctaacttaaacgactccgacaagctccagttactatctctcgtgaccaaaaaaaaacggttctggtgctggcagcggcctaagtaccagttcctgagcctgacattgggagacgtgttaatcgaagaccagttcccctctcctgtggtcgtggagtccgattttgtaaagtacgaagggaagttcgctaatcacgtgagcggcacgcttgagactgcacttggcaaagtcaagttgaatctaggaggctctagcagagttgagtcccaatcatctttcggcaccctcaggaaacaggaggtcgacttgcagcaactgatcagggattctgccgagcgaaccattaaccttaggaaccctgtcctgcaacaggtgctagaaggtagaaatgaggtgctgtgtgttctgacacagaagatcactactatgcagaagtgcgtaatttcagagcatatgcaagtcgaagagaagtgtggcggaattgtcgggatccagactaagacggtgcaggttagcgctaccgaagacggtaacgtgactaaggatagcaacgtagtgcttgaaatccccgcagcaaccacgatagcttatggcgttattgaactgtacgtcaagctcgacggccagttcgagttctgcctgctccgcggaaagcaaggcggattcgaaaacaagaagaggattgattcggtgtatctggacccactcgtgttcagagagtttgcttttatcgatatgcccgatgctgcgcatgggatcagtagtcaagatgggcctctgtcagtcctgaaacaggcaacactccttctagaacgcaatttccacccgttcgctgaattaccagagccgcagcaaaccgcgttgtctgacattttccaggccgtgctgtttgacgacgagctcctgatggtgttagaacccgtgtgcgatgacctggtgtcaggcctctctccgaccgtggccgttctcggcgagctgaagcctagacaacaacaagaccttgtcgccttccttcaacttgtcgggtgcagcttgcagggagggtgtcccggacctgaggatgctggatccaagcaactgttcatgacggcctactttttggtgagcgccctggcagaaatgcctgattcagctgccgctctgctcggcacctgctgtaaactgcaaatcataccaacactatgccacctgcttagagccttgtccgacgacggggtttccgacttggaggatccaacgctgactccgcttaaggacacagagagattcggcattgtccagaggctgtttgccagtgccgacatcagtctagaacgcctcaaatcgtcagtgaaggctgtgatactgaaagattccaaggtctttcctttactgctttgtatcaccctcaatggactctgcgccctaggaagagaacattcctag

SEQ ID NO: 220329 - DNA, 1491 bp, synthetic construct
  misc_feature 1..1491: note = Description of Artificial Sequence: Synthetic coding sequence
  source 1..1491: mol_type = other DNA
atgttcgccaaggccacccgcaacttccttcgtgaggtagatgctgacggcgatctgattgccgtcagtaacctcaacgacagcgacaaacttcagctgctgtctcttgtgaccaagaagaagaggttctggtgctggcaacgtccgaagtaccaatttctgagtctgaccctgggggatgtcctcattgaggaccagttccccagcccggtggtggtggaaagcgatttcgtcaagtacgaaggcaaattcgcgaaccacgtctctggcacgctggagactgcattgggcaaggtcaagcttaacctaggaggtagttcgcgcgttgaaagccagtcatcctttggcactctgcgtaagcaagaagttgaccttcagcagcttatcagagactcagctgagcggactataaatcttagaaatccggtgctgcagcaggtcctggaagggcgtaatgaagtcctgtgcgtactgacccagaagatcactacgatgcagaagtgcgtgatttccgagcacatgcaggtagaagaaaagtgtggaggcattgtgggaatccagaccaagaccgtccaggttagcgctacagaagacgggaacgttacgaaggacagcaatgtagtgttggagatccccgctgcgactaccatcgcttacggcgtaatcgagctctatgttaaactcgatgggcaatttgaattttgtctgctcagaggcaaacagggtggcttcgaaaataagaagagaattgacagtgtctacctcgatcccctcgtgttcagggagttcgcttttattgatatgcccgatgccgctcacggcatctcgagccaggacggtcctctaagcgtgctaaagcaagcaactctgctgctcgaacgtaacttccacccatttgccgagctgcctgagccccaacagacagcactaagcgatatttttcaagctgtgctgtttgacgatgagctgctcatggtcttggaaccagtttgcgatgacctcgtctcaggattgtcccccacggtagccgtactgggagagctcaaaccgcgacagcagcaggatctggtcgctttcctgcagctcgtaggatgttccctccagggtgggtgccccggacccgaagatgcgggatcaaagcaattatttatgactgcttattttctggtgtccgccctcgctgagatgcctgactctgcagctgcacttctgggtacatgttgcaagctgcaaataattcctaccctgtgtcatcttctccgtgccctgagcgacgacggggtctccgatctggaagaccccaccctgacccccctcaaagacacagagaggttcgggatagtgcagagactgtttgccagcgcagacatcagcttggagagactcaaatcctctgtgaaagcagtcatactaaaggacagcaaggtgtttcctcttctactgtgcattactctcaatgggctatgcgctttgggcagggagcactcttag

SEQ ID NO: 220330 - DNA, 999 bp, synthetic construct
  misc_feature 1..999: note = Description of Artificial Sequence: Synthetic coding sequence
  source 1..999: mol_type = other DNA
atgcagaagtgtgttatctccgaacatatgcaggtggaggaaaaatgcggtggaatagtgggaatccagacaaagactgtccaggttagtgctactgaagatggtaatgtcacaaaagacagtaacgtggtgctggagatccccgctgccaccacgatcgcgtacggggtgattgagctgtacgtgaaactggatggacaatttgaattctgcctgttgaggggcaagcagggaggcttcgagaacaagaaacggatagattctgtctacctggaccccctagtgtttcgcgagtttgccttcatagacatgccagacgcagcacacggaattagctcacaggatggacctctctctgtactcaagcaggcaaccttgttgttagagagaaattttcatccattcgcagagttaccggagccccagcagacagctttatctgatatctttcaggcggtgttgtttgacgacgagcttcttatggtgcttgagcctgtgtgcgacgatcttgtctccgggctgagccctacagtggccgtcctcggggaactgaagccaaggcagcaacaggatcttgtggcattcctgcaacttgtggggtgttcgctccagggcggatgcccagggccagaagacgcaggctctaagcagctcttcatgactgcatactttttggtttcagcattggcggagatgcccgattctgccgctgcacttttgggtacgtgttgtaagcttcaaattatccctactttgtgtcacctgctgcgagcgttatctgatgacggagtgtctgacttggaggacccgactttgactcctctaaaagataccgaaaggtttggcatcgtacagcggctgtttgctagtgctgatatatccctggagcgcttaaagagcagcgtcaaggccgtgatattgaaggactctaaggtattcccgttgctgctgtgcattactctgaacggtctgtgcgcactcgggagggaacatagttag

SEQ ID NO: 220331 - DNA, 999 bp, synthetic construct
  misc_feature 1..999: note = Description of Artificial Sequence: Synthetic coding sequence
  source 1..999: mol_type = other DNA
atgcagaaatgcgttatttcagaacatatgcaggtggaagaaaagtgcggcggaattgtgggaatccaaacgaagacagtccaggttagcgctacagaggatggtaatgtcaccaaggacagtaacgtggtactggagatcccagcagcaaccactatagcatacggtgtgatagaactgtatgtaaagctagacggtcagtttgaattctgcctcctgcgcggtaagcaggggggatttgaaaataagaagagaatcgattctgtgtatcttgacccgttagtgtttagggagtttgcattcatcgacatgcctgatgcagcccacggtatttcttctcaggatggaccattgagcgttctgaaacaagccacacttttgttggaacggaactttcacccgtttgcagagctccctgagccacagcaaaccgcgctgtccgacattttccaggccgtcctcttcgacgacgagctgctgatggtgctggaacccgtgtgtgatgatctcgtgagcggattgagccctactgtggctgtgctgggggaacttaaacctaggcagcaacaggacttggtcgccttccttcagctggtgggatgcagcctgcaaggtggatgccctggccctgaggatgcagggagtaaacagctctttatgacagcctacttcctcgtgagcgctctagctgaaatgcctgacagcgctgctgccctactcgggacttgctgcaagctgcagataatcccaaccctctgccacctgttaagagcactttccgatgacggggtttccgatctcgaagacccaactctgacaccacttaaggatacggagagattcgggattgtacaacgtcttttcgcatccgccgatataagcctggagagactcaaaagcagtgttaaagccgtcatccttaaagatagcaaagtgtttccgctgctgttatgtattaccctgaatggactgtgcgccctgggacgggagcacagctag

SEQ ID NO: 220332 - DNA, 1575 bp, synthetic construct
  misc_feature 1..1575: note = Description of Artificial Sequence: Synthetic coding sequence
  source 1..1575: mol_type = other DNA
atggcaaattcagctggatttctgggcgatttgactaccgaggggattaataaacctggcttttacaagggaccggctggatcacaggtcacccttagctcacttggcaaccagacaagggtgctgctggaagagcaggcacggcatcttcttaatgagcaagagcacgcaactatggcatactatctggatgaatataggggcggatccgtctcagtggaggcgctggtcatggctcttttcaaacttctgaatacccatgcaaaattctctctcctctcggaggtgagaggaaccatctcacctcaggatctagagaggtttgatcacctggtcctgcgacgggaaattgagtctatgaaagccaggcaaccccctggtcctggagcaggagatacatattcaatggttagctacagtgatacaggctctagcacaggttcccatgggacgtcaaccacagtctcctcggcgagaaacacactcgatctggaggagactggggaagctgtccagggaaacataaatgcacttcccgatgtctctgttgacgacgtgaggagcaccagccagggactgagttccttcaaaccactccctcggccacctcctctcgcccagggaaatgaccttccattagggcaacccagaaagctgggtcgcgaagatcttcagcctcccagtagcatgccgtcctgttcaggaacggtcttctccgcaccccagaaccggtccccgcctgctgggactgcaccaacccccggaacgtcctccgcccaggacctcccttcttcccccatatacgcatctgtttcaccggctaatccatctagcaagcgcccactcgacgcccacctggcgcttgtaaaccaacaccctattgggcctttcccgagagttcagtctccaccgcatctaaagtcaccttcagcagaggcaacagtggccggtgggtgtctgctgcctcctagtcccagcggccatccagaccagactggaacgaatcaacacttcgtcatggtagaggtgcaccggccagatagcgaaccggacgttaatgaggttcgggctcttcctcagactcgtacagccagtacattatcacacctgtccgactctggccaaactctatcggaggacagcggagtcgatgccggagaagcggaagcttcggctcccggaagagggaggcagtccgtctctactaaaagtcggagtagtaaggagctgcctcgcaatgaaaggccaacagatggagctaataagcctcccggactgctggaaccaacgagtacgctggtacgcgttaagaagtccgcagccaccctcggaattgccattgaaggcggtgctaatactcgtcaaccgctgccgagaatcgtaactattcaaaggggcggatcagcccacaactgcggccaactaaaggtcgggcatgttatcttggaggtgaacgggcttactctgcggggaaaagagcatcgggaagcagccagaatcattgctgaggcctttaagactaaggacagagactacattgattttcttgtgacagagtttaatgttatgctctag

SEQ ID NO: 220333 - DNA, 2724 bp, synthetic construct
  misc_feature 1..2724: note = Description of Artificial Sequence: Synthetic coding sequence
  source 1..2724: mol_type = other DNA
atgaatgcccctctggacggattgagtgtgagcagttccagtacaggaagtctgggttccgctgcaggggcaggtgggggtggaggagccggactgcgcttactgtccgcgaacgttcgacagctccatcaggctctcaccgctctcctgtcagaagctgagcgcgagcagtttacccactgcctcaacgcctaccatgcaagaaggaatgtgttcgatctggttaggaccctccgtgtactgttagatagccccgtgaaacgtcggttactccccatgctgagactggttatccctagaagtgatcaactgctgtttgatcaatacacggccgaaggcctgtacctgcctgctactacaccttatagacagcccgcttggggtggccctgattcggctgggccaggcgaggtcaggctcgtgtcccttcgaagagcgaaagctcatgaaggactaggcttttctattcgcggtggttccgagcatggggtcggtatctatgttagtcttgtggagcctggatctctggcagaaaaggaggggctgcgagttggcgatcagatactccgcgtcaacgataagtccttagcgcgtgtcacccatgccgaggccgttaaggctttaaaaggtagtaaaaaactagtgctaagtgtgtacagcgccggacgcatcccaggaggttacgtaacgaaccacatatacacctgggtcgatccacaggggagaagtatcagcccaccatcgggcctgccgcagccacacggcggagccctgcgccagcaggagggcgatcgccgttcaacattgcacctgttacaggggggagacgagaagaaggtcaatctggtgctaggtgacgggaggtctctcggcctgaccatccgcggtggagccgaatacggtcttggtatttacatcaccggcgtggacccaggcagtgaagctgagggctcgggcctcaaagtcggcgatcaaattctggaggtgaatggtaggagtttcctaaatatcctgcatgacgaagctgtgagactgctcaagagctcacgacatcttatactcaccgtgaaggatgtgggcaggctacccagggcgaggaccacagtggatgagaccaagtggatcgcaagctccaggatccgggaaacgatggcaaacagcgctggatttctgggcgatctgacaacagagggaatcaataaaccgggtttttataaaggaccagcgggaagccaggtgactctgtcaagcctgggcaatcaaacgagggtactgcttgaagaacaggcacgtcacctgctgaacgagcaagagcacgccactatggcctactaccttgacgaatacaggggaggcagtgtctctgtagaagctctggtcatggctttgttcaagcttctcaacacacatgctaaattctccttgttatcagaggtccggggaacaatatctccgcaggatctcgagaggttcgatcacctggtcctcagacgagagatagagagcatgaaggccaggcagcctcccggaccaggtgctggcgatacctatagcatggtgtcctacagcgataccggttcttcaactggatcgcatgggacttcaacgacggtttcaagtgcaagaaacaccctcgacctggaggagactggggaggccgtgcagggtaatattaacgcacttcccgatgtctctgtggacgatgtccggagtacaagccaggggctgtcttctttcaagcccttgcctaggcctccacccttggcccagggcaacgatttgcctctgggccagcccagaaagctgggacgtgaggatttacagcctccctcaagcatgccttcttgtagcgggaccgtcttctccgcaccacagaatcgctcaccaccagctggcacagcccctacccccggtaccagctccgctcaagatctcccttcctcaccgatttacgcctccgtgtccccagccaacccaagcagtaagcgcccactggacgcacaccttgcgctcgtgaatcaacatcctatcgggccattcccacgtgtgcagtcgcctccacacctcaaatcaccttccgcggaggctacggttgctgggggatgcttgctccccccaagcccctccggccatccagaccagactggcaccaaccagcactttgtaatggtcgaagttcatcgccctgacagtgagcccgatgtcaatgaggttcgcgctctgccacagactaggacagcatccacactgtcgcacctttctgacagcggccagactctcagtgaggatagtggtgtagacgctggtgaggccgaagcttcagccccaggtcgcggtagacagtcagtgagtaccaaatcacggtcctccaaagagctgccacggaatgagaggcccaccgacggcgctaacaaaccgcctggacttctggagccaaccagcactttggttcgagtaaagaaatctgccgctaccctgggaatcgctatcgagggtggtgccaatacccggcagcccctgcccaggatcgtcaccattcaaagggggggatccgcccataattgtggacaattgaaggtggggcatgtgatcttggaggtcaatggactgacacttcggggaaaagaacatcgcgaagctgccagaataattgctgaggcatttaagaccaaggatagagactacatagactttcttgtgacagaatttaatgtaatgctctag

SEQ ID NO: 220334 - DNA, 1038 bp, synthetic construct
  misc_feature 1..1038: note = Description of Artificial Sequence: Synthetic coding sequence
  source 1..1038: mol_type = other DNA
atgaatgctcccttagacggtcttagcgtttctagtagttccaccggctccctgggatcagctgccggtgctgggggtgggggtggcgctggcctgaggctcctgtcagcaaatgtccgacaactacatcaagccctgactgctctgctgagcgaagccgaacgggagcagtttactcattgcttgaacgcctaccatgcgaggcgcaacgtctttgacctggtgcgaacactcagggtgctgctggacagcccagtgaaaaggcggctactgcccatgctgcggcttgtgatcccacggagtgatcagttgctttttgaccagtatacagccgagggattatatttaccagctaccaccccctacaggcagcccgcatggggtggaccggacagtgctggacccggagaagtcaggctggtgagtttgcggagagctaaggcccatgagggcctgggatttagtattcgcggaggttccgagcacggcgtggggatctacgtgagcctggtggaacccggttctctggcagagaaagagggcctgcgggtgggagaccagatacttcgtgtaaatgataaatctctcgctagagttactcacgccgaggctgtaaaggccttaaaggggtcaaaaaaacttgtcctgagcgtttatagcgcaggacgcataccaggcggatacgtaaccaatcacatctatacctgggtggatccccagggaaggagcatttcaccaccctcaggcttgccacagccccacggaggcgcactgagacagcaggagggcgatagacgctctaccctgcacctactgcaggggggtgacgaaaagaaggtatccggggtgggcaaggggggacagccattgaggcacagaatcctgccccctaaccccgaacagcaatcttgcctcgaggctgccagacggggatggttctgtcccggatccgttttcccacaggtttgcacggagggctggtgcttcttcttcgccttcctctttgacctttgttccgtatgctataacacaggctag

SEQ ID NO: 220335 - DNA, 1671 bp, synthetic construct
  misc_feature 1..1671: note = Description of Artificial Sequence: Synthetic coding sequence
  source 1..1671: mol_type = other DNA
atgcacggctcgctggaagctctgctctttctgccgcaggtaaccctcagcctggcccatgcacatctgatctgttccaatgcgcaactggagatgtgcgtcttcccgcataggtttctcggcgacctcaccactgaggggatcaacaaacctgggttctacaagggccctgccggatctcaagtgaccctttcttctctgggcaatcagacaagggtgcttctagaggaacaggcccgacacttgctgaatgaacaggagcacgccaccatggcctactatctggacgagtatagaggcggatcagtcagcgtggaagcgttggtcatggccttgtttaaactgctgaacacacatgccaaattctccctactgtctgaagtgaggggaacgatctccccccaggatctggaacgtttcgatcatttggtgctgagaagagagatcgaaagtatgaaagctcgacagcctcccggaccgggagccggagacacgtacagcatggtgagttacagcgacacagggagcagcaccggttcccacggaaccagcacgaccgtttctagtgcccgaaacactctagacttagaagaaaccggagaggctgtgcagggcaatataaatgccttacccgatgtcagcgttgatgacgtcaggagcacctcacagggattgtcctccttcaagcctctgccgaggccaccccctctagcacagggcaacgatctgccccttggacaacccagaaaactcggtcgggaggatcttcagcccccaagtagcatgccgtcatgtagtggaactgttttttcagctccacagaatcgcagtcccccagccggaaccgcccctacaccgggaacttcctccgcccaagacttaccatcgagtcccatttatgcatctgtcagccctgctaatccttctagcaagaggccactggacgcacatctggcgctcgttaatcagcatcccatcgggccttttcccagagtgcagtctccaccgcacttgaagtcaccctccgccgaggccacagtggctggcggttgcctgttgcctcctagtccttccggccatcctgaccagactggtaccaaccagcacttcgttatggtggaagtgcatcgtccggactctgagcccgatgtgaacgaagtcagagctcttccgcagacccgtacagcaagtacattaagccacttaagcgacagtggccagaccttgtcggaagacagtggtgtcgatgctggcgaagcggaggcttctgctcccggacgcggacgccagtcagtttctacaaaaagccgttccagcaaggaattgcccagaaatgaaaggcctaccgatggagcgaataaacctcctggactgttagaacctacatccaccctggttcgcgtaaagaagagtgcagcaactctcggcatcgccatcgagggcggagccaacacccgacagcctctccccaggatcgtgaccatccagagaggaggttctgcccataattgcggacagctgaaagtgggacacgtgatcctcgaggttaacgggctaaccctacggggaaaggagcaccgagaggcagccaggatcattgcagaagcattcaaaaccaaggacagggattatatcgacttcctagtgacggaattcaacgtgatgctctag

SEQ ID NO: 220336 - DNA, 1059 bp, synthetic construct
  misc_feature 1..1059: note = Description of Artificial Sequence: Synthetic coding sequence
  source 1..1059: mol_type = other DNA
atgttcgccgctgctacaaaatcttttgtaaagcaagtaggggatggaggcaggttagtgcctgttccctcattgagcgaagcggataaatatcaacctctgtcactggtagtgaaaaaaaagcgttgcttcctgttcccgaggtataaattcacgtccacaccgtttactttaaaggatattctcttgggcgaccgggaaatatcggcaggaataagctcataccaactgctcaactacgaagacgagtcggacgtcagtctgtatggccgaaggggaaaccatatagttaatgatgttggaatcaacgtggcgggatcagacagcatagccgtgaaggcctccttcggcatcgtgacaaaacacgaagtggaagtctcaacactgctcaaagaaatcaccacccgcaaaattaattttgatcacagcctaatacgacagtcccgttcctctagaaaggctgtgctctgtgttgttatggaaagtatcaggaccacacggcagtgctcgctctctgtgcacgccggaatcagaggggaggccatgcggtttcacttcatggacgagcaaaaccccaaaggcagagacaaagccatcgtgttccctgcccatacaacaattgcattctcagtgtttgagctcttcatctatttagatggtgccttcgatctttgtgtgactagtgtgtctaagggtgggtttgaacgcgaggagacagcaacattcgcgctgctttatcgattgagaaacatcttgttcgagaggaaccgacgggtaatggacgtaatctccaggagtcaattgtatctggacgacctgttctcggactactacgataaacctctgtccatgacagacatttctttaaaagaaggcacacacattcgggtgaatctcctcaaccacaatatccctaaggggccatgcatcctgtgtggcatgggtaattttaagcgcgagactgtgtatggctgcttccaatgctctgtggacggtcagaaatatgtacggctccacgctgtaccctgtttcgatatctggcacaagaggatgaagtag

SEQ ID NO: 220337 - DNA, 1059 bp, synthetic construct
  misc_feature 1..1059: note = Description of Artificial Sequence: Synthetic coding sequence
  source 1..1059: mol_type = other DNA
atgtttgctgctgctaccaagtcctttgtcaagcaagtgggcgacggcggacggctcgtgcccgtcccatccctgtctgaggctgacaagtaccagcccctgtctctggttgtcaaaaaaaaacggtgtttccttttccctagatacaagtttacttccactcccttcactcttaaggacatcctccttggcgaccgggagatttccgcaggtatctcatcctaccagctcttgaattatgaggacgaaagcgatgtctcactgtacggcaggaggggtaatcacattgtgaatgatgtcggaatcaatgttgctggtagcgattcgatcgcagtcaaggcatcatttgggattgtgacaaagcacgaggtagaggtgtcaaccctacttaaggaaattaccacccgaaaaatcaactttgatcattctctgattagacagtcccggtctagcaggaaggccgtactgtgtgtcgtgatggagtctatcaggaccacacggcagtgctccctgtctgttcacgcaggaatccgcggtgaagcaatgcggttccacttcatggatgaacagaatccaaaggggagggataaagccattgtattcccagctcacaccactattgcgttctctgtttttgagctcttcatctatctcgacggagcattcgacttgtgcgtcaccagcgtctctaagggtggctttgagcgggaggagactgcgacctttgcgttgttgtaccgactgcgtaacatattatttgagcgaaacaggcgagtcatggacgtaatcagcagaagccagctttacctggatgacttatttagtgattactacgataagcctctgagtatgacagacatctctctcaaggagggaacccatattagggtgaaccttttgaaccacaacatcccaaaaggaccatgcatcctctgtgggatgggtaacttcaaaagagaaactgtctatggttgctttcagtgttccgtcgatggacagaagtatgtcaggttgcacgctgtcccctgctttgatatttggcataagaggatgaaatag

SEQ ID NO: 220338 - DNA, 2388 bp, synthetic construct
  misc_feature 1..2388: note = Description of Artificial Sequence: Synthetic coding sequence
  source 1..2388: mol_type = other DNA
atgtccaaaagacatcgactggatctgggggaggactatcctagtgggaaaaaacgagccggtactgatggtaaggaccgcgaccgcgaccgggaccgcgaggaccgttccaaggacagggatagggagcgcgatcggggagacagagaacgcgaaagagaaaaggaaaaggaaaaggagcttagggccagcaccaatgctatgctgatctctgcagggctgcctccacttaaggccagccactctgctcattctacccactcggctcacagtacccattcaacacattctgctcacagcacccacgccggtcacgctggccacacttccttgccacaatgcatcaatccttttacaaacttgccgcacacccctaggtactacgacatcctgaagaagcggctgcagctgccagtgtgggagtataaggacaggttcacagacatcctcgttcggcaccagtcattcgtgctggtgggggagactgggagcggaaaaaccacacagattcctcaatggtgtgttgagtacatgaggagcctgccagggccaaagaggggggtggcctgcacccaacctagacgcgtggcggctatgtcagtggctcagcgggtcgctgacgaaatggatgtcatgctgggacaggaagtgggctatagtatcaggttcgaggattgctccagcgccaaaaccatcctcaaatacatgacagacggtatgctactccgcgaggcaatgaacgatccccttctggagcggtacggagtaattatcctcgacgaagcacacgagaggactctggctactgatatcctcatgggcgtacttaaggaggtagtccggcagagatcagacttgaaagtaattgtgatgagcgccacgcttgatgccggaaagtttcaaatctacttcgacaactgcccactcctgactataccagggaggacccatcccgttgagattttctatacacctgagcctgagcgggattacttggaggctgctatcagaaccgtcatccagattcatatgtgcgaggaggaggagggcgaccttctcctcttcctgactggacaagaagaaatcgacgaggcctgcaagcgaatcaaaagagaggtcgacgacctcgggcctgaggttggcgacatcaagattatccctttatactctactctgccaccccagcaacaacagcggatctttgaaccccctccacctaaaaagcagaacggagcaattggtagaaaagtggttgtaagtactaacattgccgaaacaagcctcacaattgacggcgttgtgttcgtaatcgaccccggtttcgcaaaacagaaggtgtacaatcctcgcattcgagtcgagagtctcctcgttacagctatctcaaaagcatccgctcagcaacgcgctgggcgagcaggccgaaccagaccaggaaaatgcttccgcctatacactgagaaagcctacaagactgagatgcaggataatacttatccagagattctcaggtccaaccttggcagcgtcgttctgcagctcaaaaagctgggcatcgatgacctggttcattttgactttatggatcctccggctccagagacactgatgcgggcactcgaactcctgaattacctggccgctctgaacgacgatggagacctgacagaactgggcagtatgatggcagagttccctctcgacccccagcttgccaagatggttatcgcaagctgcgactacaactgttctaacgaggtcctgtcaatcaccgctatgttatctgtaccccaatgctttgtgagacccacagaggctaaaaaggccgcagacgaagccaagatgcgtttcgcccacatagatggtgaccacctgacgcttttgaacgtgtaccatgctttcaagcagaaccacgagtcggtgcagtggtgctacgacaattttataaattacaggtcgttaatgtcagccgataatgtacgtcagcagttgtcacggatcatggaccgatttaacctgccacggagaagcacagatttcaccagtcgggattactacataaacattcgcaaggcccttgtgacaggatatttcatgcaggttgcacaccttgaacggacaggacactatctgacggtgaaagacaatcaggttgtgcagctccatcccagcaccgtactagaccataagccagaatgggtgctttataatgaattcgtgttgacaactaaaaattatattcgtacctgtaccgacatcaaacccgaatggttggtgaagattgctccacagtattacgacatgtccaacttcccacagtgcgaggccaaacgtcagctagacaggataatagcaaaacttcaatctaaggagtattcacagtattag

SEQ ID NO: 220339 - DNA, 2355 bp, synthetic construct
  misc_feature 1..2355: note = Description of Artificial Sequence: Synthetic coding sequence
  source 1..2355: mol_type = other DNA
atgagtaaacgacatagactagatctgggcgaggactaccccagcggcaagaaacgggctggaaccgacgggaaggatcgggacagggacagagagcgcgaccggggtgacagggaaagagagagagagaaggagaaggagaaggaactccgcgcttctacgaatgctatgctaatttctgccggtctaccacccctaaaagcatcccactccgcacacagcacccattcagctcactctacccactcaacacatagcgcccactctactcatgccggacatgcaggtcacacaagcttgccgcaatgtattaatccattcacaaacctcccccacacacccagatactatgacattctcaagaaaaggctgcagctccctgtttgggaatataaagaccgatttactgacattctggtccgccatcaatcatttgtgctggtcggtgagacaggaagcggaaagactactcagatccctcaatggtgtgtggaatacatgcgctcgctccctggcccaaaacgtggcgtcgcttgcacacagcccaggagggtggccgcaatgtccgttgcacaaagggtggccgatgaaatggacgtaatgttaggccaggaagtaggttattcaatcagattcgaagattgcagtagtgcgaagaccattctgaaatatatgactgatgggatgctgcttcgcgaggccatgaatgatcccctcttggagcgctatggagtaatcatcctcgatgaggcccatgaaagaactctcgccactgacattctgatgggggtgctgaaagaagtggtcagacagcgtagcgacctgaaggtgatagtcatgagtgcaaccctcgacgccggaaagtttcagatttatttcgataactgcccgctgcttaccatcccaggtcgcacccacccagtagagattttctacacacccgaaccagaaagagactacctggaagccgcaattcggacggtgatccagatacacatgtgcgaggaagaagagggggacttgctcctctttcttaccgggcaggaggaaatcgacgaagcttgcaagagaattaagcgcgaagtggacgacctcggccctgaagtgggcgacatcaagatcatcccgctttatagcacactccctcctcaacaacagcaaaggatttttgaaccccctccgccaaagaaacagaatggagcaattggcagaaaggtggtcgtcagcactaacatagcagagacatccctgacgatcgatggcgtggtatttgtcatcgaccctgggtttgcaaaacagaaagtgtataaccccaggatccgagtcgagagtctgctggtaaccgctataagcaaggctagtgcccagcagcgcgctggtagagcaggcaggactaggccgggtaagtgctttagactatataccgagaaggcttacaaaacagagatgcaagacaacacatatccagagattctcagatccaacctgggtagcgtcgttctgcaattgaaaaaactcggaatcgatgatctcgtccacttcgatttcatggatccaccagcccctgagactctgatgcgggctttagaactacttaactatctagccgctctcaacgatgacggcgatttaacagagctgggatcaatgatggccgagttccctctggacccacaactggccaagatggtgattgcaagttgcgattacaactgttccaacgaggtattatccatcacagccatgctctccgtccctcagtgctttgtaaggcctactgaggccaaaaaggccgctgatgaagcaaagatgcgcttcgctcatatcgacggtgaccatctgaccctgctgaacgtgtatcacgcttttaagcagaaccacgagagcgtacaatggtgctacgataatttcataaactacaggtcactaatgtctgcagacaacgtgaggcaacagctgtcaaggatcatggaccggttcaacctgccaagacggtctactgacttcacatcaagggattattatataaacattcggaaggctctcgtgacaggctacttcatgcaggtggcccacctggaacgaaccggacactacctaacagttaaagacaatcaggtggtccagctacatccatctaccgtgctggaccacaaacctgagtgggtgttgtataatgagtttgtgcttactaccaaaaattatataagaacctgcacggatatcaaacccgaatggttggtgaaaattgcaccacagtattacgacatgtcaaattttccccagtgtgaggctaagcgacagttggaccgaataatcgcaaagctgcagtcgaaggaatactctcaatactag

SEQ ID NO: 220340 - DNA, 1683 bp, synthetic construct
  misc_feature 1..1683: note = Description of Artificial Sequence: Synthetic coding sequence
  source 1..1683: mol_type = other DNA
atggagtctcagccggctcaggaatgcctaatgcagatgttcttgcctatcgagcctgcctgctttgtagaatggttgggcacaagccctagccagttgggggtcgtgatggtggacgaagctcacgagagaacgcttcacaccgacatactgtttggactgataaaagacgtcgccagatttcgtcccgaattaaaagtcctagtggccagcgcaacaatggatacggccagattcagcacattcttcgacgatgcgcctgtatttcgcatccctggtcgtcgattcccagttgacattttctacaccaaggcccctgaagctgattacttagaggcttgcgtggtgtccgtgctccagattcacgtgacacagccacctggtgatatcttagtttttttgacaggacaggaggagatagaggcggcatgcgagatgctgcaggataggtgtcggagattgggttctaaaatacgagagctcctcgtactccccatctatgcaaatctgccttccgacatgcaggctaggatcttccaacccactcctccaggggcacggaaagtagttgtcgccacaaatatcgctgagacctccctcaccattgagggaattatttatgttcttgacccaggcttctgcaagcaaaaatcgtacaatcctcgtaccggaatggaatccctcacagtgacaccgtgtagcaaggcaagtgccaaccagcgcgctggtcgagctgggagggtggcagctggaaaatgtttccgcctgtatacagcctgggcctaccaacacgaactggaagaaaccacggtgcccgaaatacaacgcacgtccctggggaatgtggtgcttctgctgaaatcccttgggatacatgatttgatgcattttgacttcctggacccccctccttatgagactctgctgttagctctggagcagttatacgcactgggcgctcttaatcatttgggggagctgaccacctcaggcagaaagatggcagaactgcccgttgatccgatgttgagtaaaatgatcctcgcttctgagaaatactcgtgctccgaggagatcctaacagtggcagcaatgttgtccgttaataactctattttttataggcctaaggacaaggtcgttcatgccgacaatgcaagagtgaacttctttttaccaggaggagatcacttggtactgcttaatgtctatacgcagtgggcagaaagcggatattcttcacagtggtgctacgagaatttcgtgcagttcaggtctatgagaagagcccgagatgtacgggagcaattggagggcctgttggaaagggtcgaggttggcctttcgtcatgccagggcgattatatccgcgtccgcaaggccatcacggccggttacttttaccacaccgcacggctgaccaggagtggataccgaaccgtcaagcagcagcagacagtcttcatacatcctaatagcagcctctttgaacagcaacctcggtggttattgtatcatgagctggtgcttacaacaaaagagtttatgcggcaggtgcttgagatcgagtccagctggcttttggaagttgcccctcactactacaaggcgaaggaactcgaggacccgcatgccaagaagatgcccaaaaagatcggcaaaacccgcgaggaactaggatag

SEQ ID NO: 220341 - DNA, 3126 bp, synthetic construct
  misc_feature 1..3126: note = Description of Artificial Sequence: Synthetic coding sequence
  source 1..3126: mol_type = other DNA
atggcgacccctgcgggtctggaacgttgggtccaagacgaactccattctgtcctcggattgagtgagcgacacgttgcacagtttctcattgggacagcacagaggtgcacaagtgccgaggaatttgtccagaggctcagagatactgacaccttggatctctcagggcctgcccgtgacttcgcattgagactgtggaataaagtgcctcggaaggcagttgtagaaaagccggctcgagctgctgaacgggaggccagggcattactcgaaaaaaaccggagctataggcttctggaagatagcgaggagagcagtgaggaaacagtcagccgggcaggtagctctcttcaaaaaaaaaggaagaaaagaaagcacttaaggaaaaagcgagaggaagaagaagaagaggaagccagcgagaaagggaagaaaaagacaggtggcagtaaacagcagaccgaaaaaccggaaagtgaggatgagtgggaacggactgagcgcgagagactgcaggacctcgaggagcgcgacgcctttgcggaacgggtgcgccagagagataaggaccgcaccaggaacgtcctggagagatcagacaagaaagcatacgaggaagcacagaagcgactcaagatggctgaggaagacaggaaagctatggttccggagctgagaaaaaaaagtcgcagggagtacctcgcaaaaagggagcgcgagaagttagaggacctggaggctgagctggccgatgaggagttcctctttggagacgtcgaattgagtcggcatgaacgacaagaactgaaatataaaaggcgagtgcgtgatcttgccagggaatatcgcgcagcaggcgagcaggaaaaactagaggccaccaatcgataccacatgcccaaggagacacgcggtcagcctgcgcgtgctgttgatctggtggaggaagaatcaggggctcctggcgaggagcagcggaggtgggaagaggccagactcggcgcagcctcgctgaaattcggagcgagggacgccgcaagccaggagccgaaatatcagttggtattggaggaagaagaaaccatagagtttgtccgggcaacgcagcttcagggtgacgaggagccgtcggccccacctacgtcaacccaggcgcaacaaaaggaaagcatacaggccgttcggagaagtctgccagtttttccttttagggaagagctactggctgcgatcgctaaccaccaggtgctgattattgagggggaaaccggtagcggaaaaacgacccagatcccccagtacctattcgaggaaggatacacgaacaagggtatgaagatcgcctgcacgcagcctagacgggtggcggcaatgagtgttgccgctcgggtcgcccgagagatgggtgtgaagctgggcaacgaggtcgggtatagcatacgattcgaagattgcacatcagagagaacagttctgagatatatgaccgacgggatgctactccgggaattcctatcagaacccgacctggctagctacagtgtggtgatggtggacgaagcccatgagagaacccttcatactgacatcttgtttggtctgattaaagatgtggccaggttccgccctgagttgaaggtgctggtggcctctgccaccatggacaccgccagattttcaacctttttcgatgatgcccctgtctttcggataccgggacgcagatttccagtagatatcttttacactaaggcccctgaggccgactacctagaggcctgtgtcgtatccgtgctccagattcatgtgactcagcctcctggagatatactcgtgtttctcaccggacaagaggaaattgaggccgcttgtgagatgctacaggatagatgccggaggctcggctctaagatccgagagctgctagtcctgcctatttacgctaaccttccaagtgatatgcaggcgaggattttccaaccgaccccacccggagcccgaaaggtcgtggtcgccaccaacatcgccgagacttccctgacaatcgaaggaattatctatgtgctcgaccctgggttttgcaagcaaaagtcttataacccccgtaccggcatggagtctctgactgtcacaccatgttccaaagcttccgcgaaccagcgagctggcagagccggacgcgtggcagccggaaaatgtttccggttgtacactgcctgggcctatcaacacgaacttgaagaaaccactgtgcccgaaatccaaaggacctctctcggcaatgttgtcctgctgcttaaatcactggggatccacgacctcatgcactttgactttctagaccctcctccctacgagacgttactgttggccctcgaacagctatacgccttgggtgcactcaaccacctcggggaattaactactagcggcaggaagatggccgagctgccggttgaccccatgttatccaagatgattcttgcttcagagaagtactcatgttccgaagagatcctgacggttgccgcaatgctgtcagtaaataactcgattttttacaggcctaaggacaaagtggttcatgccgataacgcaagggttaattttttcttaccaggcggtgatcatcttgtgttactgaatgtctacacacagtgggccgaaagtggatatagctctcaatggtgctacgaaaacttcgtgcagtttagatccatgcgcagagcccgtgacgtgcgggaacaactggaaggactgctcgaacgcgtggaagtgggcctaagctcttgtcagggtgattatatcagagtgagaaaggctattaccgcaggctatttttaccacaccgctcgcctgaccagatctggttacaggacggttaagcaacagcagacagtgttcattcaccccaatagttcgctttttgaacagcaacccagatggctgctttaccacgagttagttttgacaacaaaggagttcatgaggcaggtcctagagattgagagcagttggctgttagaagtggctccacactattacaaagccaaggagctggaggatccgcatgccaagaagatgcctaaaaaaattggcaaaacaagagaagagctgggctag

SEQ ID NO: 220342 - DNA, 1683 bp, synthetic construct
  misc_feature 1..1683: note = Description of Artificial Sequence: Synthetic coding sequence
  source 1..1683: mol_type = other DNA
atggagtcacagccggcacaagaatgtctgatgcagatgtttctacccattgagcctgcttgctttgtggagtggttaggtaccagtccgagtcagttgggtgtagtcatggttgacgaagcccatgagaggacccttcataccgacattctctttggacttatcaaagatgtggcgaggtttaggcccgagcttaaagtgctggttgcctcagctactatggacacagctagattcagtactttctttgatggagccccagtgttccgcatccccggtcggaggttccctgtcgatatcttttacaccaaggcccctgaggcagactatctcgaggcctgtgtagtctctgttctccagattcacgtaactcagcctcccggagacattttggtattcttgacaggccaggaagagatagaagctgcctgtgagatgctgcaggatcgttgccgcaggcttggttctaaaatcagggagctgctggtgcttcctatctacgccaacctgccttccgacatgcaggctaggatctttcaacctaccccccctggtgctaggaaggtcgtggtcgctacgaatatcgctgaaacaagtctgacaatcgagggaattatctatgtccttgatccgggtttctgtaaacagaaaagttacaaccctcggactgggatggagagcctcacagtcaccccatgctccaaggcttctgcaaaccagagggcgggtagagccggacgagtcgctgctgggaagtgttttaggctctatacagcatgggcttaccagcatgagcttgaagagacgactgtacccgaaattcagagaaccagtttagggaatgtggtgctgttacttaagtcgctgggcattcacgatctgatgcactttgattttctggatcctccgccttacgagacccttttactcgcgctagagcagttatatgcgcttggagccttgaatcacctcggggagctcaccacttcgggacgcaaaatggccgaacttcccgtcgatccgatgttgtctaagatgattctggcctctgagaagtattcctgttccgaagagattctcactgtggctgctatgttgagcgtgaataatagcatcttttaccgacccaaagataaggtggtgcatgcagacaatgcacgcgtgaacttttttttgccaggcggagatcatctggtactgctcaacgtctacacacagtgggctgagtccggctacagctcacagtggtgttacgaaaattttgtgcagtttcgatcaatgcgcagagcaagggatgtgagggaacagctcgaggggttgcttgagcgggtggaggtgggactgtccagctgccagggtgactacatacgggtgaggaaggccatcacagcaggctacttctaccacaccgcaagattaactcgaagtggctatcggactgtaaaacaacagcagacggtgtttattcaccctaattcctctttgtttgaacagcagcccaggtggcttctctatcacgaactagtcctgactactaaggaatttatgaggcaggtcctggagattgagagctcttggctcttggaagtggctccccactattataaggcgaaggagttggaagatccacacgcgaaaaagatgccaaagaaaataggcaaaacacgggaggagctgggatag

SEQ ID NO: 220343 - DNA, 3126 bp, synthetic construct
  misc_feature 1..3126: note = Description of Artificial Sequence: Synthetic coding sequence
  source 1..3126: mol_type = other DNA
atggcaacccccgctggcttggagcgatgggtccaggatgagcttcacagcgtcctgggattatccgagcggcacgtcgcccagtttcttatcggtacagcccagcgctgtacatctgctgaggaattcgttcaacgccttcgcgacaccgacacactggatctcagcgggccagcacgggattttgcacttcgcctctggaataaggtccccagaaaagcagtggtggaaaaacctgctagagccgcagaacgggaggccagagcactactggagaaaaataggagctacagactcctcgaggatagtgaggaatcctcggaggaaactgtgtcccgggctgggtccagtttgcagaagaagcgaaagaagcggaagcacctgcggaagaaaagggaggaggaggaagaggaggaggcctccgagaagggtaaaaagaaaactggtgggtctaagcagcagaccgaaaagccagagtctgaggacgagtgggagagaaccgagcgggaaaggctccaagacctcgaggagagagacgcctttgcagaacgcgtgcgacagcgcgacaaagaccggacacgaaatgtcctcgagcgttctgacaaaaaagcatacgaggaagctcagaagaggcttaagatggcagaagaggacagaaaggccatggttcctgaactacgcaagaagtctagacgagagtacctggctaagagagagcgagaaaagcttgaggacctggaagcagagcttgctgatgaggagttcctttttggggatgtggagctgagcaggcatgaaagacaagagctgaaatataagaggagagtgagggatctggcccgagagtacagagccgctggggaacaagaaaaactggaagccacaaatcgatatcatatgcctaaggagacaagaggacaacccgctagggccgtagacctcgtggaggaagaatcaggggctcccggagaggagcagcggaggtgggaggaggccaggctcggcgcagcttccctgaagttcggcgctcgggacgctgccagtcaggagccaaagtaccagctggtgctcgaggaggaagagacaattgaattcgttcgagccacccagctccagggagacgaagaacctagcgctccaccgacaagtacacaggcccagcaaaaggaatctatacaggccgtcaggcgttctctgcccgtcttccctttccgggaggagctactggcagccattgcaaaccatcaggtattaatcatcgagggcgaaacaggaagcggtaaaaccacacaaattcctcaatatctctttgaggagggctacactaataaaggcatgaagatcgcctgtactcagccacggagggtcgcggctatgagcgtcgcagccagagtggcacgcgagatgggcgtgaaactaggaaacgaggtgggctactctattagatttgaggactgtactagtgagcgcaccgttctgcggtatatgacggatgggatgttgttaagagagtttttgagcgaaccagacctggctagctattcagtggtaatggttgatgaggcccatgagcggaccctgcacaccgatatcctgtttggtcttatcaaagatgtggccaggttccgccctgagctaaaggtgcttgtggccagcgctaccatggatacagctcgtttttcaaccttctttgacggcgcacctgtgttccggatacccggaagacggtttccagtggatattttctacacaaaggcgccagaagctgactacctcgaggcatgcgtcgtgtcagtcctgcagattcacgtcacccagccccctggagatatactggtattcttaacgggccaggaggagatcgaggcagcctgcgagatgctacaggacagatgcaggagactgggatctaagattagggagttactagtgctgcccatctacgctaatttgcctagtgatatgcaggctcggatttttcagcccacccctccaggagcccgaaaggttgtggtggctaccaacatcgctgagacctcactgacgatcgaggggatcatctacgtgttggatccgggattctgtaagcagaagtcatacaacccgaggaccgggatggagtcattgactgttacaccctgttccaaagcatccgcgaaccagcgagccggacgggctggtcgggtcgctgctggaaagtgttttcggctttatactgcatgggcgtaccaacatgagttggaagagaccaccgtgcctgagatccagaggaccagtctgggcaacgtcgtgctgctcctgaagagtctgggcattcatgacctcatgcacttcgactttctggacccacccccatacgagacactgctgctggcgttagagcagctgtatgccctcggggctctgaaccaccttggggaactcactacgagcggcagaaaaatggccgagctgcctgttgaccctatgcttagtaaaatgatcctggcaagtgagaagtactcgtgtagcgaagagattttgactgtcgcagcaatgctcagcgtaaataactccatcttttaccggccaaaggacaaggttgtccacgccgacaatgcgagagtgaatttctttcttcctggcggagaccacctggtcttgcttaacgtttacacccagtgggccgaaagcggctattcgtcgcagtggtgttatgaaaacttcgttcagttccggagcatgagacgagctcgggatgtacgtgaacaactagagggcctcctggagcgggtggaagtcgggctatcgagctgccagggggattatatccgggtgcggaaggctatcactgcaggttacttctatcataccgcgaggctgacacggagcggataccgcacggtgaagcagcagcaaaccgtgtttatccaccccaatagttctctcttcgagcagcagccgagatggctactgtatcatgagctcgtgctgacaaccaaagagttcatgaggcaagtcttagaaattgaaagttcctggctcctcgaggtggctcctcattattacaaagctaaagaactcgaagatcctcacgctaagaaaatgcccaagaaaattggcaaaacccgtgaagagctcggctag

SEQ ID NO: 220344 - DNA, 1683 bp, synthetic construct
  misc_feature 1..1683: note = Description of Artificial Sequence: Synthetic coding sequence
  source 1..1683: mol_type = other DNA
atggagtcgcaaccggctcaggagtgcctgatgcagatgtttctacctatagagcctgcttgctttgtcgaatggctcgggacttcgccctctcagctcggagtcgtgatggtagacgaagctcacgagcgcaccttgcatactgacatcctgttcggcctgatcaaagatgtagcccgattccgaccagagctcaaggttctagtggcctcagccaccatggataccgctagattttcgacattctttgatgacgcccctgtatttcgtattccagggcgacggttccccgttgacatcttctacacgaaggcccctgaggctgactaccttgaggcttgtgttgtgtccgttttgcagatccatgtaacccagcccccaggtgacatcttagtattcctgacagggcaagaagagattgaggctgcttgtgaaatgctccaggaccgctgtagaaggctgggcagtaagatcagggagttgctagtgctcccgatctatgccaatctacctagtgatatgcaagcacggatctttcagcccaccccccctggcgctagaaaggtggtagtggcaacgaacatcgcggaaacatcacttaccatcgagggaatcatttatgtgttggatccagggttttgcaaacagaagtcctacaaccccagaaccgggatggaatccctcacagtgactccttgttctaaggcctccgctaaccagcgggctgggcgagctggacgagtagctgctgggaagtgctttcgtctctataccgcatgggcctaccaacatgagctcgaggagacgactgttcccgaaattcagaggacttccttggggaacgtcgtgctgctgctgaagtccttgggcattcacgatttgatgcatttcgacttcctggatccgccaccctatgaaactcttcttttggcgctcgagcaactttatgccctcggggcactgaaccacctgggcgagctgaccacgtcagggagaaaaatggctgagttgcccgtggaccccatgctgtctaagatgatcctcgcatccgaaaagtatagttgcagcgaggagatcttgacagtggccgctatgctatcggtgaataacagcatattttaccgacctaaagacaaggtggtgcacgcagataatgctcgggtgaattttttcctgccaggaggcgatcatcttgtgctgctcaatgtgtatacgcagtgggccgagagcggatactcaagtcagtggtgttatgaaaacttcgtccaatttcgctctatgcgcagagcacgcgatgtgagagaacagctggagggcttgctcgagcgggtggaagtggggctgtcctcctgccagggtgactatatcagagtaagaaaagctataacggccggttatttctaccataccgcccgactcactcgcagcggctatcggaccgtaaaacagcagcagactgtgttcatccaccccaacagttctctgttcgaacaacaaccgcgatggttattataccatgagctcgtgttaacaacaaaggaatttatgcggcaggtgctcgagattgaaagtagttggctgctggaagtggcccctcattattacaaagctaaagagttggaagacccccatgccaagaaaatgccaaaaaagatagggaagacccgggaagaactagggtag

SEQ ID NO: 220345 - DNA, 888 bp, synthetic construct
  misc_feature 1..888: note = Description of Artificial Sequence: Synthetic coding sequence
  source 1..888: mol_type = other DNA
atgtctgaagatccgaggggccctaaagtgccgagaaaagcggtggtggagaaaccagcaagggccgcagaacgggaagcaagggcacttttagaaaaaaaccgttcgtacagactccttgaggacagtgaggagtcctccgaagaaacggtgtcaagggccggatcctctctgcagaaaaagaggaagaaaaggaagcatctgcggaagaagcgggaagaagaggaagaggaggaggcatctgagaaaggaaaaaaaaagacgggcggtagcaagcaacaaaccgagaaacctgaatccgaagacgaatgggagcgcactgaacgcgagcgcctgcaggacctcgaggagcgcgatgcctttgccgaacgagtgaggcagcgggacaaggacagaaccaggaatgtgctcgaaagatctgacaagaaggcgtatgaggaggcccagaagaggctgaagatggcagaggaggacaggaaagctatggttcccgagctgagaaaaaagtcgaggcgcgagtatttggccaaacgtgaacgggaaaagctggaagacctggaagcggaactcgcggacgaggagttcttgtttggcgatgtggagctctcaagacatgagagacaggagctgaagtataaacgtagggtgagggacttagcacgcgagtatagagccgcaggcgagcaggagaaattggaagctactaacagatatcacatgcctaaggagacacgaggtcagcccgctagggctgtggacctagtggaggaggaaagtggtgccccaggcgaagaacaacgcaggtgggaggaggccaggttaggtgccgctagcctgaaattcggcgctcgggacgccgcatcacaagagcctaagtatcagctgtag

SEQ ID NO: 220346 - DNA, 3126 bp, synthetic construct
  misc_feature 1..3126: note = Description of Artificial Sequence: Synthetic coding sequence
  source 1..3126: mol_type = other DNA
atggcaacacctgcaggcttagagcgttgggtccaggatgagttacattccgtcctgggcctctctgagcgccacgtggctcagttcctgataggtacggcccagaggtgcactagcgctgaggaattcgtccaacggctccgggacactgatactcttgacctgtctggccctgcaagggatttcgctcttagactctggaataaggttccaagaaaagcagtggttgaaaagcccgctagagccgctgaaagagaggcccgagccctcttagaaaagaatagatcatatcgcctgctcgaggattctgaagaatccagcgaagagacagtctcgagggccggttccagcctccagaagaagagaaaaaagcgcaagcacctgcgaaaaaaaagagaggaggaggaggaagaggaggcgtcagagaagggcaaaaaaaaaacagggggatctaagcagcagacagagaagcccgagagtgaggacgaatgggagcggactgagcgagagaggctccaggatctagaagaaagagatgcattcgctgaacgagtaagacagagggacaaggatcgaacacggaatgtgctagaacggtctgacaagaaggcttatgaggaggcccaaaaaagattaaaaatggccgaagaggatcgtaaggccatggtgcccgagcttcgtaaaaaatcacggcgagagtacctcgccaagcgagaacgggaaaagcttgaagacctcgaggcagaactcgccgatgaggaattcctgttcggtgatgtggaactgagcaggcacgagaggcaggaactgaagtataagaggagagtgagggacctggcacgggaatacagggccgctggcgaacaggagaagctggaggctacaaatagataccacatgccgaaggagactcgcggacagcctgcgcgtgcagtggacctggtcgaggaggaatccggggcacccggtgaggagcagcgaaggtgggaggaggctcggctgggggcagccagtctcaaatttggcgcacgggacgccgctagccaggagcccaaataccaactcgtgctggaagaggaagaaaccatcgagttcgtaagagccacccagttgcaaggcgacgaagaaccatccgcccctccaacaagcactcaggctcaacagaaggagtctattcaagccgtgaggcggagcctgcccgtgttcccttttcgagaagagctcctggcagccattgcaaaccaccaggtccttataattgaaggagaaactggatctggcaagaccactcagatcccgcagtacctgttcgaagaggggtacactaacaagggtatgaagatcgcctgtactcaaccccgtagggtcgccgctatgtccgtagccgctagagttgccagggaaatgggagtaaagctcggcaacgaggtagggtactctattagattcgaggattgtacaagtgaaaggacggtccttaggtacatgaccgatggcatgttgcttagggaattcctatccgaacccgacctcgcctcttactctgtcgtcatggtcgacgaggcgcacgagcggaccctgcacacggacatcttgttcggcctgatcaaagatgtggcaaggttccggccagaacttaaggttttagtggctagcgctaccatggataccgcaagatttagcaccttcttcgatgacgctcctgtatttagaattcccggacgacgtttcccggtggatatattctataccaaggctcctgaggccgattatctggaagcctgcgtggtgtctgtactacagattcatgtcacccaaccccctggagatattcttgtgtttctgaccggccaggaggagatcgaagccgcttgtgagatgttgcaggatcggtgccgcaggcttgggtccaaaatccgtgaacttctcgtgttgcccatctacgcaaaccttccatcagatatgcaagcaaggatctttcagcccactccacctggtgcccgaaaggtagtagtggctactaatatcgccgagacctccctgaccatagagggtatcatctacgttctggacccgggattttgtaaacaaaaatcgtataaccctcggaccgggatggaatcactgactgttactccctgcagcaaagcttctgcgaaccaacgcgctggcagagccggtcgcgttgccgctggaaagtgctttcgactttatacagcatgggcatatcagcacgagctggaggagacgactgtcccagaaattcagcgtacatctcttggtaatgtagttcttctgcttaaaagtttgggcatccacgacttgatgcatttcgattttctggacccccctccgtatgaaacactcttactcgccttagagcaactgtatgcgttaggggctctcaaccatctaggcgagctcaccactagtggacggaaaatggctgaactccccgtcgaccccatgcttagtaagatgattcttgcatccgaaaaatatagttgcagcgaggaaattcttacggtggctgcgatgctcagcgtgaataatagcattttttatcggcctaaggacaaagttgtgcacgccgataatgccagagtgaattttttccttcctggaggtgatcatcttgtgctgctgaatgtttatacccagtgggccgaaagtgggtactcatcacagtggtgttacgagaactttgtgcagtttcgctccatgagaagagcccgtgacgtgcgggagcagctcgaggggctccttgaacgcgtcgaagtggggctgtcatcttgccaaggcgattatattcgtgtccgcaaagcaatcactgccggatacttttaccacactgcacgactaaccaggtctgggtaccgcaccgtgaaacagcaacaaacagtctttatacatcctaatagctcactttttgagcagcagccccgttggctgttgtaccacgagttggtcctgacaacgaaggagttcatgcggcaggtgcttgagattgagtcgagttggctcttggaagtggctccacattattacaaggccaaggagctggaggaccctcacgccaaaaagatgcctaaaaaaatcggcaaaactcgggaagaactcggctag

SEQ ID NO: 220347 - DNA, 3126 bp, synthetic construct
  misc_feature 1..3126: note = Description of Artificial Sequence: Synthetic coding sequence
  source 1..3126: mol_type = other DNA
atggccactcctgccggattagagcgctgggtccaggacgaactgcacagcgtcctgggtctgagcgagcggcatgtcgcacagtttctgatcggaacagcccaacggtgcactagcgcggaggaattcgtgcagaggttgcgcgacacagatacactcgatctgtcaggaccagcaagggattttgcccttcggctgtggaacaaggtgccaagaaaagcggtggtagaaaagcccgctcgcgctgcggagcgagaggctcgagctttgctggagaagaacaggtcatatagactgctggaggactccgaggaatcttccgaagaaactgtgtcgcgagcaggctcctctctgcagaagaaacggaagaagcgcaaacatctgagaaagaagagggaggaagaggaagaggaggaagcctctgagaaagggaaaaagaaaacagggggatcaaaacagcagactgagaaacccgagtcagaggatgagtgggagagaacagagagggaacggttacaggaccttgaagagagagatgccttcgcagagagggtgcgtcagcgggataaagaccggactcggaatgtcttggaaaggtccgataagaaagcctacgaggaggctcaaaagagactaaagatggcggaggaggacagaaaagcaatggtgccagagctgcggaaaaagtctagacgagaatatttagcaaagagagaaagagagaagctggaggacctggaagcggagctcgccgacgaagagttcctgtttggagacgtggagctatctcgtcatgaacgccaagagctgaagtacaagagacgggtgcgggacctagcaagggaataccgcgctgcaggtgaacaggagaaattggaggccaccaacagatatcatatgcctaaagagaccagaggccaaccagccagggccgtcgatcttgtggaggaggagtctggcgcaccgggtgaggagcagaggagatgggaggaggctagattaggagcggctagtctcaagtttggggcaagagacgccgcttcacaggaacctaaataccagcttgtgctggaggaggaagagaccatcgagtttgtcagagccacccagctccagggggacgaggaaccttctgcacccccaacctccactcaagcccagcagaaggagtccatacaggccgttaggcggagtcttcctgttttcccctttcgcgaagagctactggcggctatcgcaaaccatcaagtgcttatcatcgagggcgagactggcagtggtaaaacaacccaaatcccacagtacctgttcgaagaaggctacacaaataaaggtatgaaaatcgcttgcactcagccaagacgagtggccgctatgtcagtagccgcacgggtcgccagggaaatgggggtcaagctggggaatgaggtgggttacagtattcgattcgaagattgcacaagtgagcggactgtgttacgatacatgacagacggaatgctgctgcgggagttcctgtctgagcccgatcttgcatcctactccgtggtcatggttgacgaggcacatgagcgaaccctgcatacagatattttatttggcctgatcaaggacgtggcgaggttcaggcctgaactgaaggtgttggtcgccagtgcaaccatggatactgcgcgattcagtacatttttcgacgacgcgcctgtgtttagaatacctggcaggagatttccagtggatatcttttacacaaaggcaccggaagctgactatctggaagcatgcgtggtttcagttctgcaaattcatgtcacacagccacccggtgacatacttgtgtttttgactggacaggaagagatagaagccgcatgtgagatgctgcaagatcggtgccggcgactaggaagcaagattcgggagttactagttctgcccatttatgccaatctgcctagcgatatgcaggcaagaatctttcagccgacgcctccaggtgcccgaaaagtggtggtggctaccaacattgcagagacctcgctcaccatcgaggggatcatctacgttttagaccccggtttttgcaagcaaaagagctataatcctcgcaccggaatggagtcattgaccgtgaccccctgtagcaaagccagcgcaaaccagagggcagggagggctggacgcgttgccgctggcaagtgttttcgtctgtacacggcttgggcatatcagcacgagctggaggagacaactgtgccagaaatccagcgcacgtcactgggcaacgtcgtgcttttactcaagagcctgggtattcatgatttgatgcactttgatttcctagatccccctccttacgagacgctgctgctggctttggagcaactgtacgccctgggcgctttaaatcacttgggcgaactcaccacctccggtagaaagatggcagaactcccagttgaccctatgttgtccaagatgatcttagcatccgaaaaatactcttgtagcgaggagattctgacagtggccgctatgctaagcgtgaacaactcaattttttaccgacccaaggacaaagtcgtgcacgcggacaatgctcgggtgaactttttcctccccggaggcgatcacctcgtcctcctaaacgtatacactcagtgggccgaaagcggctacagcagccagtggtgttatgaaaactttgtgcagttccggtcgatgcggagagcaagagatgttagagaacagctcgaaggcctgcttgagcgtgtcgaggttgggttaagtagttgccaaggagattacatcagggtgcgcaaggcgatcacagccggttatttctatcatacggcgaggctgacgcggagcgggtaccgcacggtcaagcagcagcagactgtctttattcaccctaattcttcactctttgagcagcagcctagatggctcctctatcacgaattggttctgacgactaaagaattcatgagacaggtgctggagatagagtcatcatggctcctggaggtggctccacactattataaggccaaagagctcgaggacccacacgcgaaaaagatgcccaaaaaaattggcaagacacgtgaggaattgggctag

SEQ ID NO: 220348 - DNA, 3126 bp, synthetic construct
  misc_feature 1..3126: note = Description of Artificial Sequence: Synthetic coding sequence
  source 1..3126: mol_type = other DNA
atggccacccccgctggtctcgaacgctgggtgcaggacgagctccattccgtgctgggccttagtgagagacatgtggcccaattccttattggcactgcgcaaagatgcacttcagcagaggaatttgtgcaaaggctgagggataccgacaccctggatctcagcggaccagcgagggatttcgcactacggctgtggaataaagtcccacgcaaggcggtggtggagaagcccgcacgcgcagccgagcgcgaagcacgggctctgttagagaaaaacagatcgtaccggctccttgaagattccgaggagtcatctgaggaaacagttagtcgcgcaggctcatctttgcaaaagaaacgaaaaaagagaaaacacctgcgcaaaaagcgcgaagaggaggaagaagaggaggcctccgaaaagggcaaaaagaagacgggcggatccaagcagcagacagaaaagccagagtccgaagatgagtgggagcggaccgaacgcgagaggttacaggatctggaggaacgtgatgcttttgccgagagagtgaggcagcgggataaggatagaactcgcaacgtcttagaaagatcagacaagaaggcctatgaagaggcccagaaaagactgaagatggcggaggaggatagaaaagctatggtgccagagcttcggaaaaaaagcagacgggaatacctagccaagagagagcgggaaaagttagaggatctcgaggcagagctggccgatgaagagttcttattcggtgatgtcgagttgtcgcgccatgagaggcaggagttaaagtacaaaagaagagtgagggatctggcacgcgagtacagggctgctggggaacaggagaaacttgaggccactaacagataccatatgcccaaggaaacacggggacaacctgctcgggctgttgacttggtggaggaagagtctggcgcaccaggcgaagaacaacgtcggtgggaagaggccaggctgggtgccgcaagcttaaagtttggagctagagacgcagccagccaggaaccaaaatatcagctggtattggaggaagaggaaactatcgagtttgtgagggccacacagcttcagggggatgaggagcccagtgcaccacccacatcaacccaggctcagcagaaagagagcatacaagctgtcaggaggtcactgcctgtattccccttcagggaagagctcttagctgcaatcgcgaaccatcaggtgctgataatcgagggagagactgggagtgggaagaccacccagatcccacaatacctgtttgaagaaggatacacgaacaaaggcatgaagatcgcatgcactcagccgcgacgtgtcgcggctatgtctgtggccgctagagtagccagagagatgggggttaagctcggaaatgaagtaggctactcaatcaggtttgaggattgtacctctgagcgcactgtcctgcggtacatgaccgacggcatgctgctgcgtgaattcctttctgaacccgacctcgccagctattcagtcgtgatggtggacgaggctcatgagaggacgttgcatacagacatcctgttcggattaatcaaggacgtggctcggttcagacccgagctcaaggtgcttgtggcaagcgccaccatggacactgctaggttttccactttttttgatgacgccccagtcttccgcattcctggcaggcggttcccagtggatatcttttacactaaagccccagaggctgactaccttgaagcgtgtgtggtatcggtcctgcagattcatgtgacccagcctcccggagatatcctggtctttctgacaggccaagaggaaatcgaggccgcttgtgaaatgctgcaggatcggtgccgccgattaggttctaagattcgcgagctcctggtgctgcctatttacgctaaccttcccagcgatatgcaggccaggatcttccagccaacacctccaggcgctagaaaggtggtagtggccaccaacatcgctgagacaagcctgacaattgaaggtatcatttacgtgctagatccaggcttttgcaaacagaaatcctacaacccccgtactgggatggagtccttgactgtgactccatgctcaaaggcctcagccaatcagcgggctgggagggctggaagagttgcagctggcaaatgcttcaggctgtatacagcgtgggcgtaccagcacgagctggaagagaccacagtgcccgaaatccagcgcaccagcctgggaaatgtggtcctgttgttgaagtccttgggcatccatgatcttatgcatttcgactttctggatccaccaccttatgaaactcttttactggccttggagcaattgtacgccctcggcgcactgaaccaccttggggagcttacgacctcgggccgaaagatggccgaactgcccgtggaccctatgctgtcaaagatgatcctggccagcgagaagtactcttgctccgaggaaatactcaccgtagctgccatgttaagcgttaataacagtatcttctacaggccaaaagacaaggtcgtgcacgccgataatgctcgcgttaattttttcctgcccggaggtgaccatctcgtgctgctgaacgtgtacactcagtgggccgaatcgggctattccagtcagtggtgctatgaaaattttgtccagtttcgatcaatgaggcgggcacgcgacgttagggagcagctagaaggcctcctggaaagggtggaggtgggcttaagttcctgtcaaggagattatatccgtgtgcgaaaggccattacagccggatatttctaccacactgccagattaacacggtcaggatatcggaccgtaaaacagcagcagaccgtgtttatacacccaaacagctctctctttgagcagcagcctcgatggttattgtatcacgaactggtcctgacaaccaaagaattcatgagacaggtgctggagattgaatcaagctggctccttgaggtggcccctcattattacaaagcaaaggagctcgaggatccccacgcgaagaagatgccaaaaaaaattggtaaaactagggaagaattggggtag

SEQ ID NO: 220349 - DNA, 888 bp, synthetic construct
  misc_feature 1..888: note = Description of Artificial Sequence: Synthetic coding sequence
  source 1..888: mol_type = other DNA
atgagtgaagaccctcgcggtccaaaggtgcctaggaaggctgtggtggagaagcctgcccgagccgctgaaagagaagccagggcacttctggaaaagaacagatcctaccgcctcctagaggacagtgaagagagttcagaggaaacagtcagccgggcagggtcatctctgcaaaagaagcggaagaagcgaaagcatctgaggaagaagcgcgaggaagaagaggaagaggaggccagcgaaaaagggaagaaaaagaccggcggatccaagcagcagaccgagaagcccgaatccgaggacgaatgggaacggaccgaacgtgaaaggctacaggacctagaggagcgagatgcttttgcagagcgcgtgcgccagcgggataaagatcgaacaaggaatgttctggagcgctctgacaaaaaggcgtacgaggaggcccaaaagagactgaagatggcggaagaagataggaaagctatggtacctgagcttcgcaagaaaagccgccgagagtacttagctaaacgagagcgcgagaagctcgaagacctggaggcagaactggcagatgaggaatttttgttcggggacgtagagcttagcaggcatgaacgtcaggagcttaagtataaacgccgagtgagggatctcgctcgcgagtatagggccgcaggagaacaggagaagctggaggccaccaatcgatatcacatgcctaaggagacgcgtggccaacccgctagggctgtcgacctagtcgaagaagagtccggagctcccggtgaagaacagaggaggtgggaagaagcccgtctgggagcagcctccctaaagtttggcgctagggatgctgccagtcaggaacctaaatatcagctgtag

SEQ ID NO: 220350 - DNA, 888 bp, synthetic construct
  misc_feature 1..888: note = Description of Artificial Sequence: Synthetic coding sequence
  source 1..888: mol_type = other DNA
atgagcgaggacccacgaggaccaaaggttcccagaaaggcagtagtcgagaagcctgcgcgagctgccgaacgggaggccagagcactgctggaaaagaaccgatcctatagactgctggaggactctgaagagtcaagcgaggaaactgttagccgcgctggcagttccttgcagaagaagcgcaaaaagcgaaaacacttacggaaaaagcgggaggaggaagaagaggaagaagcgagcgagaaagggaagaagaaaactggcggttccaaacagcaaacagagaaacctgagtcagaagatgagtgggagcgtacggagcgagagaggctgcaggatcttgaagaacgggacgcttttgccgagcgggtaagacagcgagataaagaccggacgagaaatgtcttagaaagaagcgataaaaaggcttacgaggaggctcagaagagattgaaaatggctgaggaggacagaaaggcgatggtgccggagctccggaagaaaagccgccgagagtacctggccaagcgtgagcgggagaagcttgaggacctcgaggccgagctggccgacgaggaattcctctttggcgatgtggaattgtccagacacgaacgtcaggaactgaagtataaaagaagggtgcgggaccttgccagggagtacagggccgcaggagaacaagagaagctggaggccacaaatagatatcacatgcccaaggaaacaagaggacagccggcacgggcagtggatctcgttgaggaggaatcgggcgctccaggggaagagcaacgtcggtgggaagaggcacggctgggagcagcgagcctaaagttcggcgcacgggatgccgctagccaggaacctaagtatcagctgtag

SEQ ID NO: 220351 - DNA, 1683 bp, synthetic construct
  misc_feature 1..1683: note = Description of Artificial Sequence: Synthetic coding sequence
  source 1..1683: mol_type = other DNA
atggaatcccagcccgctcaggaatgccttatgcagatgtttctgcccatcgagcctgcttgttttgtagagtggctgggcacaagcccctcgcagctgggcgttgttatggtcgacgaagctcacgaaagaacactgcacacagatatcttgtttggattgatcaaggacgtggccaggttccgcccagagctcaaggtattggtggcatctgctactatggacacagccaggttcagcacttttttcgacgacgcacctgtcttcagaatccccggacgcaggttcccagttgacattttttacacaaaagcacctgaggccgattatcttgaggcctgtgttgtgtccgtactgcagatccacgttactcagccacccggagacatcctagtttttctgactggccaagaggaaattgaggccgcttgtgagatgctgcaagataggtgtaggcggcttggttctaaaatccgcgaacttcttgttctacctatctacgcaaacctacccagcgatatgcaagcaaggatcttccagcctacccctccaggtgcccgaaaagttgtcgtggccacaaatattgctgaaacttccctgaccattgaaggtataatatatgtgttggatccgggtttttgcaagcagaaatcttacaaccctagaaccgggatggagtcacttaccgttactccctgctctaaagccagtgccaaccagcgagctggacgggcaggcagagtggcagccggaaagtgtttccggctgtatactgcatgggcctaccagcacgagctagaggaaactactgtacccgagatccagcggacttccctagggaacgtggtactgctgctgaagtccctaggaatacatgacctgatgcacttcgactttctggacccacctccctatgagacattactgctagcactagaacagctatacgctctcggtgccctgaaccatctgggcgagctgacaaccagcgggcgaaagatggccgagctgccagtcgaccctatgctgagtaagatgattttggccagtgagaagtactcttgttcagaagaaattcttaccgtggcagccatgttaagtgttaacaactcgatcttttacagaccgaaagacaaagtggtacacgccgataacgcaagggtgaacttttttctccccggaggagatcatctcgtgctgctgaacgtctatacacaatgggcagagtctggatactcctcacaatggtgctatgagaacttcgtgcagtttcgcagcatgagacgggcacgcgatgtccgggaacagttggagggactcctagagcgtgttgaggtgggtttgtcctcatgtcagggtgattacatccgtgtcagaaaagccatcactgctggttacttttatcacacagcccgacttacacggtcgggctaccgaaccgtcaaacagcaacagaccgttttcatccaccccaactcctccctgttcgaacagcagccccgttggctgctctaccacgagcttgttctaacaactaaggaattcatgcggcaggttcttgagatagaatcttcatggctgctggaggtcgctccccactactacaaggcgaaagagctggaggacccgcacgccaagaagatgcctaaaaagatcggtaaaactagagaggagctgggttag

SEQ ID NO: 220352 - DNA, 888 bp, synthetic construct
  misc_feature 1..888: note = Description of Artificial Sequence: Synthetic coding sequence
  source 1..888: mol_type = other DNA
atgtctgaggatcccaggggaccgaaagtacccagaaaagcagtagttgaaaaacctgcccgtgctgccgaacgagaggcccgtgccctgctggagaaaaatcgctcataccgcctccttgaagattcagaggaaagttccgaggagacagtgtccagagccggtagcagtctgcaaaaaaaacgaaaaaaaagaaaacacctccgaaaaaaacgggaggaagaggaggaagaggaagcctcagaaaagggcaaaaagaaaaccggcggttccaaacagcaaactgaaaagcccgagtctgaagacgagtgggagcggacggaacgggagcgactgcaggaccttgaagagagagatgcctttgcggaacgggtgcggcagagggacaaagatcggacgcgaaacgtactggagcgctctgacaagaaggcttacgaagaagcccaaaagcgcctgaaaatggccgaggaggatcggaaggctatggtgcccgaactgcgaaagaagagtcgaagggagtacctcgcaaaacgcgagcgcgagaagctcgaagacctggaagccgaactggcggacgaggagtttctatttggagacgtggaactgagtcggcacgagcggcaagagttaaagtataaaaggcgagtgagagacttggctcgcgaatacagagccgcaggagagcaagaaaagttggaggccaccaacagataccacatgcctaaagaaacacggggtcaaccagcaagagcagtggatttagtggaagaagagagtggtgccccaggcgaggagcagcgaaggtgggaagaagccaggttgggggctgcttcattgaagttcggagcacgcgacgccgcttcccaggagccaaaataccagctatag

SEQ ID NO: 220353 - DNA, 888 bp, synthetic construct
  misc_feature 1..888: note = Description of Artificial Sequence: Synthetic coding sequence
  source 1..888: mol_type = other DNA
atgtcagaggatcccagaggacctaaggtccctcggaaagccgtggtggaaaagccggcaagggccgctgagagagaagccagggctcttctggaaaaaaaccggagctaccgtcttcttgaagattccgaggaatccagcgaggaaactgtgtcccgagctggaagttccttgcagaaaaaacggaagaaacgaaaacaccttcgtaagaagcgagaagaggaagaggaagaggaggcatccgaaaaaggcaaaaagaaaacaggtggctcaaagcagcaaaccgagaagcctgagtctgaagatgagtgggagcggaccgagagagagagactacaggatttggaggaaagagacgccttcgccgaacgggtccgccaacgggacaaggaccgcacacggaatgttctcgaacggtccgacaaaaaagcctacgaggaagcccagaagaggctgaagatggccgaggaggataggaaggcgatggtgcctgagctgaggaagaaatcaaggcgagaatacctagctaaaagggaacgcgagaaactggaagacttggaggccgagctcgccgacgaggaattcctctttggtgacgtcgaactgagccgccacgaacgacaggaactgaagtacaagcgccgtgtacgggatttagcaagagaatacagagctgccggtgaacaggaaaaattggaagcaactaaccgatatcatatgccgaaggaaacaaggggacagcccgctagagccgtggatctggtcgaggaagagtccggcgcacctggtgaggaacagcgtcgctgggaagaggccagacttggggctgctagcctaaagtttggtgcccgagacgctgcatcacaggaacctaagtaccagctgtag

SEQ ID NO: 220354 - DNA, 888 bp, synthetic construct
  misc_feature 1..888: note = Description of Artificial Sequence: Synthetic coding sequence
  source 1..888: mol_type = other DNA
atgagcgaagaccccagaggtcctaaagttcctaggaaagctgtcgtggaaaagccggctagagcagctgaaagggaggctcgtgctctgctcgaaaagaaccgatcgtatagactgctggaggactctgaggaatcttccgaggaaacggtgagtcgcgcagggtctagcctgcagaagaagaggaaaaagagaaagcatttacgaaagaagagagaggaagaagaggaagaggaagccagtgagaaggggaagaaaaaaaccggaggctctaaacaacagaccgagaagcctgagtctgaggatgagtgggagcgaacagagagagagagactccaagatctcgaggagcgggacgctttcgccgaacgcgtcaggcagcgagataaagatcgaacacgtaacgtcctggagcggagcgacaaaaaggcctacgaggaagcacagaagagacttaaaatggcagaggaggaccgcaaggccatggtccccgagctgcgcaaaaaatcacgcagggagtatctcgcaaaaagagagcgggaaaaactggaagatcttgaagccgaactagccgacgaggaatttcttttcggcgacgtggaattaagccgacatgagagacaggagctgaaatataaacgtagagtgcgcgatctagctcgggagtatagagctgctggcgaacaagagaagttagaagcgaccaatcgatatcacatgccaaaagaaaccagaggacagccggcaagggccgtggatctggtggaggaagaaagtggggcacccggagaggaacagcggagatgggaagaagctcgactaggggcagccagccttaaattcggggctcgggacgctgcttcccaggagccaaaatatcagctgtag

SEQ ID NO: 220355 - DNA, 888 bp, synthetic construct
  misc_feature 1..888: note = Description of Artificial Sequence: Synthetic coding sequence
  source 1..888: mol_type = other DNA
atgtccgaagatcctcgcggacccaaagtgcctcgaaaagcagtcgtcgagaaacctgccagggcagcggagagagaggccagggctctcctggagaaaaaccgctcttataggttactggaggatagcgaggaaagcagcgaggagaccgtgtcccgagcgggatcttcactccagaagaaacgtaaaaagagaaagcatctgcggaagaagcgagaggaggaggaagaagaggaggcaagtgaaaaggggaagaagaaaaccggcggatctaaacaacagactgagaaaccagagagcgaggatgagtgggagagaacagagcgagaaaggttgcaggacctcgaagaacgagatgcctttgcagagagggtgaggcagagggacaaagatcggacgaggaatgtgctcgaacggtctgacaagaaggcttatgaagaagctcaaaagcggctcaagatggctgaggaggaccgcaaagctatggttccagagctccgcaagaagtctagacgtgaatacctggcaaaaagggagcgggagaaactggaggatctagaggccgaactggctgacgaggagtttctgttcggagatgtggaactcagtcggcatgaacgtcaagagttaaagtacaagaggagagttcgggatctggcacgtgagtaccgggctgctggagagcaagagaaactggaagcaaccaatcggtaccacatgccgaaggagacccgcggacagccggcaagagctgtggacctggtggaggaagaatcaggagcccctggagaggagcagcgcaggtgggaggaggccaggctcggtgctgccagtctgaaatttggcgcaagagatgcagcatctcaggagccaaagtaccagctttag

SEQ ID NO: 220356 - DNA, 1683 bp, synthetic construct
  misc_feature 1..1683: note = Description of Artificial Sequence: Synthetic coding sequence
  source 1..1683: mol_type = other DNA
atggaaagccaacctgcccaagaatgcttgatgcagatgttcctgcctatcgaacccgcatgcttcgtagagtggctgggcacttccccctcacaactgggagtggttatggtagacgaggcacatgagcgcaccctgcatacagacatactgttcggactaataaaggatgtggccaggtttcgacctgaactgaaggtgcttgtggccagcgcaacgatggacaccgcccgtttctctacttttttcgatgacgctccagtcttccggattccgggacgcaggtttcctgtggatattttttataccaaggcacccgaagccgattatctcgaagcttgcgtggtcagcgtactgcagatccacgtcactcagcctccaggggatattctggtcttccttaccggacaggaagaaatagaggcagcctgtgaaatgctgcaagataggtgccgcaggttgggttcaaagatccgggagttgctagttcttcccatttacgctaatttgccgtcagatatgcaagcccgtatttttcaacccaccccaccaggggcacgaaaagttgtcgtggctaccaacatcgccgagacttcacttacgattgaagggattatttatgtcctggatcctggcttctgcaagcaaaagtcttataatccgagaaccgggatggaatcactgacagttactccatgttccaaggcctctgctaaccagagagctggaagagccggtcgggtggctgctgggaagtgctttcggctctatacggcctgggcatatcagcatgaacttgaagaaacgaccgtgcccgaaatccagcgaacatcgctcggcaatgtcgtgctgctgctgaaatcactggggattcacgacctcatgcacttcgatttcctggacccccctccatatgaaacactactgctggctttggaacagttgtatgctctgggcgctctcaatcatctgggggagctcacaaccagcggccgtaaaatggcagagctccccgtggatcccatgctctccaaaatgattctcgcttcagaaaagtatagttgttctgaagaaatcctgaccgtggccgcaatgctgagtgttaacaactccatattttacagacctaaggacaaggtggtgcacgctgataatgccagagtaaacttctttttacctggcggagaccatttggtgctactgaacgtatacacccagtgggcagagagtgggtactcctcacagtggtgttacgaaaatttcgtgcagttcaggagcatgcggagagccagggatgtaagggagcagcttgaaggattgctcgagcgtgtggaggttggtctatctagttgccagggagattatattagagtgcgcaaggccatcacagcaggatatttctatcacaccgccagactgacgagaagtggctatcgtacggtgaagcagcagcaaaccgtcttcatacacccaaactctagcctgttcgagcagcagccccgatggctgctgtaccacgaactagtgctgaccacgaaggagtttatgcgccaggtgctggaaattgagtccagctggctgctcgaagtggcccctcattattacaaggccaaagaattggaagatccccacgccaagaaaatgcctaagaagattggtaagacgcgcgaggaactaggatag

SEQ ID NO: 220357 - DNA, 888 bp, synthetic construct
  misc_feature 1..888: note = Description of Artificial Sequence: Synthetic coding sequence
  source 1..888: mol_type = other DNA
atgtccgaggaccctcgagggccaaaagtgccaagaaaagcagtcgtagaaaagcccgctagagcggctgaaagggaagctagggccttattggagaagaatcgttcctaccgtcttctcgaagatagcgaagaatcttccgaggagaccgtgagtcgggctggctctagtctccaaaagaagcgtaagaagaggaagcacctgaggaaaaaacgagaagaggaagaagaagaggaggccagcgaaaaagggaaaaagaagacggggggatctaaacagcagactgagaagcctgaaagcgaggacgagtgggagaggacagagagagagcgcctgcaggacctggaagagagggacgcattcgcagagagggtcaggcaaagagataaagaccgaacgcgaaacgttctggagaggagtgacaagaaggcctacgaggaggcacagaagagactgaagatggcagaggaggaccgaaaagcgatggtcccagaacttcggaaaaagtcacggcgtgagtatttagcgaaacgggagcgggaaaaactcgaggaccttgaagccgagctggccgatgaagagttcctgtttggggacgtcgaactctccagacacgaacggcaggaactcaaatacaagaggcgcgtgagagaccttgctagagaataccgagccgcaggggaacaagagaaactcgaagctacgaatcggtaccatatgccgaaagagacccggggacagcccgctcgcgcagttgacctggttgaagaggagagtggagcgccaggtgaggaacagaggcgctgggaggaagctcgactgggtgcagctagtctcaagtttggcgctcgcgacgccgcatctcaagagcccaaataccagctctag

SEQ ID NO: 220358 - DNA, 2010 bp, synthetic construct
  misc_feature 1..2010: note = Description of Artificial Sequence: Synthetic coding sequence
  source 1..2010: mol_type = other DNA
atggccactcctgccggtcttgaacgatgggtccaggacgaacttcatagcgtgctgggcttgtctgaaagacatgtggcccagtttctgattgggaccgcgcaacggtgtactagcgccgaggagttcgtgcagcgtctccgggataccgacaccctggacctcagcggacccgcacgagattttgcgctgcggctctggaacaaagtgcctcgcaaggccgtggttgaaaagcccgctcgcgcagctgagcgggaggccagggcccttctggaaaaaaatagatcttatcgtctcctggaggacagcgaggaatccagtgaagagaccgtgagtcgagccggatcctctctgcagaaaaagcgcaaaaaaagaaaacatctgaggaagaagagagaggaagaagaggaagaggaagcgagtgagaagggaaagaaaaagactggcggatcgaaacagcagacagaaaagcctgaatctgaagacgagtgggaacgcaccgaacgcgagaggctgcaggatctggaagaaagagacgcattcgctgagagagttcgccagagggacaaagatagaacccggaacgtcctggaacgtagtgataagaaggcatacgaagaagcccagaagcgactgaaaatggcagaggaggatcgtaaagctatggtacctgagctgaggaagaaaagtcggagggagtaccttgccaaacgcgaaagagaaaaactagaagatttggaggctgagctggccgacgaggagtttttgttcggagacgttgagcttagtcggcatgagcgtcaggaattgaagtataaacgcagggttagggacctcgccagagagtaccgggcagccggagagcaggagaagctagaggcaacaaataggtaccatatgccgaaggagaccaggggtcagccagccagggccgtcgatttagtcgaggaagagagcggagccccaggagaagagcagaggcgctgggaagaggctagattaggcgctgcctccctcaaatttggcgctcgagacgcggcttctcaagaacccaagtatcagctagtgctcgaggaggaagaaaccattgagtttgtcagggctacacagttgcagggcgatgaggagcccagcgcaccgcctacatccacccaagcccagcagaaggaatccattcaggcagtcagacgcagtctccctgtgttcccatttagagaagagctactcgcagccatcgctaatcaccaggttctgataattgaaggggaaaccgggtctggcaaaaccacacagatcccccagtacctgttcgaagagggatataccaacaagggtatgaaaattgcctgtactcagcctagaagagttgcagcaatgagtgttgccgcacgggtcgctcgtgagatgggagtgaagctgggaaacgaggtcggatactctatccgctttgaggactgtacatctgaacggactgtgttgaggtatatgacggatggcatgctgcttcgcgagtttctgtcagaaccggatctcgcctcctacagcgtggtgatggtggacgaagcccacgagaggactctgcacacagatatcctctttggactgatcaaagacgtcgcgcgatttaggcccgagctcaaagtgttggtcgcttcggcgaccatggacactgcaagattttccacttttttcgatgacgcccctgtttttcgcatacccggtcgcaggtttcctgtggatattttttacactaaagcccctgaagcagattatctagaagcttgcgtggtcagtgtgttgcagatccacgtgacacaaccaccaggggatattctggtgtttctcaccggacaggaggagatagaggccgcttgcgagatgttacaggataggtgccgtcgtctgggctccaagattagggaacttttagtgctgcccatctacgctaacctacccagcgacatgcaggctcgcatatttcagcctactcctcctggtgcacgaaagtag

SEQ ID NO: 220359 - DNA, 3126 bp, synthetic construct
  misc_feature 1..3126: note = Description of Artificial Sequence: Synthetic coding sequence
  source 1..3126: mol_type = other DNA
atggctacccccgcaggattagagcgctgggtgcaggatgagcttcacagcgttctgggactgtcagagcgccacgtggcgcaattcctcataggcacggcgcagcggtgcaccagcgctgaggagtttgtgcaaaggttacgcgataccgatacccttgatttgagcggccctgccagggattttgctttgaggctgtggaacaaagtcccccgaaaagccgtcgtggaaaaaccagcacgcgcagctgagcgcgaggccagagctctgctggaaaaaaaccgctcttaccgcctgctggaggattcagaggagagctccgaggaaacagtgagcagggctggcagtagcctacaaaaaaagcgcaagaaacgaaaacacctcaggaagaaacgcgaggaggaggaggaggaggaggcctccgagaagggaaagaagaagaccggcggttccaagcaacagactgagaagccggaatccgaggatgaatgggagcgcaccgaacgggagcgccttcaggatctggaagaacgcgacgcctttgcagagagagtgcgccagcgggacaaggacaggacaaggaacgtgcttgaaagatctgataagaaggcatacgaggaggcacagaagcggctgaaaatggccgaggaggaccgtaaagctatggtaccagagttaagaaagaaatctcgcagggagtatctagcaaaacgcgagcgcgagaaactggaagacttggaagctgaactggctgacgaggaattcttgtttggagacgtcgagctaagtcgccatgaacggcaggaactgaagtacaaaagaagggtaagagacctggccagggagtacagagcagccggtgaacaggagaagctggaggccaccaacaggtatcatatgccgaaagagacacggggacaacccgcaagagcagtggatctggtggaggaggagtcaggggctcccggagaagaacagcgcaggtgggaggaggctcgcctgggggctgccagcttgaagttcggcgctagagacgctgctagccaagaaccaaaataccagctcgtcctggaagaagaggagaccatcgagttcgtcagggcaacccagcttcagggcgatgaggaaccttcagctcctcccacatccactcaggctcagcagaaggagtctattcaggccgtgcgtcggtccctgcccgtattcccctttagagaagagctgctcgccgctattgccaatcaccaagttttaattatcgagggagagactggctcgggtaagacgacacaaatccctcaatacctgttcgaagaaggatacaccaacaagggtatgaaaatagcttgtacccaaccgaggcgtgttgcagccatgagtgttgctgctagagttgccagagagatgggcgtgaagctggggaacgaagtgggttattctatacgttttgaggattgtacctccgagcggactgtgctcagatatatgacagatggcatgctgttgcgcgaattcttgtccgagcccgacctggcctcatacagcgttgtcatggtagatgaggcccacgagcggaccctgcacaccgacattttgtttgggctgatcaaagacgtggctagattccggcctgaactgaaagtgctggtagcaagcgccactatggataccgcaaggttctccaccttcttcgacgacgccccagtgtttaggatccccggacgcagatttccagtggacattttctacaccaaggctcccgaggcagactatcttgaggcctgcgtggtgtccgttctacagatccatgtgacacaaccaccaggggatattctggtcttcctgacagggcaggaagagatcgaggccgcatgtgagatgctccaagacaggtgcaggaggctggggtctaagattagagagctgctcgttctaccgatttacgccaaccttccttcagatatgcaggctaggatcttccagccaacacctcccggagcccgtaaggtggtcgttgccaccaatatcgccgagacttccctgaccatagaagggattatctacgtcctcgatccgggtttttgtaagcagaagagctataatccccgtactggcatggaatccctaacagttaccccctgttccaaagcttctgccaaccaacgcgctggacgcgctggtagggtagcagccggtaagtgcttccgcctctacacagcctgggcttaccagcatgaacttgaagagaccactgtccccgagattcagcgcaccagcctggggaacgttgtcctgctgctaaagtctctggggatccacgatttgatgcacttcgattttcttgacccaccaccctatgaaacccttcttcttgctctcgagcagctatatgccttgggtgcactaaaccacctcggagaactgacaaccagcggtagaaagatggccgagctgcccgtcgatcccatgctctctaagatgatcctcgcttctgagaagtactcctgttcagaggaaattctgacagtcgctgctatgctgtcagtgaataatagcattttctaccgcccaaaggacaaagtggtgcacgccgataatgcgagagttaacttctttctccccggaggggaccacctggtgctgctgaacgtctatacccaatgggcagaatcggggtattcttcccagtggtgctacgaaaatttcgtgcagtttcggtccatgagaagagctcgtgacgtaagagaacagctcgagggattgctggaacgggtggaagtcgggttgtcctcgtgtcagggcgactacatacgggtccgcaaggcaataactgccggatacttctaccatacagcacggttgacacgttcgggctacaggaccgtcaaacagcaacaaacagtgttcatacacccaaactcttccctcttcgaacagcagcccaggtggctcctgtaccacgaactggtgctgaccacaaaggaattcatgcggcaggttctcgagatagaaagctcgtggctgcttgaggtcgccccacactattacaaggccaaagagctggaagatcctcacgctaaaaaaatgccgaaaaagattggtaaaacacgtgaagagctaggctag

SEQ ID NO: 220360 - DNA, 1683 bp, synthetic construct
  misc_feature 1..1683: note = Description of Artificial Sequence: Synthetic coding sequence
  source 1..1683: mol_type = other DNA
atggagtctcagccagcgcaggagtgtctgatgcagatgtttcttccaatcgagcccgcatgcttcgtagagtggctaggtacctccccttcccaactaggggtggtgatggttgacgaggcccatgagcgaaccctccacactgatatcctgttcggtctgatcaaggacgtagcgagattcagacctgagctcaaagtactagtagcctcagctactatggataccgctagattttcgactttctttgacgatgcacctgtcttcaggatcccgggtcgtcgctttcccgtggacattttttatactaaagctcctgaagccgattatttggaggcgtgtgtagtgtcggtactccaaattcacgtgacacagcccccaggagatatcctggtgtttttgactggccaagaggagatcgaagcagcatgtgaaatgctgcaggacagatgtaggagactcgggtctaagataagagagcttctggtgctgccaatctatgccaacctgccatcggacatgcaagcaaggatttttcagcccaccccccctggcgcaaggaaggtggtagtcgcgactaatatagccgagacctcactgacaatagaaggaatcatatacgtccttgatccagggttttgtaagcagaaatcttacaatcctcggactggaatggaaagcctcacagtcaccccatgctctaaggcctccgccaaccagagagccggacgggctggccgagtggccgctggcaagtgttttcgactgtatactgcttgggcttatcaacatgagctggaggaaaccacagttccagagattcagcgaacttccctgggcaatgtggtattgctgctgaaaagcctcggcatccacgatctgatgcacttcgacttcctcgatcctcccccatacgaaacactgttactcgcactggaacagttatacgctctgggtgctttgaatcatctgggcgagctgaccacctccggtcgaaagatggccgagctgcctgtggaccctatgctatccaaaatgatcctggcatcggagaagtattcctgctctgaggagatcctgacagttgccgcaatgttaagcgtcaataatagcattttttaccgcccaaaggacaaagtcgtgcacgcagacaacgctagagtaaacttcttcctaccaggaggcgatcatcttgtgctcctgaacgtgtacacgcaatgggcagagtcaggctactcgtcacagtggtgttatgagaattttgtgcagttccggtcaatgagaagagccagggacgtgagagagcagcttgagggcctccttgagagggtcgaggttggactctctagttgccagggcgactatattcgggttcgcaaggctatcaccgccggatacttctaccacactgccagactgactagatctggctatcgcactgtgaagcaacagcaaactgttttcatccaccccaattcatcactgttcgagcagcagccaaggtggttgctataccacgaactggtgcttaccacaaaggaatttatgcggcaggttcttgagatagagtcgtcatggctcctggaagtcgcgccacactactataaggccaaagagcttgaagatccccacgccaagaaaatgcctaagaagataggcaagactcgggaggagttgggttag

SEQ ID NO: 220361 - DNA, 1683 bp, synthetic construct
  misc_feature 1..1683: note = Description of Artificial Sequence: Synthetic coding sequence
  source 1..1683: mol_type = other DNA
atggaatcacagcccgcacaagaatgtcttatgcagatgttcctacctattgagccggcatgtttcgttgagtggctgggcaccagtccttctcagcttggtgtcgtgatggtagacgaggctcacgaaaggacactccataccgacattctctttggactgatcaaggacgtggctagatttcgacctgagctgaaggtgttggtggcatccgccactatggatactgctagattttccacgtttttcgacgacgcacccgtctttcgaatccccggacgtcgctttcctgtggatatcttttacaccaaagcccctgaggccgattatctggaggcatgcgtcgtctctgttctgcagatccacgtcactcagccccctggcgacatcctcgtttttcttactggacaggaagaaattgaagccgcttgcgagatgctgcaggacaggtgccgcaggctagggagtaagattcgagaattgctggtcctgcccatctatgctaacctgcctagtgatatgcaggcgcgaattttccaacccacgcccccaggagctaggaaggtggtagtcgccacaaatatcgctgagactagcctgacaatcgagggaatcatttacgtgcttgacccagggttctgcaagcagaaatcctacaacccacggactgggatggaatcgcttacagtcacaccttgctctaaagcctccgccaatcaaagagctggacgagctggtcgagtggctgcagggaaatgcttccggttgtacactgcgtgggcctatcagcacgaactcgaggaaaccaccgtgccagagatccagcgaacttcattgggaaatgttgtgttgctgctgaagtccctcggcatccacgacttgatgcacttcgactttctggatccgcctccttatgagacactgctcctggctctcgagcaactctatgccctgggagccctgaaccatctaggggagctgacaacatctggccgtaaaatggctgaacttccagtcgacccgatgttatcaaaaatgatcttggcctccgagaagtattcctgctcagaggagatccttaccgtggccgctatgctgtccgtgaacaattctatcttttatcggcctaaggacaaagtcgttcacgcagataatgcaagggttaacttcttccttccagggggtgatcatctggtcctgctcaacgtgtatacccagtgggctgaaagtggttattcctcccagtggtgttacgaaaatttcgtacagtttaggagtatgaggcgagcacgcgatgtgcgggagcagctcgagggactgctcgagcgggttgaggtgggcctgagcagctgccagggggattacatacgggtgcgtaaagccataactgctgggtacttctatcacactgcacgattaaccagatcgggatacaggacagttaagcagcagcaaacggtctttatccacccaaattctagcctgttcgagcagcagccacggtggttactgtaccatgaactggtgctcaccaccaaagagttcatgcgccaggttctggagatcgagagctcttggctgttggaagtagctcctcactattataaagctaaggagctggaagacccccatgctaagaaaatgccaaaaaagatcggcaaaacccgagaagagcttggctag

SEQ ID NO: 220362 - DNA, 567 bp, synthetic construct
  misc_feature 1..567: note = Description of Artificial Sequence: Synthetic coding sequence
  source 1..567: mol_type = other DNA
atggagagtcagcctgcccaggaatgtcttatgcagatgttccttcctatcgagcctgcgtgcttcgtggagtggctagggactagccccagccaactgggggtggtgatggtagacgaagcgcacgagcgcacactgcatactgacattctgtttggtctgattaaagatgttgcgcgattccgaccggagctgaaggttctggtggcctcagcaacaatggacactgccaggttctctaccttctttgacgacgcacctgtctttaggatcccgggtcggcgatttcctgtggacatattttacactaaggcccctgaagcagactatctcgaggcatgtgtcgtgagcgtgctgcagattcacgtgacacaaccgccaggcgacatcttggtattcctgaccggacaagaagaaatcgaggccgcttgcgaaatgctgcaggacaggtgccggagattaggatctaagattcgcgagctccttgtactcccaatctacgcgaatcttccctccgatatgcaagccagaatctttcagccaacaccacccggagccagaaagtag

SEQ ID NO: 220363 - DNA, 3126 bp, synthetic construct
  misc_feature 1..3126: note = Description of Artificial Sequence: Synthetic coding sequence
  source 1..3126: mol_type = other DNA
atggcaacaccggctgggctcgagagatgggtgcaggatgaactccacagtgtcctaggactgagcgagcgtcatgttgcccagttcttgatcggtacagctcagaggtgtacaagcgccgaggaatttgtgcagcggctgagagatacagacacactggatctgtccggccctgccagggatttcgccttgaggctatggaataaagtgcctcgtaaggcagtcgtcgagaaacctgctcgagcggctgagcgcgaggccagagccctcctcgagaagaacaggagctaccgcctactggaggatagcgaagagagctccgaggagactgtcagccgcgcagggtcgagcctgcaaaagaaaagaaagaagcggaagcacctgcgcaagaagcgcgaagaagaagaagaagaggaagcctctgaaaagggcaaaaagaaaactgggggatcgaagcagcagacggaaaaacctgaaagcgaagatgaatgggaacggactgaaagggaaagactccaagatttggaggaacgtgacgccttcgccgaaagggtacgacaacgagataaggatagaacgaggaacgtgttagagaggagtgacaagaaggcctacgaggaggcgcaaaaaaggctgaaaatggctgaggaagatcgcaaggccatggtccccgagttaaggaagaaaagcaggagggaatacctggctaagagagaacgagagaaactggaggatctggaggccgagcttgccgacgaagaatttctgttcggcgacgttgaactgtcccggcacgagaggcaggagctcaagtacaaacgacgggtgcgagatctagcgcgagagtaccgagccgctggcgaacaagagaaactagaggcaacaaaccgctatcatatgcctaaggaaacacgcggacagccagccagagcggtagacctggtcgaagaagaaagcggagcaccaggcgaggaacaaagaaggtgggaggaggctcgactcggtgctgcttccctcaaattcggcgcacgcgatgcagccagtcaggaacccaagtaccagcttgtgctcgaggaggaggagacaattgaatttgtgcgcgctacacagctacaaggtgacgaggagccaagtgcacccccaacaagtacccaggcccagcagaaggagtccatccaagccgtacgcagatccctcccggtgttcccctttcgtgaggaactgctcgctgccattgccaatcatcaagttctcatcatagaaggagagactgggagtgggaagaccacccagattccccagtacttgtttgaggagggctacaccaacaagggtatgaaaattgcctgtactcagccaagaagggtcgcagccatgtccgtagctgcaagagtggccagggagatgggggtgaaattgggcaacgaagtcggttattccattcggttcgaagactgtaccagtgagcggactgtccttcggtatatgacggatgggatgcttctcagggaattcctctcagagcccgacttagccagttatagcgtggttatggtggacgaggctcacgaacgaacactccataccgatattcttttcggactgatcaaggacgttgcccgattcaggccagagctgaaggtgttggtcgcctccgcaactatggatacagccaggtttagcacgttcttcgatgacgcacctgtatttcggatccctggcagacgattccccgtggacatcttttacaccaaagctcccgaggccgattatctcgaagcttgtgtggtgtcagtgctccagattcacgtgacccagcctcctggagatatcctagtctttctaaccgggcaagaagaaatcgaggctgcttgcgaaatgctccaggatcgctgccgaagactcggtagcaaaattcgggagctcttggtactaccgatttatgctaacttgccctccgacatgcaagcaaggatcttccagcccacacctcctggtgctcgcaaggtggtagtggctacaaatatcgcagagacttcgctgactatcgagggaattatctacgtcctggaccccggattttgcaaacagaagtcctataaccctagaaccggcatggaatccctcaccgtgaccccttgtagtaaagcctccgccaaccaacgggcaggtagagctggccgagtggcagccggaaaatgctttcgcctgtataccgcctgggcgtaccaacacgaactcgaggagacgactgtccccgaaatccagcggacaagtctcggcaatgtggtgctgcttctgaaaagcctgggaattcacgatttaatgcatttcgactttctggatcctcctccctacgaaacactactgctggcactagagcagctttacgcgctcggggctctgaaccatctgggagaactgacgacaagcggacggaaaatggccgagttgcccgtagaccccatgctgtcaaaaatgattctggcaagtgaaaaatactcttgctccgaagaaattctgacggtcgccgctatgttgtccgtgaacaattctatcttttataggcccaaggacaaggtcgtccacgctgataatgctagagtgaatttctttctccctggaggcgaccacctggtgctcctcaacgtgtacacccaatgggcggaatccggctactcgtctcagtggtgctacgaaaattttgttcagttccgcagtatgcgcagagcacgcgacgtccgtgagcagctcgaggggctgctggagagggtggaggtgggcttgagctcttgccagggggattacatccgcgtgcggaaggccatcacggccggatacttttatcataccgctcgtttaacccggtccgggtacagaacggttaagcagcagcagaccgtgtttattcacccaaactctagcctgttcgaacagcaacccagatggctgctttatcacgagttagttctgaccaccaaggagtttatgcgccaggtgcttgaaatcgaatcttcatggctcctggaggtggctccccactactataaggccaaggagttggaagacccacacgccaaaaagatgccgaagaaaattggcaagacacgggaggagctcggctag

SEQ ID NO: 220364 - DNA, 444 bp, synthetic construct
  misc_feature 1..444: note = Description of Artificial Sequence: Synthetic coding sequence
  source 1..444: mol_type = other DNA
atggcgactcctgcgggtctcgagcgttgggttcaagacgaactccacagtgtcctggggctgagcgaaaggcacgttgcacaatttttgattgggactgcccaaagatgtacatccgctgaggaattcgttcaacgtctgagggacaccgacacgctggacctgtcaggcccagcccgagattttgccctgagactttggaataaagtgccccgaaaagcagtcgtggaaaagcccgctcgcgcagccgagcgggaagcccgagcactcttggaaaaaaatcggtcgtacaggttactcgaagacagtgaggagtcatctgaagagactgtgagccgggctgggagtagccttcagaaaaagagaaaaaaacgaaagcacctacgaaaaaagcgtgaggaggaggaagaggaggaggcttcagaaaaggggaagaagaagtag

SEQ ID NO: 220365 - DNA, 4110 bp, synthetic construct
  misc_feature 1..4110: note = Description of Artificial Sequence: Synthetic coding sequence
  source 1..4110: mol_type = other DNA
atgggagggaaaaataagaaacacaaggccccagctgcagccgtggtcagggctgcggtctcagcgagtcgcgctaaatctgcggaggccggtatcgctggcgaggcccagtccaaaaagccagtgtcccgaccagccacggcggcagcagcagcagctggctcacgcgaacctagggtgaaacaggggccaaagatttacagctttaactctaccaatgatagctcaggcccagccaatctcgataagtctattttgaaagtggtcataaacaataaactggaacagcggatcatcggagtgattaacgagcacaagaagcagaacaatgataagggtatgatctccgggcgactgacagctaaaaaactccaggacctatacatggccctgcaggcattctctttcaagaccaaggacatcgaggatgcaatgactaacaccttattatacggtggagacttgcactcagcgctggattggctgtgcctgaacttgtccgatgacgccctcccagaagggtttagtcaggaatttgaggaacaacaacccaagtcccgcccaaaattccagagcccacagatacaagccactattagtccccctcttcagcccaagacaaaaacctacgaggaagacccaaaatctaagcccaagaaggaagaaaaaaatatggaggtaaacatgaaggaatggatcctgcgctacgcagaacagcagaacgaggaggagaaaaacgagaactctaagtccttagaggaggaggagaagttcgacccaaacgagaggtatttgcacctggcagctaagctgctggacgccaaagagcaggctgccaccttcaagcttgaaaaaaacaagcaaggtcaaaaggaggctcaggaaaaaattcggaagttccagagggagatggagacactggaggaccaccctgtgttcaatcccgcaatgaagatcagccatcagcaaaatgaaaggaagaagccccctgtggcaactgaaggcgaatctgctttgaatttcaatctgttcgagaagtccgctgcagccacagaggaagagaaggacaaaaagaaagagccccacgatgtgcgaaactttgactataccgcccgaagctggaccgggaagagtcccaagcagtttctgatcgattgggtgaggaaaaacctgccaaaatccccaaacccgtctttcgaaaaggtgccggtggggaggtactggaagtgcagggtgagggttataaaaagcgaggacgacgtgcttgtggtgtgtcccaccattttaactgaggatggtatgcaggcccagcatttgggagctacattggcactatatagacttgtgaaaggtcagtcagttcatcagctgttaccgccaacctacagggatgtgtggctggagtggagtgatgccgaaaaaaagcgcgaggagctaaataaaatggagaccaataagcccagagatttattcatagccaaactgctgaacaaactgaagcagcagcagcagcaacagcagcagcattctgagaacaagcgcgagaacagtgaggatccagaggaatcttgggaaaacctcgtcagcgacgaagatttctccgccttgagcctcgaatccgctaacgtcgaggatctggagcctgttcggaacctttttcggaagctgcagagtacgccgaagtaccaaaagcttctgaaagagaggcagcagctacccgttttcaagcatcgagactctattgtagagaccctcaagcggcatcgcgtcgtggtcgtggccggagagacaggcagtggcaaatcaacccaagtgcctcactttctgctcgaggacttacttttgaacgagtgggaggcttcgaagtgtaatatcgtgtgtacacagcccaggcggatctctgctgtgagtctcgccaatcgcgtttgcgatgagctagggtgcgagaacgggcctggcggaaggaatagcctatgcggctaccagatcaggatggagtctagggcgtgtgagagcactcggctgttgtattgcaccacaggcgtgttgttacgcaagcttcaggaggacggactgctgtctaatgtgagtcacgtgattgtggacgaagttcacgagcgctctgtacagtctgactttctattaattatcctcaaagaaattctgcagaaacgctcagatttgcacctgattctgatgtcagcaaccgtggattcagagaagttctctacctacttcactcactgccctatcctgagaatctctggtcgctcataccctgtcgaggtgtttcacctagaggatatcatcgaagaaacaggattcgtgctggaaaaggactcagagtattgtcagaagttcctggaggaggaggaagaagttaccatcaatgttacatcaaaagctggcggtataaagaagtaccaggaatacattcctgtgcaaaccggtgctcacgctgatctgaaccccttttaccagaaatattcttctcggacccaacacgccatcctctacatgaatccacacaaaataaatctggatctgatcttagaattactggcttatttagacaaatccccccaatttcggaatatcgaaggagccgtgttaatcttcctccctggactagcacatatccagcaattgtacgatttgctgtctaacgaccggagattttattcggaacggtataaagtgatcgctctgcactctatcctttcgacgcaggatcaggccgctgcattcacactcccacccccaggagtcaggaaaattgtgctcgccacaaacatcgctgagacaggtataacaatccccgatgtggtgttcgtaatagatactggcaggacgaaagagaacaaatatcacgaaagtagccagatgtcatccctggtggaaacctttgtgtcaaaagcgtcagcgctgcagaggcagggccgtgccggtcgggtgagagatggcttttgcttccgcatgtataccagagagagattcgagggattcatggactactcagtgcctgaaatccttcgcgttccacttgaggagctgtgtctgcacattatgaaatgcaatctgggaagccccgaagatttcttgtcaaaagctctcgatccacctcagctccaagtcatctcaaacgccatgaatcttctgcgcaaaatcggcgcttgtgaattgaacgagccgaaactgacgcccctgggtcagcacctcgccgctctcccagtcaatgtgaagatcgggaaaatgctaatcttcggagccatttttggttgtctggatcctgtggctactctggctgccgtgatgacagaaaagagcccgttcaccacccctattggacggaaggacgaagctgatctcgcgaagagcgccctcgcaatggccgatagcgatcacctgaccatttataacgcctacttgggttggaagaaagcccgtcaagaggggggttaccgatctgagatcacgtactgccggagaaatttcctgaatagaacatccctgctgaccctcgaggacgtcaagcaagagttgatcaaattagtgaaggctgcaggcttttcttccagtacaacctcaacaagttgggaaggaaatagagcgagccagactttatcgtttcaagagatcgccctcttgaaagctgtgttagttgccggactatacgacaacgtcgggaagataatttataccaaatccgtcgatgtgaccgaaaagcttgcatgcatcgtagagaccgcccagggaaaggcccaggttcatccttcctccgtgaacagagatttgcagacacacggatggctgctttaccaggagaagatccgctacgccagggtatacctgcgcgagacgactttgatcacacctttccctgtattactgttcggaggcgatattgaagtgcaacaccgagagaggctgttaagcatcgacgggtggatctattttcaggcccctgtgaaaatcgcggtcattttcaagcagctgcgcgttctcatcgattccgtcctccggaagaagttggaaaaccctaagatgagcttggaaaatgataagatcctgcaaattatcacagagctcatcaagaccgagaataactag

SEQ ID NO: 220366 - DNA, 1989 bp, synthetic construct
  misc_feature 1..1989: note = Description of Artificial Sequence: Synthetic coding sequence
  source 1..1989: mol_type = other DNA
atggaagaggaggggctagaatgccccaattcctcgagcgagaagcgttactttccagaatcactggacagctctgacggtgacgaggaagaagtactggcctgcgaagacctggaactcaatccttttgacgggctcccatatagcagcagatactacaagctactgaaagagagggaagaccttcctatatggaaggagaagtactctttcatggagaatcttttacagaatcagattgtgattgtgagtggcgatgcaaagtgcggcaaatccgcccaggtgccccaatggtgtgcagagtactgtctctcaatccactaccagcacggcggtgtcatctgcactcaggtgcacaagcagaccgtggttcaattagcactcagggtcgccgatgaaatggatgtcaacattgggcacgaggtggggtatgttatcccttttgagaactgctgtaccaatgagacaattctcaggtattgcacagacgatatgctgcagcgcgaaatgatgtccaatcccttcctgggatcgtacggcgttatcattctggacgacatccacgagaggtctatcgcgactgatgtgctcctgggactgttaaaggacgttctacttgcccgtcccgagcttaagctgattattaattcatctccccatctaataagtaagttgaatagttactacggcaatgttccagtgatcgaggttaagaacaaacatcctgtggaagtagtgtacctgagtgaagctcagaaggactcctttgagtcgatccttcggctgatttttgagatccaccactcaggagagaaaggcgatatcgtggtgttccttgcctgtgagcaggtttacaatcccaggatcagagctaactcattggtcatgcagcctatttcgcagagtcaggccgaaatcagaaaacagattctaggatctagctcatcaggtaagtttttttgtctgtacaccgaagagtttgcaagcaaggatatgacaccgctgaagcccgcagaaatgcaggaggcgaacctgacctcaatggtcctgttcatgaaacggatcgacatcgcaggcctgggccattgtgacttcatgaatcggcctgccccagaatcgctgatgcaggcactggaagacctggattatctagccgcactggataacgacggcaacctgagcgagttcggcatcattatgtccgaatttcctctggatccccagctttccaaaagcattctagcaagctgcgaattcgattgcgtggacgaggtgcttactattgccgcaatggtgactgccccaaactgctttagccatgtgccccacggcgctgaagaagcagccctgacatgttggaagactttcctgcacccagaaggcgatcatttcactttgattagtatatacaaagcctatcaggacaccactctgaactcctcttccgagtattgtgtggagaagtggtgtagagactattttctgaactgctccgcactccgtatggccgacgtgatacgggcagaacttctggaaatcataaagaggatcgaattaccttatgccgaacccgcattcggttccaaggaaaataccttgaacatcaagaaggcactcctctctggctatttcatgcaaatagcccgtgacgtggacggctccggaaattacttgatgctcacccacaagcaagtggcccagctccacccactctctggatactccataaccaaaaaaatgcctgaatgggtgctcttccacaagttctctattagcgaaaataactacatcaggatcacatccgagatctcacccgagttatttatgcagctagtgccacaatactatttctcaaatctccccccaagcgagtccaaagatattctccagcaggtagtcgatcacttgtccccggtcagtactatgaacaaggagcagcagatgtgcgaaacttgcccagagacagagcaacgatgcacgcttcaatag

SEQ ID NO: 220367 - DNA, 2232 bp, synthetic construct
  misc_feature 1..2232: note = Description of Artificial Sequence: Synthetic coding sequence
  source 1..2232: mol_type = other DNA
atggaggaagaaggtttggagtgccctaatagcagcagtgagaagcggtacttcccagagtccttggattcttcggatggcgacgaagaagaggtgctggcttgcgaggatctcgaactcaacccttttgacggcttaccttacagcagccggtactataagctgctgaaagaaagagaggacctgcctatttggaaggaaaagtactcgtttatggagaacctgctgcagaaccagattgtgatagtgtccggagatgcaaaatgtggcaagtccgcccaagtgccccagtggtgtgctgagtactgcctcagtatccattaccaacacggaggggtaatctgtacacaggtgcacaaacagacagtggtgcagctggcactgagagtggccgacgagatggatgttaatatcggccatgaggttggatacgtcatcccattcgaaaactgctgcacaaacgagacaatcctcagatattgcacagacgatatgctacagcgagagatgatgtctaatccctttttgggaagttatggagtcataatcctggatgacatccacgagcggagcatcgccaccgacgtccttttgggtctgctcaaagatgtactattagctcgcccagaattgaaactgatcatcaattccagtcctcatttaatcagcaaactcaactcatactacgggaatgttccagtgatcgaggtcaaaaataagcaccccgtcgaagtcgtctatctttctgaggctcagaaggattcatttgagtctatcctccgcttgatcttcgagatccatcatagtggagaaaaaggtgatattgtggtctttctcgcttgtgagcaagacatcgagaaggtgtgtgagactgtgtaccaaggctcaaacctcaaccccgatttaggagagttggtcgttgtgccactgtatccaaaggagaaatgtagtctcttcaagcctctagacgaaacggaaaaaagatgccaagtataccagcggagggtggtgcttacaacgtcatctggagagttcctgatctggtcaaattccgtgcggttcgtgatcgacgtgggtgtggaaagacggaaggtctacaatcctcgtatccgtgcgaactctttagtgatgcaaccaatttctcaatcccaggcagagatccgcaaacagatcctgggcagcagtagctctggcaagttcttttgcctgtataccgaagagtttgccagtaaagacatgacccccctgaagccagccgaaatgcaggaagccaatttgacctcaatggtgcttttcatgaagagaattgacatcgcaggactgggccattgcgatttcatgaataggcctgcccctgagtccctgatgcaggcactagaagaccttgactatttagccgctctggacaatgatggaaacctttccgagtttggcattataatgtctgagtttcccctggatcctcaattaagcaagtcaatattagccagctgtgaattcgattgtgtggacgaagttctcaccatcgccgctatggtgaccgcgccaaattgtttctcccacgttccacatggcgcagaagaggccgctcttacgtgctggaagaccttcctccatccagagggggaccactttactctgatctccatctataaagcgtaccaggacaccaccctgaattcttcctcggaatactgtgttgagaaatggtgtcgcgactacttcttaaactgcagcgccttacgtatggctgacgtcattcgtgcggaactgttggagatcattaaacggatcgagctaccctatgctgagcccgctttcggatctaaagagaacactctgaatataaaaaaagctctcctgtccggttacttcatgcagatcgcgcgtgacgtcgacggcagcgggaattatctgatgttaacgcataaacaagtagctcaattacatccgctctctgggtattcgatcactaagaagatgccagaatgggtgctcttccacaaatttagtatcagcgaaaataattacatcagaattacctcagagatatctccggaattgttcatgcaactagtgccacagtactatttctctaatctgccaccttccgaaagcaaggatattctgcaacaagtggtcgaccacctctccccagtctccactatgaataaggagcaacagatgtgcgagacgtgccccgaaaccgagcaacgatgcactctccaatag

SEQ ID NO: 220368 - DNA, 1104 bp, synthetic construct
  misc_feature 1..1104: note = Description of Artificial Sequence: Synthetic coding sequence
  source 1..1104: mol_type = other DNA
atgcagcccatatctcagagccaagccgagatcagaaagcagatcctcggctctagttcctccggaaaatttttctgcttatatacagaagagttcgcatcgaaggatatgactcctctgaaaccagccgaaatgcaggaggcgaacctgactagtatggtgctcttcatgaagcgcattgatattgctgggttgggccactgcgattttatgaaccgcccagccccagagtcactgatgcaggcacttgaagaccttgactacctggcggctctggacaacgatggtaacctgagcgagtttggaattataatgagcgaattcccgcttgacccccagctaagtaaatctattctggccagttgtgaatttgactgtgtcgacgaagttttgaccatagctgccatggtaactgctcctaactgcttttcgcacgtgccgcatggggctgaggaagccgcactcacctgctggaagactttcctgcaccctgagggtgatcactttaccctaatctcaatttacaaggcttaccaggacacaactcttaactcttcatccgaatattgcgtggaaaaatggtgccgcgactactttctgaactgttcagccttaagaatggctgatgtgattcgcgcagagctccttgaaatcatcaagagaatcgagttaccctacgccgagccagctttcggcagtaaggaaaacactttgaatatcaagaaggctttactcagtggctatttcatgcagattgccagggatgtggatgggtctgggaactacctgatgctcactcataaacaagttgctcagctacaccccctgtccggctactccattactaagaaaatgcctgaatgggtgttatttcacaagttttctatctctgagaacaattacattcgaatcacctcggagatttctccggagctttttatgcagctggttcctcagtactacttcagtaatcttcctccatctgaatccaaggacattcttcaacaagtcgtggaccacttaagtccggtcagtaccatgaacaaagaacagcaaatgtgtgagacttgcccagaaacagagcagcggtgtacacttcaatag

SEQ ID NO: 220369 - DNA, 339 bp, synthetic construct
  misc_feature 1..339: note = Description of Artificial Sequence: Synthetic coding sequence
  source 1..339: mol_type = other DNA
atggaggaagaaggccttgaatgtcccaatagctcctctgaaaagcgttattttcccgagagcctggactcttccgatggggacgaggaggaggtcctagcgtgtgaggacttggaactgaaccccttcgatggcttaccctattccagccggtattacaagcttcttaaggagcgcgaggacctcccgatttggaaagagaaatacagctttatggagaatctgctccagaaccagatcgtcatcgtttcaggggacgcaaaatgcggcaagtccgcacaagttccccagtggtgtgctgagtattgcctctctatccattaccaacatggtgggtag

SEQ ID NO: 220370 - DNA, 1935 bp, synthetic construct
  misc_feature 1..1935: note = Description of Artificial Sequence: Synthetic coding sequence
  source 1..1935: mol_type = other DNA
atgaccatagagatagatttcttgcaaaaaaaatcaattgatagtaacccctacgacacagataagatggctgctgagttcattcagcaattcaacaatcaggcctttagtgtcggccagcagctggtcttttcttttaacgagaaattgttcggactgttggtcaaggatatcgaggccatggatccctctatcctgaagggcgaaccggctactgggaaaaggcagaaaatcgaggtggggctcgttgtcggtaactcccaggtggcattcgagaaggctgaaaattctagtctgaatctgatcggtaaagccaaaacgaaggagaacagacagagtatcatcaaccccgattggaactttgagaagatgggaattggagggctcgacaaggagttctctgatatcttccggcgagcatttgcctcgcgggtctttcctcccgaaatagtggagcaaatgggttgtaaacacgtgaagggaatactgctttatggcccacctggatgtgggaagacacttcttgctaggcagattggcaaaatgctgaacgcccgtgagcctaaagtggtgaatgggcctgaaatacttaataagtacgtgggcgagtcggaggccaatatccgcaagttattcgcagatgctgaggaggagcagcgtcggttgggcgctaattcgggattacatattattattttcgacgagatagacgccatctgcaaacagagaggatctatggccggatctacaggagttcacgatacagtggtgaaccagctcctttcaaaaatcgacggcgtggagcaattgaacaacatccttgtcattgggatgacaaataggccggacctgattgatgaggccctgttgcgccctggccgattggaggtgaagatggagattgggttaccagacgaaaaaggtcggctgcagatcctgcatatacatacggcacggatgcgcggacatcagctcctgagcgccgacgtggatataaaggagctggcagtggaaactaaaaatttcagcggggctgagcttgagggcctggtccgggctgctcaaagcacggctatgaatagacacattaaagcttccaccaaagtcgaggttgacatggagaaagccgagtcactgcaggtcacaagaggagactttttagccagtctcgagaatgacattaaaccggcatttggcacaaatcaggaggattatgccagctacattatgaatggaatcataaagtggggagatcctgtcaccagagttctcgatgacggcgaactgctagtccaacagaccaaaaatagtgaccggacccctctcgtgagcgttctgttggaaggcccaccgcacagcggcaaaacagctcttgccgctaaaatcgccgaagaatctaattttccatttatcaagatctgttctccagataaaatgatcggattttctgagaccgcaaaatgtcaggcgatgaaaaagatttttgacgacgcctataaatcccagctgtcctgtgtggtcgtagatgatatcgaacgcctcctcgattacgtgcctattggacccagattttccaatctcgtattacaggcactgctggtgctcttgaaaaaggctcccccacagggacggaagcttttgattattggaaccacctcccggaaagacgtgctgcaagagatggagatgcttaatgctttctcaacaaccatccacgtgccgaatatcgctacaggggaacaattacttgaggctctggagttgctgggcaacttcaaggacaaggagcgcacaactatcgcgcagcaggtgaaaggcaaaaaggtttggatcggaatcaagaagctgctcatgctgatcgagatgtccttacagatggatccagagtacagagtgaggaagtttctcgctctgctccgggaggaaggagcctag

SEQ ID NO: 220371 - DNA, 1452 bp, synthetic construct
  misc_feature 1..1452: note = Description of Artificial Sequence: Synthetic coding sequence
  source 1..1452: mol_type = other DNA
atgcctgaggaagccggtttccccccagccaagaggtttagacccggatctgggccaccttctcgtgctgggagctttcccccaggacggcaagtggtcatgttactgacagctgggtccggcggacgcggtggtggcggtgggagaagacagcagccgccactggctcagccaagtgcctcgccctaccccgaagcagtggaactgcagaggagatctctccccatctttcaggcacggggacagctgctggcccagcttcgtaatctggacaatgcagtgctcatcggtagcccattttttaccggacaccccggtgtgccgcattgggccggaggggatagatctcacgagcaggacgtgccccgacactgcaaagcccctcccagacgactcccctgcgacgcgggtccatcttcagtaaggctcccagccctgtgtaccgccgctccatccctccccagaggacccaaggactctggcctggaggttctagccgtacagcgggtgtccaaaacccaggcttggcagcgaaccggaagagctgggagggaagatagcggaatttgctatcggctttacacagaggacgaattcgagaagtttgataagatgaccgtgcctgagattcaacgatgcaatctggcaagcgtcatgctgcagcttcttgccatgaaagtgcccaacgtgcttacctttgactttatgtctaagcccagtccagaccatatccaggccgctattgctcagctggatctgctgggggctctggaacataaggatgatcagctgaccctgaccccaatgggtcggaagatggcggcattcccccttgaaccaaagttcgcaaagacaatccttatgtcaccaaagttccactgtacagaggagattctcacgattgtatctttactgtctgtggacagtgtgttacataatcctcctagccgcagggaagaagtccaaggcgtgaggaagaagtttattagcagcgagggagatcacatgacccttctgaacatttatcgcacattcaaaaatctcggtggaaacaaggactggtgtaaggagaactttgtgaacagtaagaatatgaccctggtggctgaggtccgtgcgcagctgagagatatttgtctgaagatgagtatgccgatcgctagtagcaggggcgacgtggaatcagtgagaagatgcttggctcattctttgttcatgtctaccgctgagctgcagcctgatggaacttatgccaccaccgacacgcaccagcccgtagccatacacccctcgtctgtgctcttccactgcaagcccgcatgcgtagtatacactgagctgttgtataccaataaatgttatatgcgagatctgtgtgtaattgacgcacaatggctttatgaggctgctccagaatatttcaggcgcaagcttagaactgcccgtaactag

SEQ ID NO: 220372 - DNA, 2940 bp, synthetic construct
  misc_feature 1..2940: note = Description of Artificial Sequence: Synthetic coding sequence
  source 1..2940: mol_type = other DNA
atgtcctatgactatcaccagaattggggacgggacggtgggcctcggtcttcaggtgggggatacggtgggggtccagccggaggtcacggcggtaatcgtggatcaggaggaggaggtggaggcggtgggggaggcagagggggacgtggaaggcacccgggacatctcaagggcagagagattggcatgtggtatgccaaaaagcagggtcagaagaacaaagaagctgagcgccaggagcgggctgtggtgcacatggacgaacgaagggaggagcagatagtgcaactgctgaattcggtgcaggccaagaatgacaaggagtccgaagcacaaatcagctggttcgcccctgaggatcacggttacggaacagaggtctctacgaaaaacaccccatgtagtgagaataagctagatatccaggaaaagaaactcattaatcaggagaaaaagatgtttaggatccggaacaggtcttatattgatcgcgattccgagtatttactgcaagagaacgaaccagatggaactctggatcaaaaacttctggaagacctgcagaaaaaaaagaacgacctacggtacatcgaaatgcagcattttcgagagaagttgccttcatacggaatgcaaaaagagctagtgaacctcatcgataaccatcaagtgacagttattagcggcgaaaccgggtgcggaaaaaccactcaggtaacccagtttatcttagataactatatcgaacgcggaaagggctccgcttgcaggatcgtctgcacacaaccacgacggatttcagctatctctgtggccgagcgagtggccgctgagcgcgctgagtcttgtggatctggaaactccactggttaccagatcagactgcagagccggctgcctcgcaagcaaggaagcattctctactgcaccaccgggattatcctccaatggctgcagtcggacccgtatttgtcgtcggtgtcacacatagtcttagatgagatccacgagcggaacctgcagagtgatgtcttgatgaccgttgtgaaagatctcctgaactttcggtcagacttgaaggtgatacttatgtcagctaccttgaatgctgaaaaattctcagaatatttcggaaactgtcccatgatccatatccctggttttacttttcccgtggtagaatacctgctggaggacgtaatcgaaaaaatcaggtacgtgcctgaacagaaggaacaccgcagccagtttaaacgcggattcatgcaagggcacgtgaacagacaggagaaagaggagaaggaggctatttacaaggaaaggtggccagactacgtacgagagttacggaggcgctacagcgccagcaccgttgatgtgatcgagatgatggaagacgacaaagtggatctaaacctgatcgtggcgctgataagatatatcgttctagaggaggaagacggggctatactagtgttcctaccaggttgggataatatttcaaccttgcacgacctactgatgagccaggtcatgtttaagagcgataaattcctgatcatcccactacacagtctgatgcccaccgtgaaccagacacaggttttcaaacggaccccccctggtgtgcgaaaaatcgtcatcgccacaaacattgctgagacttccatcaccatcgatgatgtagtatacgttattgatgggggtaaaatcaaggagactcactttgatacccagaataacattagtacgatgagtgccgagtgggtgtctaaagccaacgctaagcaaagaaagggacgcgctggacgagttcaaccaggccactgttaccatctctacaacgggctcagagcttcgctactagacgattatcagctaccagagattctcagaactcccttggaagaactgtgcctgcagatcaaaattctcaggctggggggtatagcttacttcctatcccggttaatggatccgcctagcaacgaggccgtgcttctgtccattcggcatttgatggagctgaacgctttggataagcaagaagagctgactcctctgggtgtgcacctcgctcgtcttccagtggaaccccacattggaaaaatgattctctttggggcactcttttgctgcttggaccccgtgctgactattgccgcaagcctctcgttcaaggacccgtttgttattccactggggtgggaagaggctcggagaaggggattccggtacgagaaagattactgctgggaatacttcctcagcagtaacaccctgcagatgttacataatatgaaggggcaattcgctgagcacttgctaggggcaggatttgtgagcagcaggaatcctaaggatcctgagtccaacattaacagcgataatgagaaaatcattaaagctgtgatctgcgcgggactgtaccccaaggttgccaagattcggttgaatttgggcaaaaagagaaagatggtgaaagtatataccaagacagacggacttgtcgcagtccacccgaagtccgtgaacgtcgagcagaccgactttcactacaattggctgatttaccatcttaaaatgcgcaccagctcaatctatctgtatgactgcactgaggtctccccatactgcctcctatttttcggaggagacattagtattcaaaaggacaacgatcaggagaccatagcagtcgatgaatggatcgtgttccagtccccagcacggattgcccatttggtcaaggagctgcgcaaggaactcgacatacttctccaagaaaagatagaatcgccacatcctgtggattggaacgacactaagagtcgggactgcgccgtgctgtcagcaattatagacttaataaaaacccaggaaaaagccacgccaagaaattttccacccagatttcaagatggttactactcttag

SEQ ID NO: 220373 - DNA, 2985 bp, synthetic construct
  misc_feature 1..2985: note = Description of Artificial Sequence: Synthetic coding sequence
  source 1..2985: mol_type = other DNA
atgtcttatgactatcatcagaattggggtcgtgatggcggaccaagatcaagcggcggagggtatggaggaggcccagccggtggtcacgggggaaaccgcggaagcgggggtgggggaggcggtggtggtggaggtagaggcggaagggggagacaccctgggcacctgaagggacgggaaatcgggatgtggtatgccaagaaacagggccagaagaacaaggaagctgagcggcaggaacgggcagtagtccatatggatgaacgcagagaggaacagattgtgcagctgctgaatagtgtgcaagccaagaacgacaaagagagcgaggcccagatttcatggtttgcgcctgaagatcacggatatggtacagaagtatcaactaagaacactccgtgctccgagaataaactggatatccaggaaaaaaagctcattaaccaggagaagaaaatgtttcgaatcagaaatagaagctacatcgatcgcgatagtgagtacctacttcaagaaaacgaacccgacggaacactcgaccagaagctcctcgaggacctgcagaagaagaagaatgacttgcgatacatcgagatgcagcactttcgcgagaaactgcctagttacggcatgcaaaaggaactcgttaacctcattgacaaccaccaggtcaccgtgatttctggggaaactgggtgtggcaaaaccacacaggtcacgcagttcatcctcgataattacattgaaagggggaaaggatcagcctgccggatcgtttgcacccagccacggaggatttcagccataagtgtcgcagaacgtgtcgctgccgaaagagcagagagctgcggaagtggcaactctacgggttatcagattcgtctgcagtcccgactcccacgcaaacaagggtccattctgtactgcaccacgggtatcatcctgcagtggctgcaaagtgacccctacctgagttctgtgagccacatcgtactagatgaaatccacgaaaggaatctccagtctgatgtcctgatgactgtcgtaaaggatcttcttaacttccggtcagacctaaaggtgatcctgatgtctgcaaccttgaacgccgaaaagttctctgagtatttcggtaattgtccaatgatccacatcccaggcttcaccttcccagttgtggaatatctgcttgaagacgtcattgagaagattcgttacgtacccgagcaaaaagagcataggagccagtttaagcgagggtttatgcagggccacgtaaaccgccaggagaaagaagagaaagaggccatttacaaggaaagatggccagactacgtgagggagctgagacgccgatacagcgcatcgaccgtcgacgttattgaaatgatggaggacgataaggtagaccttaacctaatcgtcgcacttattcggtacattgtgttggaggaagaggacggcgcaatcctggtgtttctccctggctgggacaacatatcaacattgcacgacctgctgatgagccaagtgatgtttaagagcgttaaccagacacaggtcttcaaacgaactcccccaggcgtgcggaagatagtaattgcaacaaacattgctgaaaccagcataactatcgatgatgtggtctacgttatagacgggggaaaaatcaaggagactcactttgacacacagaataatatcagcaccatgtctgccgagtgggtatcaaaagctaacgccaagcagaggaaaggtcgggctggtcgcgtacagcctggccactgttaccacctgtacaacggtcttcgagccagcctgctcgacgattatcagctgccagagattcttaggaccccccttgaggagttgtgcttgcagattaaaatcctccgcttaggcggaattgcgtattttctgtcccggcttatggatcctcccagcaacgaagccgtgttgctgagtattcgtcatctgatggagcttaatgccctcgacaaacaggaggagctcaccccactgggagtgcatctcgctcggctgccagttgaaccacatatcggaaagatgatattgttcggcgcactgttttgctgtctggacccagtcctgactatcgctgcaagtctgagcttcaaagatccctttgtgatccctctgggaaaggaaaagatagccgatgcccgaagaaaagaattggccaaagatactagaagcgatcatctgaccgtcgtcaatgcgttcgaaggatgggaagaagccagacgaagggggttcagatacgaaaaggactactgttgggagtactttctgagttccaatacactccagatgctgcacaacatgaaaggacaattcgccgagcacctgcttggcgctggcttcgtctcttcgaggaacccaaaagatcctgaaagcaacataaatagtgataacgagaaaattataaaggccgtcatctgcgctggtttgtatcctaaggtcgctaagatccgactgaacttaggcaaaaaacgcaagatggtgaaagtgtacaccaagacggatggcctggtagctgttcatccaaaatcggtaaacgtggagcaaacagacttccactacaattggctcatttatcacctaaagatgagaaccagctctatttatctgtatgattgcaccgaggtgagtccttactgcctcctcttcttcgggggagatatatcgatccaaaaagacaatgaccaggagacaattgccgtggatgaatggatagttttccagtcccccgcacgaattgcccacttggtgaaagagcttcggaaggagttggacatcctcctacaggagaaaatcgagtcaccccaccccgttgactggaatgatacaaaatcgcgggactgtgctgtgctatccgccatcatcgacctcattaaaacccaggagaaggccacccctcgaaattttccccctcggttccaggacggatattatagttag

SEQ ID NO: 220374 - DNA, 3027 bp, synthetic construct
  misc_feature 1..3027: note = Description of Artificial Sequence: Synthetic coding sequence
  source 1..3027: mol_type = other DNA
atgagctatgattatcaccagaactgggggagggatggaggtccaaggtcatccgggggtggatacggagggggtccggcaggcggtcacggcggtaaccgtgggtccggcggaggaggaggcggaggagggggaggccgaggagggaggggcagacatccagggcatttaaagggtagagaaatcgggatgtggtacgccaagaaacaggggcagaaaaataaagaggcagaaaggcaggaacgagccgttgtgcatatggacgaaaggagggaggagcaaattgtacaactccttaattcagtgcaggccaaaaacgataaggagtccgaggcgcaaatttcctggtttgcaccagaagaccacggatacggaactgaagtgagcacaaagaacacaccctgttccgagaacaaactggatattcaggaaaaaaagctcattaaccaagagaagaaaatgttcagaattagaaacagaagctacatcgatcgcgattccgagtacctgctacaagagaacgaaccagatggcacactggaccagaaactgctggaggacctccagaagaaaaagaatgacctgcgctatatcgagatgcagcactttagggagaagctcccctcctacggaatgcagaaagaacttgtcaatcttatcgataaccaccaggtcacagtcatttcgggggagaccggctgcggcaaaactacacaggtaactcaattcatcctggataactacattgagagaggtaaaggcagcgcatgcaggatagtgtgtacccagcccagacgcatttctgctataagcgtggccgagcgagtggccgcagagagagctgagagctgtggatcaggcaattctaccggttaccagattaggcttcagtcaaggctccctcgaaaacagggctctatactgtactgcacaaccggcatcatcctgcagtggctgcagtctgatccatacctgtcctcagtgagccacatcgtcctggatgagatccacgagcggaacttgcaatccgacgtcctgatgaccgtggttaaagaccttcttaatttccggtctgatctgaaggtgatactgatgtcagcaacgctcaatgcagagaagttttcagagtacttcggcaattgcccaatgattcacattccgggattcacctttcccgtcgtggagtacctattggaggatgtcatcgagaaaattaggtacgttccagagcagaaggagcatagaagccaattcaagcggggatttatgcagggtcacgtaaatcgacaggagaaagaggaaaaggaagctatttataaagaaagatggcccgattacgtgcgggaactccggagaaggtattccgcaagcacggtggacgtcattgaaatgatggaagacgataaggtggatttaaacctaatcgtcgctctgattcggtacatagtgctggaggaagaagacggagcgatccttgtgtttctccccggatgggacaatatcagtacactgcatgacctgctgatgagccaagttatgtttaagtcggataagttccttattatcccattgcactctctcatgccgacagtcaaccagactcaagttttcaagcgtacccccccaggggttagaaagattgtaatcgctactaacattgcagaaacctctatcaccattgatgatgtagtctatgtgatcgacggaggcaagatcaaggaaactcattttgatacccagaataacatctcaactatgtccgcggaatgggtttccaaagctaacgctaagcagcgtaagggtcgcgctggcagagtgcagccaggtcattgttatcacctctataacggcttaagggcctccctgctggacgactaccagctccctgaaattttgcgaacacccctagaggaattgtgtcttcagatcaagatccttcgcctcgggggaatcgcttactttctgagccgccttatggaccctccctccaacgaagctgtgctgctgtcgattcggcacctgatggagctgaacgcattggataaacaggaagaattgaccccactcggcgtgcacctggcccgtctcccagtcgaacctcacattggcaagatgatactgtttggggcacttttctgctgcctagaccctgttttaacaattgctgcctcactttcgtttaaggacccatttgttattccacttgggaaagagaaaattgccgacgctaggagaaaggagctggctaaagacaccagaagtgaccatttgacagtggtgaatgccttcgaaggctgggaggaggccagacggagagggttcaggtatgaaaaggactattgttgggagtacttcctgagttcaaacaccctgcaaatgctgcacaatatgaaggggcagttcgccgaacacttgttgggagcgggtttcgtatctagccgtaatcccaaagacccggaaagcaacatcaattctgacaatgaaaaaatcattaaagctgtcatttgcgcaggcctttaccccaaagtggctaagatcagacttaatttgggcaaaaaacgtaagatggtgaaagtgtatacaaaaacggacggtcttgtcgccgttcaccccaaaagcgtcaatgtggagcagacagatttccattataactggctgatatatcatttgaagatgcggacatcctccatctatctgtacgactgcaccgaggtgagtccatactgtctgcttttttttggcggtgatatttccattcagaaggataatgatcaggagacaatagctgtggacgaatggatcgtgtttcaaagtccagccaggattgcccaccttgtgaaggagctcaggaaggagttggacattctacttcaggaaaagatcgagtctccacatcctgtagactggaatgatacaaaatccagggattgcgccgttctgagtgctataatagacctcattaagacgcaggaaaaagccactcctcggaactttccccctagattccaagatgggtactatagttag

SEQ ID NO: 220375 - DNA, 2985 bp, synthetic construct
  misc_feature 1..2985: note = Description of Artificial Sequence: Synthetic coding sequence
  source 1..2985: mol_type = other DNA
atgagttatgactaccaccaaaattggggacgggacggcggtccaaggtcaagtgggggtgggtacgggggtggtccagccggaggtcacggagggaatcgtggatccggaggcggtgggggaggcggtggtggcggaagaggtgggagaggcaggcatccagggcatctcaagggcagggagatcggaatgtggtatgccaaaaagcagggccagaaaaacaaggaggctgaaagacaggagagagccgttgtgcacatggatgaacggagggaggaacaaatcgtgcagctgcttaactctgtccaggccaagaatgacaaggagtcggaggctcaaatttcatggtttgcacccgaagaccatggctacggcactgaggtttccactaagaacacaccatgtagcgagaataagctggacattcaagagaagaagctcatcaaccaagagaaaaagatgttccgaatacggaatagatcctacattgatcgggacagtgagtacctccttcaggagaacgaacccgacgggactctcgaccaaaaactgttggaagaccttcagaaaaagaaaaacgacctgagatacatcgaaatgcagcattttcgagagaagctcccctcctatgggatgcaaaaggaactggtcaatctcatcgacaatcatcaagttactgtcatcagcggcgaaaccgggtgcgggaaaactactcaggtgacccagtttattctcgacaattacatagagcgcggtaaaggctccgcctgccgcattgtgtgtacacagccgagacgaatcagcgccatttctgtcgcggaacgggtggctgctgaaagggctgagagttgtggatccggaaactccactggctatcagatccgcctgcaaagcaggctgccacgcaaacagggttccatactgtactgcactactggtattattctgcagtggctgcagagtgatccatatctatcatcagtgagccatattgtgctggatgagatccacgagagaaatcttcagtctgatgtgcttatgacagtggtgaaggacctcttgaacttcagaagcgatttgaaggtaatccttatgagcgcaactctcaacgccgaaaagttttctgagtatttcggcaactgtcccatgatacatatcccagggtttacctttcctgttgtcgaatacttgctcgaggacgtcatcgagaagatcagatatgtgccagagcaaaaggagcacaggtctcagttcaagagagggtttatgcaaggacatgtcaacagacaggaaaaggaagaaaaggaggccatctacaaagagagatggccagattatgtgcgcgagcttcgcaggcggtactccgcaagtacagtggatgttattgagatgatggaggacgacaaagtggatctcaacctgattgtggctcttatcagatacatcgtgctggaggaggaggatggggctattttagttttcctcccaggctgggacaacatatcgacactccacgacctcttaatgtcccaggtcatgtttaagagcggaaccatgagtcaggtgttcaaaagaactccgcctggcgtgaggaagatcgtgattgcgacaaacattgccgaaacgtccatcacaatcgacgacgtagtttatgtaatcgatggcggaaaaattaaggagactcatttcgacacacagaataatatctccactatgtccgcggaatgggtgagtaaagcaaatgctaagcagagaaaaggtagggcagggagggtgcagccagggcactgctatcacctctacaatggactgcgcgcttcactgcttgatgactatcagcttcctgaaatccttaggacccccttggaagagctctgcctgcagatcaaaatcctacggttggggggaatcgcttacttcctctcccgtctcatggatccgccttcgaatgaggccgttctcctctcaattcgacacctcatggagctgaacgccctggacaaacaagaagaactcactcctctgggcgttcatctggccaggctgccagtggagccccacataggcaagatgattcttttcggtgccctgttttgttgcttggatcccgtgttgacaatcgccgctagtctcagcttcaaggaccccttcgtgattccacttgggaaggaaaagatcgccgacgccaggagaaaggaactggccaaagatactagatctgaccacctcactgttgtgaacgcctttgagggctgggaggaagccaggagacggggttttaggtacgaaaaagattactgctgggagtactttctgtccagtaacacactgcagatgctgcataacatgaagggtcagtttgctgagcacctgctcggagcgggatttgtgagctctcgcaatcccaaggatccagagtcgaacattaacagtgacaacgaaaagatcatcaaagccgttatatgtgccggactctatcctaaggtcgctaaaatcaggctgaacttagggaagaaacgaaagatggtgaaagtgtataccaaaacagacggcctggtggccgtccaccccaagtccgtcaatgttgagcagaccgatttccattacaactggctgatctatcaccttaaaatgagaacttcaagcatttatctttacgattgcactgaggtctccccatactgcttgcttttctttgggggagacatctccatacaaaaagataacgaccaagagacaatagcagttgatgaatggatcgtcttccaatcacctgcaaggattgcccaccttgtgaaggagctcaggaaagagttagacattctgttacaggaaaaaatagaatctcctcatccagtcgactggaatgacaccaagagcagggactgcgctgttctgtctgcaatcattgatctgatcaaaactcaggagaaagccacaccacgaaacttcccaccgcgattccaggacgggtattacagctag

SEQ ID NO: 220376 - DNA, 3684 bp, synthetic construct
  misc_feature 1..3684: note = Description of Artificial Sequence: Synthetic coding sequence
  source 1..3684: mol_type = other DNA
atgggggataccagtgaagacgcctcgattcaccgcctggaagggacagacctcgactgccaggtcggtggactaatctgtaagagtaagtcggcagcatcagagcaacacgtgttcaaggcacccgcacctcgcccatccctgctcggccttgacctgctggcctctcttaagagacgtgagagggaggaaaaggacgatggagaagataagaagaagtctaaggtctccagctacaaagattgggaggagagcaaggacgatcagaaggacgctgaggaagagggcggagaccaggccggacagaatataaggaaagatcgtcactatcgctctgcacgggtcgagacgccctctcaccctggcggagtttcagaggaattctgggagaggtcccggcagagggagagagaacggagggagcacggtgtgtacgcaagctccaaggaggaaaaagactggaagaaggagaagtctagagatcgcgattatgatagaaagcgtgacagggacgagcgtgatcggagtagacattcgagcaggagcgaacgcgacggcggaagcgagcgctcatcccgaagaaacgaacctgagtctccacgacataggcccaaagatgctgctaccccgagcagatcaacttgggaggaagaggattcgggttatggtagtagccggagatctcagtgggaaagcccgagtccaaccccaagttatagggattcagagagaagtcatagattgagcacacgcgatcgagatagatcggtaagggggaagtatagcgatgacaccccgctacccaccccatcttataagtacaacgaatgggcggacgaccggcgacatttgggctcaacgcctcgcctctcgcgaggacggggtcggagggaagagggggaggaaggcatctcgtttgacaccgaagaagaacgacagcagtgggaagatgaccagaggcaggccgaccgcgactggtatatgatggatgaggggtatgacgagtttcacaacccattggcgtattcgtcggaggattacgtccggaggcgggaacagcacctgcacaagcagaagcagaaaagaatctctgcacagaggcggcaaattaacgaggataatgagaggtgggaaaccaatagaatgctcaccagtggtgtggttcatcgtcttgaggtcgacgaggattttgaggaagataacgcagccaaagtgcacctcatggtgcacaacctggtgcctccattccttgatggccgtatcgttttcaccaagcaaccagagcccgtcattcccgtgaaggatgccaccagcgatttggccatcatagcccgtaagggcagtcagaccgtaagaaagcacagagagcagaaagagcgcaagaaagcccagcataagcattgggagctggctggcaccaagctgggtgatatcatgggagtgaaaaaagaggaagaaccggataaagccgtcaccgaggatggaaaggtcgactatcgaactgaacaaaaatttgccgaccacatgaagaggaagagcgaagccagctctgagtttgccaaaaagaaaagcatactggagcagaggcaatatctcccaatctttgctgtgcagcaggaattgctgactatcatccgcgacaactccatcgtgatcgtcgtaggagaaacaggttccggcaaaactacccagctgacccagtatttacatgaagacggatacaccgattacgggatgattgggtgtactcagccacgtagagttgcagccatgtcagtggccaagcgcgtgtccgaagagatgggcggaaacctgggggaagaagtgggctatgcaattcggtttgaagattgtacctccgagaataccctgatcaaatacatgactgatggcattctgctccgtgaatcgctccgggaggcggacctggaccattattcagcaattattatggatgaggcacatgagaggagcctgaacaccgacgtcctgttcggactgctaagggaagttgtggctagaaggagcgacctgaaactaatcgtaacaagcgctactatggacgctgagaagtttgccgctttctttggaaacgtgccgattttccacatccccggtaggacattccccgtggacattctgttctccaagacgccacaggaagattatgtggaggccgcagttaagcaaagtcttcaggttcacctctctggcgctcccggagacatcttaatttttatgccaggacaagaggatatcgaggttactagcgatcaaatcgtggagcacttggaggaactggaaaatgcccctgcactggctgttttgccaatctatagtcaactgcccagtgacctgcaagccaagattttccaaaaagctcctgacggggtcaggaagtgcatcgtcgcaacgaatattgccgagacaagcctgactgtggacggcattatgtttgtcatcgactcaggttactgtaaactcaaagtttttaaccctaggatcgggatggatgcactgcagatttatcctattagtcaggcaaacgccaaccagcgcagcggacgagctggcagaacgggccctggccaatgtttccggctgtatacccagagcgcctacaagaacgaattactgacaaccacagtccctgaaatccagcgtaccaacttagctaatgtggtgctcctgttgaagtctcttggtgtgcaggatcttctgcagttccactttatggatccccctccagaagacaacatgcttaattccatgtaccagctctggatactcggggcactggacaataccggtggactcacctccacgggtaggctcatggttgaattccctctcgaccctgctttgtccaaaatgctgattgtcagttgcgatatgggatgtagtagcgaaattctcctgattgtgtccatgctctctgtgccggcaattttctacaggcccaagggtcgcgaggaggagtctgaccaaattagagaaaaattcgccgtgccggagtccgaccacctgacttacctcaatgtgtacctgcaatggaaaaacaacaattactccacaatttggtgcaatgaccattttatccatgctaaagccatgagaaaggtgagggaggtgcgagcacagttgaaggacattatggtccagcagaggatgtcattagcaagctgcggcacagattgggacatcgtccgcaaatgtatttgcgcagcctatttccaccaggctgcaaaacttaagggcataggggaatatgtgaacattaggaccggcatgccctgccatctccatcctacaagctccttatttggcatgggatatactccagattatatcgtttatcatgaactggtgatgacgaccaaagaatacatgcagtgtgtgaccgccgttgatggggaatggctcgcagaactcgggcctatgttctatagtgtcaaacaagcagggaagtcccgccaggagaacagacggagagcaaaggaggaggcaagcgccatggaagaagaaatggcccttgccgaggagcagctccgggcacgccgacaggagcaggagaaacgatccccattaggcagcgtgcggtccactaagatctataccccaggccgtaaggaacagggcgaaccgatgacccccaggcgcacgcctgctagattcggcctctag

SEQ ID NO: 220377 - DNA, 1620 bp, synthetic construct
  misc_feature 1..1620: note = Description of Artificial Sequence: Synthetic coding sequence
  source 1..1620: mol_type = other DNA
atgggcgacaccagcgaagacgccagtattcaccgactagagggtaccgacctcgattgccaagtcgggggtctgatctgcaagtctaaaagcgcagccagtgaacaacacgtcttcaaagctccggctcccaggccatccctgttgggactcgacctgttagcctcccttaaacggagggaacgagaagagaaggatgatggcgaggacaaaaagaagagtaaggtatcatcttataaggactgggaagagagcaaggacgaccagaaggacgccgaggaggaggggggtgaccaagccaagatctttcagaaggctcctgacggggtgcgaaaatgcattgtggcaacgaacattgctgaaacgtctttaacagtggacggaatcatgttcgtgatagactcagggtactgcaagctgaaagttttcaatcctagaattggaatggacgctctgcagatctaccctatatcacaggcaaacgctaaccagagatcaggacgggcaggtagaacaggcccaggccaatgcttccgactttacacacagagcgcctacaaaaacgaactgctcaccactacagttcccgagatccagcggaccaacttggctaacgttgtgctccttcttaaaagtttaggagttcaggatcttttacaattccatttcatggacccaccccctgaagataatatgctaaactctatgtaccagctatggatcctgggcgctcttgacaacacgggcggactgaccagcactggtcgtttgatggtggagttccccctggatccggcactttcaaaaatgctgatcgtgtcttgtgacatgggctgctcgtcggagatcctcctgatcgtttctatgctcagcgtgccagccattttttaccgcccaaaaggacgcgaggaagaaagcgaccagattagagagaagttcgcggtaccagagagcgaccacctgacctatctgaatgtgtatcttcagtggaagaacaataattactctacaatctggtgcaatgaccattttatccatgccaaggctatgcggaaagttagggaagtccgtgcccagctcaaggacatcatggtgcaacaacggatgagcctagcctcatgcggcacagactgggacattgttcgaaagtgcatatgtgcggcttatttccatcaggccgcaaaactgaagggaattggggagtatgttaatatcagaacaggcatgccttgtcacctgcaccccaccagttcgttgtttggcatgggctacacacccgactatattgtgtaccacgagctcgtcatgacgactaaagagtacatgcagtgcgtgacggccgttgatggggaatggctcgccgagcttggcccaatgttctattccgtaaagcaggccggaaaatccagacaggaaaaccggaggcgggcaaaggaggaggcaagcgccatggaggaggaaatggccctggcagaggagcagctgcgtgccaggaggcaggagcaagagaaaaggtcaccactgggatctgttcgctccacaaagatctatactccaggacgcaaagaacagggagaaccaatgaccccacggaggacccccgctagattcggcttatag

SEQ ID NO: 220378 - DNA, 2340 bp, synthetic construct
  misc_feature 1..2340: note = Description of Artificial Sequence: Synthetic coding sequence
  source 1..2340: mol_type = other DNA
atgagcagattccctgctgtcgctgggcgtgccccacgcaggcaagaagaaggcgaaagaagcagagacctgcaggaggaaagattgtcggccgtctgcatcgcggatcgggaggaaaaggggtgcacctcacaagaagggggtactaccccgactttccctatccagaagcaaaggaagaagatcatacaggccgtgagggacaattcttttctgattgttacagggaacactggatccggtaaaaccacccagctgcccaaatacctgtatgaggctggattttcccagcatggaatgattggcgtcactcagcctagaaaggttgcagcaattagcgtcgcccagagggttgcagaggaaatgaagtgcacactgggttccaaggtggggtatcaagtcagatttgatgattgttctagtaaagaaaccgcgattaaatacatgacggatggatgcctgctgaagcatatcctgggcgatccaaacctgaccaagtttagcgtgatcatactagatgaggcacacgagaggaccctcaccacagatattttattcgggctgttaaagaaattgtttcaagagaaatcacctaacagaaaagagcacctgaaggtcgtcgttatgagcgctaccatggagctcgccaagctctccgcgttctttggcaactgtccaatcttcgatattccgggtcggttatatcccgtgagagaaaaattctgcaacctgatcgggccaagggatagggagaataccgcgtacatccaggcaatagtaaaagtaactatggacattcatctgaacgaaatggccggtgatattcttgtgttcctgaccggtcaatttgaaattgagaagagttgtgagctcctattccagatggccgaaagtgtggactacgactacgacgtgcaggacacaaccctcgacggcctgctaatcttaccctgctatggcagcatgaccactgatcagcaaagacgcatctttctgccacctcccccaggtattcgcaagtgtgtcatttccactaatatcagcgctacgtccctgactatcgatgggattaggtatgtggtcgacggaggatttgtcaagcagctgaatcataatccgaggctgggactagacattcttgaagtcgtgcccatcagtaaatcagaagccctgcagcgatctggtcgcgcaggcagaacttcatcaggcaagtgctttcgcatttatagtaaagatttctggaatcaatgtatgccagaccatgttattcccgagatcaagcgaacctctttgacaagcgtcgtgctgacattaaagtgccttgcaatacacgatgtgatccgctttccgtacctcgacccccctaacgaacggctgattctcgaggctttgaaacagctgtatcagtgcgatgccattgaccggagtgggcacgtgactcgcttagggttgtcaatggtcgagttccctctcccccctcaccttacatgcgctgttataaaggccgcatcccttgactgcgaggacctccttctgcctattgctgccatgcttagcgtcgaaaatgtgtttattcggcctgtggacccagagtaccagaaagaggcagagcaacggcaccgggaactcgccgcaaaggccggtggtttcaacgactttgccacgctcgctgtgattttcgagcagtgtaagtcttccggggctccagcctcttggtgccaaaagcattggatccactggagatgcctcttctcggccttccgcgtcgaagcccagctgagggaattgatcagaaagctgaagcagcagtcggatttcccaaaggaaacctttgaaggcccaaaacacgaggtgctaaggaggtgtctatgcgccggatacttcaagaatgtggcacggagatcagtgggaaggacattctgcaccatggatggccgtggttcccccgtgcatatacatccctcatccgccctccatgaacaggagactaagctcgagtggattatttttcatgaggttctcgtgacaacgaaggtgtatgccaggatcgtttgtcctattcggtacgagtgggtgcgggatcttcttcccaaactgcatgaattcaacgctcatgacctgtcttcagtggcacggagggaagttagagaagacgcgcgacgccgttggaccaacaaagaaaacgttaagcaattgaaagacggcatctccaaagacgtgctgaagaaaatgcagagaagaaacgatgacaagtcaatcagtgacgcgagggcgcgttttcttgagcgtaaacagcagcgaactcaggatcatagtgacaccagaaaagaaaccggatag

SEQ ID NO: 220379 - DNA, 2169 bp, synthetic construct
  misc_feature 1..2169: note = Description of Artificial Sequence: Synthetic coding sequence
  source 1..2169: mol_type = other DNA
atgtccagatttccagcagttgcaggcagggccccacgccgtcaggaagaaggggaaaggtcacgtgacctccaggaagagaggctgtccgcagtctgcatcgccgatcgagaagaaaagggatgcacctcccaggagggaggcacaacccccactttcccaatccagaagcagcgaaaaaagattatacaggccgtacgggataactcttttctgattgtcaccggcaataccggttccggaaaaaccacgcaactgcctaaatatttgtacgaggctggattttcacaacacgggatgatcggcgtcactcaaccaaggaaggtcgctgcaatctcagtagcccagagggttgccgaggagatgaagtgcaccctcggatctaaagtaggctatcaggtgcgctttgatgactgctcttcgaaggaaaccgcaatcaaatatatgacagacgggtgtctgctcaagcatatcctgggcgatcctaaccttacaaagttcagtgtgatcatcctggacgaggcccatgaaaggacactgacaacagacatcctatttggcttgcttaagaaattgttccaggaaaaatcaccaaatcggaaagagcacctgaaagtggtggtaatgagcgcaacgatggaacttgccaagctgtcggctttcttcggcaattgtcccattttcgatattcccggacgcctttacccagtgcgggagaagttttgcaatctgatcggtccccgagatagagaaaatacagcgtacatccaggccatcgtgaaagtcacaatggacattcacctgaatgagatggcaggcgacatcctggtgttcctcactggccagttcgaaatcgagaaatcatgtgaactgcttttccagatggccgagtccgtcgattacgattatgacgtccaggatactacgctcgacgggctccttattctgccgtgttacggatccatgactacagatcagcagcgtaggatctttctgccgccaccaccgggtattagaaaatgtgtaataagtaccaacatctcggccaccagcctgacgatagatggaattcgatacgtggtcgatggagggtttgttaaacagcttaaccacaaccctcgattagggctggacatccttgaggtggtaccaatatcaaaaagtgaagccctccagcgttcaggtagagctggtaggacatccagcggaaaatgtttccgaatatattctaaggacttctggaaccagtgcatgcccgaccatgtgatccccgagatcaagagaacctcgctcacatcagtggttctgaccctgaaatgcctggccattcatgacgtgatacggtttccctatctggatccccctaatgagaggcttattcttgaagcgctgaagcaactctatcaatgcgacgctatcgatcggtccggccacgtgaccaggctgggcctgagcatggtagagttccctctgcctccccacttaacatgtgcggtgatcaaggctgcctcccttgattgtgaggatctgttgctcccgatagcagccatgctaagcgttgagaatgtgttcattcgacccgtcgacccggaataccagaaggaggctgagcagcggcaccgcgagttggccgctaaagcgggaggctttaatgattttgcgacactcgcggtgatcttcgaacaatgcaagagtagcggcgcacccgcttcctggtgtcagaaacactggatacattggagatgcctgttttcagcgttccgcgtggaggctcagctgagagagttgattagaaaacttaaacaacagtccgatttccccaaagaaaccttcgagggacccaagcacgaagtccttaggcgctgtctgtgcgctggatacttcaagaatgtggccagacggtctgtggggagaactttttgtacaatggacggcagaggatcccctgtgcatatccatccaagctcggccctccacgaacaggaaaccaaactcgagtggatcatatttcatgaggtcctggttaccaccaaagtctatgccagaatagtttgcccaatcaggtacgaatgggttcgcgacctgctccccaagttacatgagtttaatgcccatgatctatcttccgttgcacggagggaggtgagcaagataaagctcttccagtag

SEQ ID NO: 220380 - DNA, 2196 bp, synthetic construct
  misc_feature 1..2196: note = Description of Artificial Sequence: Synthetic coding sequence
  source 1..2196: mol_type = other DNA
atgatcggagtgacccagcctcgaaaggttgcagccatcagtgttgctcagcgtgttgcggaagaaatgaagtgcacactgggttccaaggtgggctaccaggtgcgcttcgacgattgtagcagcaaagagacggccatcaagtacatgactgacggatgtctgctgaagcacatcctgggggatccaaacctgactaagttctccgtgattatcctcgacgaggctcacgagagaactttaacaactgacatcctctttggactcctgaaaaagctgttccaggaaaaatcacctaatagaaaggaacatctgaaagtggtcgtcatgtccgcaactatggaactggccaagctttctgcttttttcgggaactgtcccatattcgacatccccggacggctttacccagttagagaaaagttctgcaatcttattgggcctagagatagagagaatactgcttacatacaggccatcgtgaaggtgactatggatatccacctgaacgagatggctggcgacatcttagtatttcttaccggccaattcgagatcgagaaatcttgcgagttgctgtttcaaatggccgagtcagtggattatgattacgacgtgcaggacacaaccctggacggtttactgatactgccatgttacgggtctatgactacagtgtcccagacctctctgacttttgtgacgcatatccagatcatgaagcagatttcggagaaccagcactcactgaccggcctcactatagcaggaatcaccggggtgagtcaccacgccagacccagaaacatgacttgcaatgaaaagctaaaccagcagcgcaggattttccttcctccccctccaggaatacgcaagtgtgtaatctccactaacatctccgccacatccttgaccattgatggcataagatatgtggtggacgggggattcgtaaagcagttaaatcataatcctcggctggggctggacatcctggaggtcgtccccatttccaagtcagaagccctgcaacgctctggtagagccggtcggacttcaagtggaaaatgttttagaatctactcaaaggatttctggaatcaatgcatgcctgaccacgtcatccccgagattaagcgcacttcactcacttcagtggtgttgaccctgaaatgcctagctattcatgacgtaattcgcttcccctatctggacccaccaaacgagcgcctcattctggaagccttgaagcagctgtaccagtgcgacgcaattgaccgcagcggccatgttacacgcctcggactatccatggtggagtttcctctgcctccacatctcacttgcgccgtcatcaaagctgcctccttagattgcgaagatctgttgttgccaattgccgctatgctgagtgtggagaacgtgttcataaggcccgtcgaccctgaataccaaaaagaagcagaacagaggcatagggagcttgcagctaaggctggcggtttcaacgacttcgccactcttgctgtgatttttgagcaatgcaaaagctccggtgcccctgcctcttggtgtcaaaaacactggattcactggcgttgtctgttttctgcttttagggtggaagctcaattgagggagctcataaggaagttgaagcagcagtcagatttccctaaggagacctttgagggacctaagcacgaggtgctgcgcagatgcttatgtgctggttattttaagaacgttgctcggagatccgtgggcaggaccttttgcactatggacggtcgaggttcacccgtgcacatccacccatcatccgcattacacgaacaggaaaccaaattggagtggattatcttccatgaagtactggttaccacaaaagtatatgcacggattgtatgccccattagatatgagtgggtgcgcgacctgctacccaaattacacgagtttaatgctcatgacttgagttcagtggcacgccgtgaggttagagaggatgctaggagacgttggactaataaagaaaacgtcaaacaactgaaagatgggattagcaaagatgtgttgaagaagatgcagcggagaaacgacgataaatccatcagcgatgcacgtgcaaggtttctggagcgcaagcagcagcgcacacaggatcattccgatacgaggaaagagacgggatag

SEQ ID NO: 220381 - DNA, 2109 bp, synthetic construct
  misc_feature 1..2109: note = Description of Artificial Sequence: Synthetic coding sequence
  source 1..2109: mol_type = other DNA
atgtctagatttccggctgtggcaggccgagcccctcgtcgacaggaagagggtgaaagatccagagatctgcaagaggagagactgagtgccgtgtgcatcgcagacagggaggagaaaggttgcacctcccaggaaggtggcactaccccaacattccccatccagaaacaacggaagaagattattcaggccgagactgctatcaagtacatgaccgatggctgcttactaaagcatatcctaggggatccgaacctgacaaaattcagcgtgatcattttggacgaagctcatgagaggactcttactactgacattttgttcgggctgctgaaaaagctctttcaagagaagtcaccgaatcgtaaggaacacttaaaggttgtggtgatgtccgcaactatggaactcgccaagctctccgctttctttggcaactgtcctatttttgacatccccggaaggctgtaccccgtgcgtgaaaagttctgcaaccttattgggcctcgggatagggaaaataccgcctacatccaggccatcgttaaagtcacaatggatatccacctaaacgagatggcaggggatatcctcgtcttccttacaggacagttcgagatcgagaaaagctgtgagttactatttcagatggccgaatctgtagactatgattatgacgtgcaggacaccacgctggatggactcttaattcttccctgctatggcagtatgacaaccgaccagcagcggagaattttcctgcccccacctccgggtatccggaagtgcgttatcagcaccaatatctccgctacaagcttgactatcgatggaattcgttacgtcgtggacggcggttttgtcaagcagctgaaccataacccacgcctaggtctggacatcctggaagtcgtgcctatttccaagagcgaagccctgcagcgatctggaagggcaggcagaacttcaagcgggaagtgcttccgaatctactccaaggacttttggaaccaatgcatgcccgatcacgttatcccagagattaagcgcacttccttgacttccgtggtgctaacgttgaaatgtctcgccatccacgacgtgatccgctttccataccttgaccccccaaatgagaggttaattctggaggctctgaagcagctgtatcagtgtgacgctattgatcgtagtggtcacgtcactcggctgggcctgtccatggtagagttcccattgccaccgcacctcacctgtgcagttattaaagccgcatcacttgactgcgaagacctgctgctgcctatagcggctatgctcagcgtcgagaatgtttttattcggccagtagacccggaataccaaaaggaggccgagcagcggcaccgagaactagccgcaaaggccggaggattcaatgatttcgcgaccctggcggtaattttcgaacaatgtaagtcttctggggcaccagcatcatggtgtcagaaacattggatccattggcgctgcctcttctcagcgtttagggtggaagctcagctccgcgagctcatcagaaaactcaagcaacagagcgacttccccaaagaaacttttgaggggcctaagcacgaggtactgcgccgatgcttatgcgcaggatacttcaaaaacgtggccagacggtcagtgggcagaacattttgcaccatggatggtaggggcagtcccgtccacattcacccctcatcagccctgcatgaacaggaaacgaagttggaatggatcatcttccatgaggtcctcgtcactaccaaggtgtatgctcgcattgtttgccccattagatatgaatgggtgagagatctcctgcctaaactgcatgagtttaacgcccacgacttgtcttctgtggcacgcagggaagtgcgagaagatgccaggaggcgatggacaaataaagaaaacgttaaacagttgaaagatggtatttcaaaagatgtacttaaaaagatgcagaggagaaacgatgataagtcaatttcagacgccagagcgaggttcctggagcggaaacagcagcggactcaggaccacagtgataccaggaaagaaaccggatag

SEQ ID NO: 220382 - DNA, 3663 bp, synthetic construct
  misc_feature 1..3663: note = Description of Artificial Sequence: Synthetic coding sequence
  source 1..3663: mol_type = other DNA
atggccgtggctgtcgcaatggccggtgccctgattggctctgagcccggacctgcagaggagctcgccaagctcgagtatctctcactggtgtccaaggtttgtactgagctggacaaccacctaggaatcaacgataaggatctcgctgaatttgtgatttctctcgctgagaagaacacgaccttcgacaccttcaaggcttccctggtgaagaacggagcagagtttaccgattcccttattagtaacctccttcgtcttatccagacaatgcggccaccggcaaaacctagtaccagcaaggaccctgtggtgaaacctaagactgaaaaagagaagttgaaagagctgttcccagtgctctgtcaacctgacaaccctagcgttcgcaccatgcttgatgaggacgacgtcaaagtcgctgtcgacgtgttgaaagaactggaggccttgatgccctcagcagctggccaggaaaaacagagggacgctgagcatcgcgatagaacaaaaaagaagaaacgatcccgttctagggaccggaaccgtgatcgggatcgcgatcgcgaaagaaacagagaccgcgatcacaaacggagacatcgatcaagaagtaggtctcgctcgagaactagggagcggaacaaggtaaagagtcgctaccgttcgcgaagccgcagccagagccccccaaaagaccgtaaggacagggataaatacggagaaagaaatctggataggtggagagataagcacgtagatcgaccacctcctgaagaacctacaattggggatatctacaacggcaaggtgacatccattatgcagtttgggtgttttgtgcaattggaagggctacggaagcgatgggaaggactggtgcatatttccgagctccgcagagaagggcgagtggctaatgtggctgatgtggttagtaagggccagcgggtaaaggttaaagtgctatcctttaccggtacgaagacatccttgagcatgaaagacgtggatcaagagacaggcgaggacctcaatcccaaccggagacggaatctggtaggcgagacaaacgaagagacaagcatgcggaatccagataggccgacccacttgagcctcgtctcagcacccgaagtagaggacgattccttagagcgaaaacggttgactcggattagcgatccggaaaagtgggagatcaagcagatgattgctgccaatgtcctttctaaagaagaatttccagacttcgatgaggaaacaggaattctccctaaagttgacgatgaagaggacgaggatctggaaatcgagctggtggaagaggagccacccttcttgcggggacatacaaagcaatccatggacatgtccccgatcaaaatagtcaaaaacccagatggaagtctgtcacaggccgctatgatgcagtccgctcttgcaaaggagaggagagagctgaaacaggcacaacgggaggctgagatggactccattccaatgggcctgaataagcactgggtggatcccctgccagacgcagagggacgtcagatcgccgcaaatatgcgcggaattggcatgatgcctaatgatatcccagaatggaaaaagcacgcctttggaggcaacaaagcctcctatggcaagaagacacaaatgagcatccttgagcagagagaatctttacctatttataaactgaaggaacagttggtccaggctgtgcacgacaaccagattctcatcgtcatcggcgaaacaggatccgggaagacgacccagatcactcaatatctcgcagaggctgggtacacttccagagggaagatcgggtgtactcagcccagaagagtggcagctatgtcggttgctaagcgggtgagcgaggaatttggttgctgcctgggccaggaagtagggtataccattagatttgaagattgcacaagcccagagaccgtgatcaaatatatgaccgatggaatgctactgagggagtgtctgatagatcccgatctgacacagtacgcgatcatcatgctcgacgaggctcatgagagaacaattcacacagacgtcctatttggtctcttaaagaaaacagtgcagaaacgccaggatatgaaacttattgtgacatctgctacattggacgccgttaagtttagtcagtatttttatgaggcgcctatttttacaataccaggaaggacgtacccggttgagatattgtataccaaagaacctgagaccgactatctggacgcatctctcatcacagtgatgcagatccacctcaccgagcctcctggcgacatattagtgttcttgacggggcaagaggagatagacactgcatgtgaaatcctatacgagaggatgaaatccctgggaccagatgtgccggagctcatcatcctgcccgtctacagtgccctgccatccgagatgcagacgaggatcttcgatccagccccaccaggcagtaggaaggtggtaatcgcaacgaacattgctgagacttccctcacaatcgacggaatctactatgtggtggatccaggttttgtaaaacagaaagtatataactcaaagaccgggatcgatcagctggttgtgacaccaatttcacaggcgcaggcaaagcagcgtgccggaagagccggaaggaccggcccaggaaaatgttatcgcctttacactgaaagagcttacagagacgaaatgcttacaacaaacgtaccggaaatacagaggaccaacctggcatctactgtgctcagcctaaaggccatgggaatcaatgacttgctttcttttgattttatggacgccccaccaatggagactctgattactgcgatggagcaattgtatacgctgggggcattagatgatgaggggctactgaccagactggggcgaagaatggctgagttccctcttgagcctatgttatgcaaaatgttgatcatgagtgttcacctgggttgcagcgaggaaatgctgaccattgtgagcatgctaagcgttcagaacgtgttttataggcccaaagacaagcaagctcttgctgatcagaagaaagcgaaattccatcagactgagggggatcaccttaccctgctcgccgtgtataattcttggaaaaataacaaattctcaaacccatggtgttacgagaacttcatccaagctcgttccctgcggagggcacaagacattcgcaagcaaatgttgggcatcatggaccggcacaagttggatgtcgtgtcctgcgggaagagtaccgtgcgggtgcagaaggcgatttgctctggtttctttcggaacgcagctaaaaaggatcctcaggaagggtaccgcacgctgatcgaccagcaggttgtttacatccaccctagctccgccctgttcaacagacagcctgagtgggttgtctatcatgagctcgtgcttacaacaaaagagtacatgcgcgaagtgaccacaatcgaccctcggtggctggtagagttcgctcctgctttttttaaggtgagcgaccccacgaagctaagcaaacagaagaagcagcaaagattagaaccactatacaatcgatacgaagagcccaatgcatggcgaatatccagggctttcaggcggaggtag

SEQ ID NO: 220383 - DNA, 3546 bp, synthetic construct
  misc_feature 1..3546: note = Description of Artificial Sequence: Synthetic coding sequence
  source 1..3546: mol_type = other DNA
atggctgtggcagtcgccatggccggtgcgctcatcgggagtgagccgggacccgctgaagaactagctaagctcgaatatctgtccttggtgtctaaggtctgtaccgagttagacaatcacctaggcatcaacgataaggacctggcagaattcgtaatcagcctggcagagaaaaacaccaccttcgacacattcaaggcttctctcgttaaaaatggtgccgagttcacagactctctaatctcaaatttgctacggctgattcagacgatgcgcccaccagcgaaaccaagtaccagcaaggacccagtggtgaaacccaaaactgaaaaagagaagctaaaagagctgttcccagtgctttgtcagcccgataaccctagtgttcgtacgatgttggatgaggatgacgtgaaagtggccgttgatgtgctgaaagagcttgaggccctcatgccctcggccgctggacaggagaaacagcgtgacgcggagcaccgggatcgcactaaaaagaagaagcggtcaaggtctcgggacaggaatcgggaccgggaccgcgaccgcgagcgcaatcgggaccgcgaccacaagagaagacataggtcccgatcacgctcgcgcagccgtactagggagagaaataaggtcaaatccaggtatcggtctaggtcccgatcccagtcccctcctaaagaccgcaaagaccgtgacaagtacggcgaaagaaatctggatcgctggagggacaaacacgtggacagaccccctcctgaggaacctactatcggagatatttataatggtaaagtcacatccatcatgcagtttggctgcttcgtgcagttagaaggactgcgcaaaagatgggaaggccttgtgcacatatcggagctgcgaagagagggcagagtggccaatgttgccgacgtagtctctaagggccagagggtgaaggtgaaggtgctttctttcacaggaactaaaacttcactgtccatgaaagacgtggaccaggaaaccggtgaggatttaaaccccaaccgacgccgtaacttggtgggcgaaactaatgaggagacaagtatgcggaaccccgatagacccacacacctgtccctcgtcagcgcccctgaagtggaagatgattccctggagaggaagcgacttactcgcatcagcgatccagagaaatgggagataaaacagatgatcgctgccaacgttctgtccaaagaagaatttccagacttcgacgaggagactggaattctccccaaggtggacgacgaggaggacgaggatctggaaatcgagctggtggaggaagaaccgccatttctgagaggccacacaaaacagtccatggacatgtccccgattaaaatcgtgaagaacccagacggctctctctcccaggccgcaatgatgcaatcggctctggctaaggagaggagggaactcaagcaggctcagcgtgaggccgaaatggactctattcccatgggtcttaacaagcactgggttgatcctcttccggatgccgaaggccgacagatcgcagcaaatatgagggggatcgggatgatgccgaatgatatcccggagtggaagaaacatgcgtttggcggtaataaggcatcctacggaaaaaagacacaaatgtcaattttggaacaaagagagtcccttccgatctacaagttgaaggaacagttggttcaggcagtgcacgacaaccagattttaattgtgatcggcgagaccgggtctggaaaaactacccaaattactcagtatctcgctgaggctggatatactagccgagggaaaatcgggtgcacgcagccgcgacgcgtcgccgcaatgtctgtggccaagagggtctccgaggaattcggttgttgcctggggcaggaggtaggttatactatccgctttgaggactgcacaagtcccgaaacagtgataaaatacatgaccgacggcatgctgctgagggagtgtcttatagaccctgatctaacccagtacgcgatcatcatgttggatgaggcacacgaaagaactattcacacagacgttctatttgggttgctgaaaaaaacagtccagaaaaggcaagatatgaagcttattgtgacctccgcaacactggatgcagtgaagttctcacagtatttctacgaagcacccatatttactattcccggtaggacttatcccgtggaaatcctatacactaaggagcccgagactgattaccttgacgcatctcttataaccgtcatgcaaattcatttgaccgaacctcctggagatattctcgtattcttgacaggacaggaggagattgacaccgcttgcgagattctgtatgaaaggatgaaatccttgggccctgacgtgccagagttgattattcttccggtttacagtgcgctgccttccgagatgcagactaggatctttgacccagcaccacctgggtctcgcaaagtcgtgattgcaacaaatatcgccgaaactagtctgaccatcgacggcatctactacgtggtggacccgggattcgtcaagcaaaaagtttacaacagcaaaaccggcatagatcagctggtggtgacaccgatctctcaagcgcaggcaaagcagagagctgggcgtgcgggtcgaaccgggcctgggaagtgctatcgattgtacacagagcgcgcttatagggacgaaatgttgaccacaaatgttcccgaaattcagagaaccaacctggcatccactgtgctgagcctaaaggcaatgggcattaatgatctgttgagcttcgactttatggatgcgccacctatggaaacacttataaccgcaatggagcagctgtacaccttaggcgctctcgacgacgaggggctgctgaccagactggggcgtagaatggcagaattccccctggagcccatgctctgcaagatgttaatcatgagcgttcacctgggctgctcggaggaaatgctgaccattgtgtcaatgctctctgtccagaacgtcttttaccggccaaaggataaacaggccctggctgaccaaaaaaaggcaaagttccaccagactgaaggagaccatttgaccttactggccgtgtacaattcttggaaaaataataaattttccaatccctggtgttacgagaactttatccaggccagatccttgcgcagagcccaggatattagaaagcagatgctgggcatcatggacagacacaagctcgacgtggtgtcctgtggcaaaagtacagttagggtacaaaaagcaatttgcagcggcttttttcgcaatgcggctaagaaggacccccaggagggttatcggacactgatcgaccagcaggtcgtgtatatacacccctcatccgctctcttcaaccgtcaacccgagtgcccaaagcatttcctgcctgtcgtcgcagtggctgtttctctcgaacagtgcctgtctaagttcgaagatctgaataaggagctgggtctggtgacctgctag

SEQ ID NO: 220384 - DNA, 3813 bp, synthetic construct
  misc_feature 1..3813: note = Description of Artificial Sequence: Synthetic coding sequence
  source 1..3813: mol_type = other DNA
atgggtgatgtgaagaatttcctctatgcatggtgcggtaaaaggaaaatgaccccctcttacgagattcgggcagtcgggaacaaaaacaggcagaaattcatgtgcgaggtgcaggtcgaaggttacaactacacaggcatgggtaactcgactaacaagaaggacgcccagtctaacgccgcaagggatttcgtgaactacctcgtgcggatcaatgagattaagagtgaggaggtgcccgcattcggtgtggcgagccctcccccactgaccgatacaccagatacaactgccaacgccgagggagacttgccaactacgatgggcggtccccttccaccccatttagctttgaaggccgaaaataattccgaggtcggggcaagcggttatggggtgccaggccctacatgggaccgcggtgctaacctaaaagactactatagcaggaaagaggagcaggaagtccaggcaactttagagagcgaagaagttgatctcaatgccggactccatggcaactggacattggagaatgctaaggcgcgattaaatcagtattttcaaaaagaaaaaatccagggcgaatacaagtatacgcaagtgggaccagaccataatcgctcattcattgcagagatgacgatatacatcaagcagcttggtaggcgcatcttcgcacgcgaacacggtagcaacaaaaaattagctgcgcagagctgcgcccttagtctggtgcgccagctgtatcaccttggggtagtggaggcctacagtggactgacaaagaagaaagagggggaaaccgtggagccctacaaagtaaacctctctcaggacctggagcatcagctacagaacattattcaagagctgaacctagaaatcttacctccgcctgaagacccctccgtgccagtcgccttgaacatagggaaactggctcagttcgaaccctctcagcgtcagaaccaggtgggggtggtgccttggtctcccccacaatccaactggaacccctggaccagcagtaatatcgatgaaggccctttggcatttgctacgcctgagcagatatccatggatctgaaaaacgagctgatgtaccagctagagcaggatcacgatcttcaggcaatactgcaggaacgagaactcctgccggtcaaaaaatttgagagcgaaatcttggaagccatatcacaaaactccgtggttattattcgcggagccaccggttgcggaaaaactacccaggtaccacaatttatcctcgatgatttcatccagaatgaccgggctgcggagtgtaatattgtggtaacccaacctcgacgcatcagcgcagtcagcgtggccgaacgagtggcctttgaacgcggtgaggaacctggcaagtcttgcggctatagtgttcgctttgaatccattttaccgaggccacacgctagcattatgttttgtacagttggcgtccttctgcgaaagctagaggccggaattcgtggtattagtcacgtgattgttgatgaaatccatgagcgcgacattaacaccgattttctactcgtggtattaagggatgtagtgcaggcgtatccagaagtgcggattgtgcttatgtcggccactattgatacaagtatgttttgtgaatatttctttaactgccccatcattgaagtgtatggtagaacttaccctgtgcaggagtattttttggaagattgcatccagatgacgcatttcgtaccacctccaaaggataagaagaaaaaagacaaggacgatgacggaggtgaagacgatgatgccaactgtaatcttatttgtggtgacgagtacgggccagagacccggttgtccatgtcacaactcaacgaaaaggagaccccattcgagctgattgaagccctgctgaagtatatagagacccttaatgtacctggagccgtgctggtgtttttgcccggatggaacctcatttacacaatgcagaagcacctggaaatgaaccctcactttgggagccataggtatcaaatcctccctttgcattctcaaattccccgagaggagcagcgaaaagtgtttgaccctgtccccgtgggggtcactaaggttattctctccaccaacatcgctgaaacttcgatcactattaacgatgttgtgtacgtgatagactcttgcaaacagaaggttaaactgttcaccgcccataacaatatgacaaactacgctactgtgtgggctagcaaaacaaacctggagcagaggaagggacgcgctgggcgagtgcggcctgggttctgttttcacttatgctcaagggctagatttgaacgattggagacgcacatgacacctgaaatgttccgaacacccctgcacgagattgcactgtcgatcaaattgctccggctcggtggcataggccagttccttgctaaagcgatcgagcccccaccacttgacgccgtgattgaggctgagcacaccctgagagaactcgatgcattagatgcaaatgacgagctgacaccccttgggcgtatcctcgcaaaattaccgatcgagcctcgattcggaaaaatgatgatcatgggatgtatcttctatgttggggacgccatatgtacgattgctgctgctacttgttttcccgagcccttcatcaacgagggcaagagactgggttacattcatcggaacttcgcaggaaacagattttcagaccacgtggcgctcctctctgtgtttcaagcctgggatgatgcccgaatgggcggagaggaagctgaaatcaggttctgtgagcacaagcgcttaaatatggccacactccggatgacctgggaggccaaagtgcaactcaaagaaattctgattaattctggcttccctgaggattgcctgctgacacaagtatttaccaacacgggcccagataacaatctggacgtcgtaattagcctgctggccttcggagtctaccctaatgtctgctaccacaaggaaaagcgaaagattctgacgactgagggaaggaatgccctcatacacaagtcctccgtaaattgccctttttcttcccaggacatgaagtatccatcccccttttttgttttcggtgaaaagatccgaaccagggcaatcagcgccaaaggaatgaccctggtgaccccactgcaactcctcttattcgcatcaaagaaagtgcagagcgacgggcagatagtgctggttgacgactggatcaaattacaaatttctcacgaggccgctgcttgcatcaccgggctgcgcgctgcaatggaagctctagtcgtggaggtcactaagcagcctgctattatcagtcagttggacccagtaaatgagcgtatgttaaatatgatccgtcagatcagtcggccttcagctgcaggtattaacctaatgatcggcagcactagatacggagatggtccgaggcctcccaaaatggcccgatacgataacggctccgggtaccgtcgcggaggtagcagttatagtggaggtgggtatgggggagggtattcatccggcggatacgggtccggaggctacggcggatccgcaaattcgtttagggctggatacggagccggtgtggggggaggatacagaggagtgtctcgcggtggctttcgcggaaattcaggtggtgattatcgaggacccagcggcggatacagggggtcaggcggattccaacggggtggagggcgaggtgcttatggaaccggctacttcggacaagggagaggcggaggaggatattag

SEQ ID NO: 220385 - DNA, 1800 bp, synthetic construct
  misc_feature 1..1800: note = Description of Artificial Sequence: Synthetic coding sequence
  source 1..1800: mol_type = other DNA
atgggagacgtcaagaacttcctctacgcgtggtgcggtaagaggaagatgacaccatcatacgagatccgagcggtgggaaataagaatcgacaaaaattcatgtgtgaagtccaagtggagggatataattacactggtatgggcaacagcacaaacaaaaaggatgcccagtccaatgccgctagagactttgtcaactacctggttagaattaacgaaattaagtcggaagaggtgccagcatttggggttgcctcacctcctccattgactgacaccccagacacaaccgccaatgccgaaggtgatctgcccactaccatggggggtccactccctccccatcttgccctcaaggcggagaataattccgaggtgggagcctcagggtatggggtcccaggaccgacttgggacaggggcgcaaacctgaaagactattactcacgaaaggaagagcaagaagttcaggcaacgctcgaaagcgaagaggtggacctgaacgcaggtctgcacgggaattggacactggaaaatgccaaggcaagacttaatcagtacttccagaaagagaaaattcagggcgagtataaatacacgcaggtgggccctgatcacaatcgcagtttcatcgccgaaatgacaatctacattaagcagctgggcagaagaatattcgcacgcgagcacggaagtaacaaaaaactggctgcccagagctgtgccctatcactggtccggcagctttatcacctaggggtcgtggaagcctatagcgggttgaccaagaaaaaagagggtgaaacagtcgagccctacaaggtcaatttatcccaagacctcgagcaccagctccagaacatcatacaggaactgaacctggaaattctgcctccaccagaagacccatccgtcccagttgccctgaacatcggcaaactggcacagtttgaaccatctcagcgacaaaaccaggtgggcgtggtgccctggtcgccacctcagtccaactggaatccttggaccagcagcaatattgatgagggcccactggcttttgccacacccgagcagatctctatggatttaaagaacgagttgatgtaccagctcgagcaggatcacgatctccaggctatactgcaggaacgcgagctgttgcctgtcaaaaagtttgagagtgaaattttagaggctatcagccaaaattccgttgtaattattaggggagccaccggatgcggcaagaccacacaggttcctcaatttattttggatgacttcattcagaatgatcgggctgctgagtgcaacatcgtggtgacacagccccgtaggatctcagccgtcagcgtggcagaacgggtggccttcgagcgcggtgaagagcctggcaaatcatgtgggtattcagtccgatttgagtcgatcctacctagaccccatgcgtctattatgttttgcaccgtgggtgtcctgctccgcaagcttgaagccggaatccgcggtatctcccatgttatcgtcgacgaaattcacgagcgtgatatcaacactgactttttgctcgtcgttctgagggatgtagttcaggcctaccctgaggtgaggattgtcctgatgtcggcgaccatagatacatcgatgttctgcgagtatttttttaactgcccgattatcgaagtctacggaaggacgtacccggtgcaagaatattttctggaggactgtattcagatgacccattttgttccccctccaaaggataagaaaaagaaagacaaaaagaagaaatag

SEQ ID NO: 220386 - DNA, 1197 bp, synthetic construct
  misc_feature 1..1197: note = Description of Artificial Sequence: Synthetic coding sequence
  source 1..1197: mol_type = other DNA
atgatgttaaaaggcattacccgccttatctctagaatccataagcttgacccgggacgattcctacatatgggcactcaggcccgacaatctattgctgcccacttggataatcaggtccccgttgaatcaccacgcgctatctcacgtactaacgaaaacgatccagcaaagcacggagaccagcacgagggtcagcactacaatatttccccgcaggaccttgagactgtctttccgcacggcctgcctcctcggtttgttatgcaggtaaagactttcagtgaggcctgtttaatggtcaggaaacctgccctggaactgctccactacctgaagaacacatcattcgcgtacccggctattcggtacctcctgtatggcgagaaaggcaccggcaagactctgtccttgtgccatgtgatacacttttgtgccaagcaagactggctgattctgcacattccagacgcgcatctatgggtgaaaaactgtagagatcttttacagtcctcatacaataaacagcggttcgatcagcctttggaagcctcaacatggttgaaaaactttaaaaccacaaacgaaagattccttaatcaaatcaaggtgcaggagaaatacgtttggaacaagcgcgagagcacagagaagggctctccgttgggagaggtggtggaacaaggaataaccagagttagaaacgccaccgacgccgtagggattgttctcaaggaacttaaaagacagtcatccctcggtatgtttcatttactggtggcagtcgacggaattaatgcgttgtggggtagaacaacgctgaagagagaggacaagtctccgatcgctcccgaagaactggcattggtccataatctcagaaagatgatgaaaaatgactggcacgggggtgcaatagtgtcagcgctgagtcagactggttccctttttaagccccgaaaagcctatttgccccaggagctactgggcaaggagggctttgacgcccttgaccctttcattccaattctggtgtctaattacaaccccaaggaattcgaatcctgcatacagtactatctggagaataattggcttcagcacgaaaaggcaccgaccgaggaaggaaagaaggagcttttgtttcttagtaatgcaaacccttccttgcttgagcggcactgcgcctacttgtag

SEQ ID NO: 220387 - DNA, 1197 bp, synthetic construct
  misc_feature 1..1197: note = Description of Artificial Sequence: Synthetic coding sequence
  source 1..1197: mol_type = other DNA
atgatgctcaagggaataacaagattgatttctcgcattcacaaactggatcctggcaggttcctgcacatggggacacaggctcggcagagcatagccgcacacctcgataaccaagtgccagtggaatcaccacgggcaatatctcgaaccaacgaaaacgacccagccaagcacggggatcagcacgagggtcaacattataacatctccccccaggatctggagaccgtttttcctcatggcctcccacctcggtttgtgatgcaggttaagacattctctgaggcttgtctgatggtgcgtaagcccgcattagagctcctgcactatctaaaaaacacaagttttgcataccccgctatccgatatcttctgtacggggaaaaaggaaccggtaaaacgctgtcattgtgtcatgtaatccatttttgcgctaagcaggattggttgatcctccacattcccgacgcccacttgtgggttaagaattgcagagatctgctgcagtcgtcctataataagcagagatttgaccagcctctggaggcatccacttggctgaagaattttaagaccaccaacgagcgctttttgaatcagatcaaggtgcaagaaaagtacgtctggaataaacgcgagagtactgagaagggctcccctctgggtgaagtggttgaacaggggattactagagttcgcaatgccaccgacgcagttggaattgtccttaaagagctgaaacgccagtcctcactcggtatgttccacctcctggtagccgtagatggcatcaacgctctgtggggaaggactacactgaagcgggaagataagtcaccaatcgctccagaggaactcgctcttgtgcataatttgcgcaaaatgatgaagaacgactggcacggtggtgctatagtctctgctctctctcaaactggatccctttttaaaccaaggaaagcgtatctgcctcaggaattgctgggaaaggagggctttgacgctctagacccatttatcccgatactcgtatcgaactacaatccaaaggagttcgaatcctgcatccagtattacttggaaaataactggctgcagcatgagaaagccccaaccgaggagggcaaaaaagagttactctttcttagcaatgccaatccctccctcctggagaggcattgtgcttacctgtag

SEQ ID NO: 220388 - DNA, 1095 bp, synthetic construct
  misc_feature 1..1095: note = Description of Artificial Sequence: Synthetic coding sequence
  source 1..1095: mol_type = other DNA
atgatgctgaagggaataaccagacttatttcccggatccacaaacttgacccaggacgcttcctgcacatgggaacccaagcccgacagagtattgccgcacatttagacaaccaggtgcccgttgagtcacctagagccatcagtcgcaccaacgagaatgacccagtcaaaaccttctctgaagcctgtttaatggtgaggaaaccagctctggagctgctccattatcttaagaacacatccttcgcttaccctgctatacggtacctgctgtacggggagaaaggcacaggtaaaacgctgtccctttgccacgtaatccatttttgcgctaagcaagactggctgattctgcacatcccagatgcacacctgtgggtgaagaactgcagggatcttctccagtctagttacaataagcaacggttcgaccaacctctggaagctagcacctggctgaaaaatttcaagacaactaatgaaagattcctcaatcagattaaagtacaggaaaaatacgtttggaacaagagagaatccacagaaaaaggttctcccctcggcgaagttgtggagcaggggattacacgggtcagaaacgcaacagacgccgtggggatcgtgttgaaggagctaaaacgacagtcttccctgggaatgtttcacttattggtggcagtcgacggtatcaacgcactgtggggaaggacaaccctgaagcgagaagataaaagtccgattgcccctgaggagctggccctggtgcacaacctccggaaaatgatgaagaacgactggcacgggggagcaatcgtcagcgccctgagtcagaccggatccctttttaagccccgaaaagcatatcttcctcaggagctgctgggaaaagagggctttgatgccctggacccattcatccccattttagtttctaactacaaccccaaggaattcgagagttgtatccaatactaccttgagaataactggctacaacacgagaaagctcccaccgaggagggcaaaaaagaactgctctttctgagcaacgcgaacccttccctgctcgaaagacattgcgcttacctgtag

SEQ ID NO: 220389 - DNA, 1074 bp, synthetic construct
  misc_feature 1..1074: note = Description of Artificial Sequence: Synthetic coding sequence
  source 1..1074: mol_type = other DNA
atgatgctgaaggggattacaagactgatttcccgcatccacaaagccaaacatggggaccaacatgaaggccagcactataacatcagcccccaggacctggaaaccgtatttccacacggactcccccctcgctttgtcatgcaggtcaaaacctttagtgaggcttgtctcatggtgagaaagcctgcactggagctactccactatctgaaaaatacctcattcgcataccctgcaataagatacctgctgtatggagagaaggggaccggaaaaacgttatctttgtgtcatgtcattcacttttgcgctaagcaggactggttaatcctgcacataccggatgcccacctctgggtgaagaattgtagagatctcctccaatcctcttataataagcagaggtttgaccagccactagaagcaagtacttggctcaagaattttaaaaccaccaatgagcggtttctgaaccagataaaggtacaggaaaaatatgtgtggaacaaaagagagtctactgagaagggctctcctctgggcgaagtggtcgagcagggaattacccgagtgaggaatgcaacagacgccgtgggtatagtgctgaaggaactgaagcgacaaagttccttggggatgttccacctgctggtcgccgtcgacggaatcaacgctctatggggacgaacgacactgaaaagagaagataaaagccctattgctcctgaggagttggcccttgtccataacctaagaaagatgatgaagaatgactggcatggcggtgcaattgtctccgccttgtcacaaacaggaagtctgttcaagccaagaaaagcctacctgcctcaggaactcctcggcaaggagggattcgacgccctagatcctttcatacccatactggttagcaattataaccccaaagaattcgagagctgtattcaatattatctcgagaataactggctgcagcacgagaaggccccaactgaggagggcaaaaaagaactcttgtttcttagcaacgcaaacccatctttactcgagagacactgtgcatacctgtag

SEQ ID NO: 220390 - DNA, 1047 bp, synthetic construct
  misc_feature 1..1047: note = Description of Artificial Sequence: Synthetic coding sequence
  source 1..1047: mol_type = other DNA
atggccggactgaaaagacgagcgagtcaagtttggccagaagaacatggcgaacaggaacacggcttatatagtttgcaccgaatgtttgacatcgtagggacccatctgacacatcgggacgttcgcgtgctgagcttcttgtttgttgacgtgatagacgatcatgagagagggctgatcagaaacggcagggacttcctgctcgccctcgagagacagggtaggtgtgacgaatccaatttccgccaagtccttcagttacttagaatcatcactcgccacgatctgctcccttatgtgaccctcaagcgccgtcgagccgtctgcccagatctggttgataaatatctcgaggaaacatccatcaggtacgtgacacccagggctctgtccgatccggaaccgagaccccctcagccctcgaaaactgttccacctcattatcctgtggtgtgttgtcccacctctggccctcagatgtgtagcaagcgcccagcgcgaggtagagcaactctgggctcccaaaggaagcgccgaaaaagcgttacgcccgatccaaaagagaagcaaacttgtggcgaagaggtccagggcttccagcgctggtccaggctcgaaggggagtacaaagagttactaggccactgggccgtgtatgcaattcagtacatcagattacgcgtgagggctgaatactgccagcacgaaacagcactgcagggcaacgttttctcgaataaacaggaccctctcgaacgacagtttgaaagattcaatcaagccaacactatcttgaagtccagggacttgggaagcataatctgtgatataaagtttagtgaactcacttacctagatgccttttggagggattatattaatggctctctgctggaagccctgaaaggggtgtttatcactgactcactgaagcaagcggtcggacacgaggctatcaaactcctcgtgaatgttgacgaggaggactacgaactgggaaggcagaagcttctgcgtaatctgatgctgcaggccttgccttag

SEQ ID NO: 220391 - DNA, 957 bp, synthetic construct
  misc_feature 1..957: note = Description of Artificial Sequence: Synthetic coding sequence
  source 1..957: mol_type = other DNA
atggccggtctcaaacgccgagccagccaagtctggcccgaggagcacggggagcaagagcacgggctttactcacttcaccgtatgttcgatatcgttggaacccatttgacacatcgagatgtccgggtcctctcgtttctgttcgttgacgtcatagacgatcacgagcggggtctcattaggaatggaagggattttttgttggccttggaacgacaaggaaggtgcgatgaaagcaacttccggcaggtcctccagctccttcgcatcattactagacacgatctgctaccatacgtgactttgaagagaaggcgcgctgtatgcccagacttggtggacaaatatctggaagaaaccagcataagatatgttactcccagagctctgagtgaccccgagcctagaccccctcaacctagcaagacagtacctccccactaccccgtagtgtgctgcccaacttcgggtccgcagatgtgcagtaagaggcccgctaggggcagagccactctaggctcacaaaggaaaagaagaaagagtgtaactccggaccccaaagagaaacagacctgtgacatcaggttaagagtccgagccgagtactgccaacacgagacagctctgcagggaaatgtgttctccaacaaacaggatccacttgagcgacagtttgagaggtttaatcaggccaatactattctaaaatcccgggatctgggcagcatcatctgtgacattaagttttccgagctgacctacctggatgccttttggcgggactatatcaacggctccctgttggaagcactgaaaggcgtgtttattactgattctttgaagcaggctgtgggacacgaggccatcaaactgctcgtgaacgtcgatgaggaggattatgaactgggaagacagaagctgctgagaaacctgatgctccaggcgcttccctag

SEQ ID NO: 220392 - DNA, 1047 bp, synthetic construct
  misc_feature 1..1047: note = Description of Artificial Sequence: Synthetic coding sequence
  source 1..1047: mol_type = other DNA
atggcagggctcaagcggagagcttcacaggtgtggccagaggagcacggggagcaggagcatggcttatactccctccacagaatgttcgacatcgtcggcacgcacttaacacaccgggatgtgcgcgttctgagcttcctgttcgtggacgtaattgatgaccatgagagagggcttattaggaatgggagagattttctccttgctctggaacgtcaggggcgatgcgacgagtctaacttcagacaggttctgcaactgctgcgcataatcacacggcatgatctcctcccatatgtcacgttaaaaaggcgacgggctgtgtgccccgatctggtggataaatatctggaagagacatcaattcgctatgtgacaccccgtgccctgagtgacccggagccaagacctccgcagccatccaaaactgtccctccccattaccctgttgtttgctgccccacctccgggcctcagatgtgcagcaaacgtcctgctcggggaagagctaccctgggcagccagcgaaaaaggcggaaatccgttacgccagaccccaaggaaaagcagacatgcggcgaagaagtgcagggtttccagcgatggtccaggctggagggcgagtataaggagttgctgggacactgggctgtctacgccattcagtatataaggctcagagtgagagcagagtactgtcagcacgaaacagccttgcagggtaatgtgttttctaataaacaggaccctctggaacggcagtttgaacggtttaaccaggctaatactatcctgaaatcccgggacctgggctctatcatatgcgatattaagttcagtgaacttacctacctggatgccttttggagggactacattaatgggtctctactggaagccctgaaaggcgtgttcatcacagattccttaaaacaggccgtaggacacgaggcaatcaagctcttggttaacgtcgacgaagaagattatgaactgggacgccaaaaacttctaagaaacttaatgcttcaggccctgccctag

SEQ ID NO: 220393 - DNA, 957 bp, synthetic construct
  misc_feature 1..957: note = Description of Artificial Sequence: Synthetic coding sequence
  source 1..957: mol_type = other DNA
atggctgggctcaaaaggagggcaagtcaggtctggcccgaagaacacggcgagcaggagcacggtctgtatagcctgcaccgaatgtttgatatcgttggcacccatcttactcaccgagacgttagagtgctcagttttctgtttgtggacgtaatcgacgaccatgagagagggctgattcgcaatggcagggacttccttttagcactggagcgccagggtcgttgtgatgagtccaattttcggcaagttcttcagttgctgcgcatcatcacaagacacgatctccttccctacgtgaccctgaaaaggagaagagccgtgtgccctgacctcgtcgataaatacttagaggaaaccagtattcgttacgttaccccgagggccctatcggaccccgagccacgcccacctcagccctcaaagaccgtgccgcctcattaccctgtggtttgttgtcccaccagtggcccacaaatgtgcagcaaacgtccagcaaggggaagagccacacttggttcacagcggaaacggagaaagtcggtaactccagaccctaaggagaagcagacttgcgacataagactgcgggttcgtgcagaatattgtcagcacgagactgctctgcagggcaatgtgttctctaacaagcaggatccattagagcgtcaatttgaaagattcaaccaggcaaataccattctgaagtcccgggacctgggttctatcatctgtgatattaaatttagcgagctgacataccttgacgctttttggcgggactacattaatgggtcactattggaagccttgaaaggggtttttattacagattcactcaagcaggccgtgggtcatgaggccatcaaacttctggtgaacgtcgacgaagaggattacgagctcgggaggcagaaactgttgcgcaacctgatgctgcaagccctcccatag

SEQ ID NO: 220394 - DNA, 828 bp, synthetic construct
  misc_feature 1..828: note = Description of Artificial Sequence: Synthetic coding sequence
  source 1..828: mol_type = other DNA
atggctggtctgaagagaagggcttcccaggtgtggcccgaagaacacggagagcaagaacacggcctgtatagcttgcatcggatgtttgacatcgttggaacccatttgactcatcgcgatgtcctccagctccttaggattatcaccaggcacgatttgctgccatacgtgacactcaagcgccgacgggctgtttgccccgatttagtggacaagtacttggaggaaacttcgatacggtacgtaaccccacgcgctctgagcgatcccgagcctcgccctccccagccaagtaagaccgtgccgcctcactacccagtagtgtgttgccctaccagtggtccccaaatgtgctctaaaagaccagctagggggagggctaccctgggttcacaaaggaaaaggaggaagagcgtcaccccagacccaaaggagaagcaaacctgtgacattcggttgcgagtacgagctgaatattgccaacatgagacggcactgcagggcaatgtattcagcaacaaacaagatcctctggaaagacaatttgaaagatttaatcaggccaacaccattcttaagtcccgcgatcttggcagcatcatttgtgatatcaaattctcggaattgacgtatctggatgcattttggcgcgactacatcaatggaagtctgttggaggctttaaaaggggtgttcatcaccgactccttgaagcaagccgtgggtcacgaagccatcaaactgctggtcaacgtggatgaagaagactacgagcttggtcgccaaaaacttctgagaaacctgatgctccaggctctgccttag

SEQ ID NO: 220395 - DNA, 957 bp, synthetic construct
  misc_feature 1..957: note = Description of Artificial Sequence: Synthetic coding sequence
  source 1..957: mol_type = other DNA
atggccggtctgaagcgaagagcgtcgcaggtctggcctgaggaacacggagaacaggagcacggtctctatagtctgcacaggatgtttgacatcgtagggactcacctaactcaccgagatgtccgggtcctctcgtttctgttcgtggatgtcattgatgaccatgagcgcggtctgattaggaacggtcgcgatttcttattagctcttgagaggcaagggaggtgcgatgagagcaatttccgccaggtactccagttactgcgtattataacccggcatgacctgctgccttacgtcacactgaagcggagacgcgctgtgtgcccagatctggtggacaaatacctcgaagagacctcaataagatatgttacgcctcgcgctctatccgatccggaaccacggcctccgcagccctcaaaaactgtcccccctcactaccctgttgtgtgctgcccaacctccggaccacagatgtgcagtaagcgcccagcaagaggaagggcaactctgggctcgcagcgcaagaggcgtaagtcagtaacacccgacccgaaagaaaaacagacttgtgacatcaggctccgagtgagggcagagtactgccagcatgagacagccctccagggcaatgtgttcagcaataagcaggacccactcgaacggcagttcgagcggttcaaccaggctaacaccattcttaagagccgcgacctcggcagcatcatctgcgacattaagttttccgagcttacttacttagacgccttttggcgggattatatcaacggctccctgttagaagctctgaagggtgttttcataacagactcactgaagcaggccgtcggacacgaagctatcaagctgctcgtcaacgtcgacgaggaagattatgaactgggtaggcaaaagttgttgagaaatctcatgctgcaggctctaccttag

SEQ ID NO: 220396 - DNA, 957 bp, synthetic construct
  misc_feature 1..957: note = Description of Artificial Sequence: Synthetic coding sequence
  source 1..957: mol_type = other DNA
atggcaggtctcaaacggagagcctcccaagtttggcccgaggagcacggcgagcaggagcatggcctttactccctgcataggatgttcgatatcgttggaactcacctgacacacagggatgtgagagtgctgagctttctgtttgttgacgtgatcgatgaccatgaaaggggactgattcgcaacggcagagacttcctgctagccttagagaggcaaggtaggtgcgacgagagtaatttccgccaggttttgcagcttttacgcataattacaaggcacgatctgctgccctacgtcacactcaaacgcaggcgcgctgtgtgcccagatctggtggataagtacctcgaagaaacctctattcggtacgtgacgccccgagcgctcagtgaccctgagcctagaccccctcaacccagcaaaacagttcccccacattacccagtggtgtgctgtcctacaagcggcccacaaatgtgttcaaaacgccctgccagaggacgcgctacattggggtcccaacggaaacggaggaagagcgttacccctgatcctaaggagaaacagacctgcgatattcgtttgcgcgtgagagccgaatactgccagcatgagactgctctccagggaaatgtctttagcaataagcaggatcctctcgagaggcagttcgaacggttcaatcaggccaacacgatactgaagtctcgagacctcggtagcattatttgtgacataaagttctctgagctgacataccttgacgcattttggagggactacatcaatgggagcctgttggaggcattaaagggtgtatttattacagactctctgaagcaggctgtcggccatgaagccatcaagttgctcgtgaacgtcgatgaagaggattatgaacttgggaggcaaaaactgttaagaaacctgatgctgcaagccctcccctag

SEQ ID NO: 220397 - DNA, 1917 bp, synthetic construct
  misc_feature 1..1917: note = Description of Artificial Sequence: Synthetic coding sequence
  source 1..1917: mol_type = other DNA
atggacctttggcaattgcttctgactctggctctggccggaagttcggacgccttctctggaagtgaagcaacagccgcaatcctcagcagggcaccttggagtctgcagagcgtaaatcccggtctcaaaaccaatagctccaaagagccaaagttcacaaagtgtcgaagccctgagcgcgagaccttttcatgtcactggaccgacgaagttcatcacggaaccaagaaccttgggccaatacagctgttctacacaaggcggaacacacaggagtggacccaagagtggaaagagtgtccagattatgtctctgctggcgagaactcctgctattttaacagctcgttcacctccatctggatcccgtattgcatcaagttaacctcgaacggcggaacagtggacgaaaaatgcttctctgttgacgaaatagtgcagccagacccacctatcgcactaaactggaccctactcaacgtttctcttaccggaattcacgcagatatccaggtcaggtgggaagccccaagaaacgctgacatccagaagggctggatggtactggaatacgagctccagtacaaggaggtgaacgaaactaagtggaagatgatggacccaatactcactacaagcgttcccgtatactcccttaaggtcgataaggaatatgaagtgcgcgtccgttcaaagcagcgtaattcaggcaactacggcgaattctcagaggtactgtacgtgaccctgcctcaaatgagtcagttcacttgcgaagaggacttctacttcccttggctcctgatcataatctttggcattttcggattgaccgtaatgctgttcgtatttctgttctcgaagcagcaacgaattaagatgctgattctgccaccagtccccgtccctaagataaagggcattgatcctgatctgctcaaagagggaaagttagaagaggtgaacacaattctggctattcatgattcctacaaacctgagttccatagcgacgacagttgggtggagtttatcgaactggatatagatgagcccgacgaaaaaacagaagaatcagacaccgaccgtctgctctcttccgaccacgaaaagtcgcattcgaacctcggggtcaaagatggggactccggtcgaacatcatgctgcgaaccagacatactggagacagacttcaacgccaatgatatccacgaaggcacttcggaagtggctcaacctcaacgactgaaaggcgaagcagacttactgtgcttagaccaaaagaatcagaacaacagtccttaccatgatgcttgcccagctacccagcagccctctgtgatccaggccgagaaaaataaacctcagcctctgcccaccgaaggggctgaaagcacccatcaggccgctcacattcagttgtcaaacccaagttcactctcaaacattgacttttatgcacaagtttccgacattaccccggctggaagcgtggtcctctcccctgggcagaagaataaggccggaatgtcacagtgcgacatgcaccccgagatggtgtcactgtgtcaggagaactttctgatggataatgcatatttctgcgaagctgatgccaagaaatgtatcccagtcgcaccgcatatcaaagtcgagtctcatatacaaccgtcactcaatcaggaggatatatatattaccactgagtcacttaccacagctgccggacgtccgggaacaggggaacatgtgccgggatcggagatgcctgttcccgattatacaagcattcacatcgttcagtccccgcaggggctgatcctcaacgccaccgcccttcccctccccgataaagagttcctgtcctcctgcggatatgtgtctaccgatcaattgaacaaaattatgccatag

SEQ ID NO: 220398 - DNA, 1113 bp, synthetic construct
  misc_feature 1..1113: note = Description of Artificial Sequence: Synthetic coding sequence
  source 1..1113: mol_type = other DNA
atgtttcaggcctctatgcgcagtcccaatatggagccattcaaacagcagaaagtcgaagatttctacgatatcggagaagagctgggctccggacaattcgctatcgtcaagaagtgccgcgaaaagtctacaggcttggaatatgccgcaaaattcattaagaagagacagagtagggcaagcagacgcggtgtgtctagggaagaaatcgagcgtgaggtaagtattttacggcaggtgcttcaccacaatgtcatcactctgcacgacgtctatgagaacaggaccgacgtggttctgatcctggaactcgtcagcggcggagagttattcgatttcctggcgcagaaggaaagcttgagcgaagaggaggccacctctttcatcaaacagatcctggacggagtgaattatctccataccaagaagattgcccacttcgacttaaaaccagagaacattatgctcctggataagaatattccaattccgcacattaagttaatcgactttggtctggcacatgaaatagaggacggcgtcgagttcaagaatatattcggtacaccagagtttgtcgcgcctgagattgtgaactatgaaccgctaggattggaggcagacatgtggtctatcggcgttattacctacattctgctgagcggcgcttcccctttcctgggcgacacaaagcaggaaaccctagcaaacatcactgcggtctcatacgacttcgacgaagagttcttctcacagaccagtgagctagctaaggacttcatccgaaaactgctcgttaaagaaaccaggaaacgacttactatacaggaggcgctgagacacccctggattactccagtagacaatcagcaggccatggtaaggcgagagtctgttgtaaacctcgaaaactttcgaaaacagtatgtgcggaggcgttggaagctgtctttttcaatagtttcattgtgcaaccacctgactagatcgctgatgaaaaaggtacacttgcgccctgacgaagatctccggaactgcgagagcgacactgaggaagacatcgcaaggcggaaggccctgcaccccagaaggagaagctctacctcctag

SEQ ID NO: 220399 - DNA, 1113 bp, synthetic construct
  misc_feature 1..1113: note = Description of Artificial Sequence: Synthetic coding sequence
  source 1..1113: mol_type = other DNA
atgttccaggcatctatgagatccccaaatatggaaccattcaagcagcagaaggtcgaggatttttatgacatcggggaagagctaggatctggccagtttgccatcgtgaagaaatgtcgtgaaaaatcaacgggcttggagtatgctgcgaaatttatcaagaaacggcagagcagggccagtagacgtggagtgagccgtgaggaaatcgaacgggaggtcagcatccttcgacaagtgttgcaccataatgttattaccctccacgacgtatatgaaaatagaacagatgtcgtgctgattctggagcttgtgagtggaggcgaactgttcgacttcttggcccagaaggaaagccttagtgaggaagaggccacttcatttatcaagcagatcctcgatggagttaattatctgcacacgaaaaaaattgctcacttcgatctgaaacccgaaaatatcatgttgctggacaaaaacatccctatcccccatataaagctcattgactttgggttggcgcatgagatcgaggatggggtggagtttaaaaacatctttggaaccccagaatttgttgcgccagagattgtgaattatgagcccctagggttagaagctgacatgtggagcattggcgttatcacatacatcctgctttcgggcgctagcccttttttaggggacactaaacaagaaacgctcgcaaacattaccgcggtgtcttacgatttcgatgaggaattcttctctcagactagtgaactcgctaaagactttatccgcaagctgctggttaaagaaaccagaaagcgtctaactatccaggaagctctgcgccatccctggatcactccagtggataatcagcaagctatggtcaggagggaatctgtggttaacctagaaaattttcgtaagcaatacgtgcgcagaagatggaagttgtcattctcaatcgtctcgctgtgcaaccacctgacacggagcctgatgaagaaagtccatctcagaccagacgaggatttacgcaattgcgaaagtgacaccgaggaggacatcgccaggcggaaggcccttcaccccaggaggcgatcttctacatcctag

SEQ ID NO: 220400 - DNA, 246 bp, synthetic construct
  misc_feature 1..246: note = Description of Artificial Sequence: Synthetic coding sequence
  source 1..246: mol_type = other DNA
atgttccaggcctccatgcggtccccaaatatggagcctttcaagcagcagaaggtggaggacttctacgacattggcgaggagttgggaagcggacaattcgccattgtgaaaaagtgcagggaaaaaagtacggggttggagtatgcggctaagttcattaagaagcgacagagccgcgctagtagaaggggtgtgtcgagagaagaaatagaacgcgaagtaagtattctgcggcaggtctag

SEQ ID NO: 220401 - DNA, 2223 bp, synthetic construct
  misc_feature 1..2223: note = Description of Artificial Sequence: Synthetic coding sequence
  source 1..2223: mol_type = other DNA
atggcaactgcgaattcaattattgtcctggatgatgacgatgaagatgaggccgctgcacaacctggtccttcgcatcctctgcctaatgcagcatccccgggagccgaggcgccatcttctagtgagccacacggagcgcgtgggtcctccagcagtggtggaaagaaatgttataaactcgaaaacgagaaactgttcgaggaatttttggagctgtgtaagatgcagacggccgaccatccggaagtggtgcccttcttgtataaccggcagcagcgggctcactccctgtttttggccagcgcggagttttgtaatattctcagccgggtgttgtctagagcaaggtctaggcctgcaaagttgtacgtttacattaacgagctctgtaccgtgctgaaagcgcactctgctaaaaaaaaattgaacctggcccctgcagcaactacgagcaacgagccatcaggcaataacccccctactcacctgtcactggatccaaccaacgctgagaatacagcttcacagtctcctcgaacccggggaagccggaggcagatccagcggttggaacagcttctcgcattgtatgtggccgagatcaggagactccaggagaaagagttggatctgagtgaattggacgaccctgattctgcttacctgcaagaagccagattgaagaggaagctgatccgacttttcggtcggttgtgcgaactgaaggattgctcatctttaactggcagagttattgagcagcggatcccctacagaggtacgcgctatcccgaagttaatagaagaattgaaaggctgattaacaaaccagggcctgacacatttccagattatggcgacgtactccgcgcagtcgaaaaagctgcagcgcgacacagcctgggcctgccacggcaacagctgcagttaatggcacaagacgctttccgggacgtggggataagactgcaggagcggaggcatctggacttaatttacaactttgggtgtcacctcactgacgattacaggcccggtgtcgatccagccctcagcgacccagtcttggccaggcgccttcgcgagaatcgctccctggcgatgagccgcctggatgaggtaatttccaaatacgccatgctgcaggacaaaagcgaggagggagaacgaaaaaaaagacgtgccagactgcaagggacaagcagccattcagcggatacaccagaagctagccttgactctggtgaaggaccctctggcatggccagtcaggggtgcccctctgcgtctagagcagaaactgatgatgaagatgacgaggagtcggatgaagaggaagaggaggaggaggaagaagaggaggaagaggcgactgatagcgaggaagaggaggacctcgagcaaatgcaggaaggccaggaggacgatgaagaggaagacgaggaggaggaggcggctgcaggcaaggatggcgacaagtcacccatgtcctcactgcaaatatcgaacgaaaagaatctggagccgggtaagcagattagtaggtcctctggggagcagcagaacaagggcagaatcgtgagccctagcctcctgagcgaggagcccctggccccttccagtatcgatgccgagtcgaacggagagcaacctgaggaactgacgcttgaagaggagtcacctgtgtcccaattgttcgaactggaaattgaggcactcccactggacaccccaagctctgtggaaactgacataagctcgtcaaggaaacaatccgaagagccttttaccacagtgcttgagaacggcgctggtatggtttccagtacctccttcaatggtggagtgtcccctcacaattggggcgatagcggccctccctgcaaaaagtcccgcaaggagaaaaagcaaaccggatctggtcctcttggaaatagttacgtggagaggcaaaggagcgttcatgagaagaatggtaagaagatctgcactctgcctagccccccatcacctctggccagtctggcccctgtagcagatagtagcaccagggtcgatagtccctcccatggtctggttacctcgagcctgtgtatcccatcacccgctagactaagtcagacgccacattcacagccacctagaccaggtacgtgcaagacgtctgtcgccacccaatgcgatcctgaagaaattattgttctctctgattcagactag

SEQ ID NO: 220402 - DNA, 2223 bp, synthetic construct
  misc_feature 1..2223: note = Description of Artificial Sequence: Synthetic coding sequence
  source 1..2223: mol_type = other DNA
atggcaacggctaactccattatcgtgctggatgacgatgacgaggatgaagctgctgcccagccgggacctagtcatccccttcccaatgccgcaagccccggtgccgaagcaccctctagttccgagccccacggagcacgcggttctagcagctcaggtgggaagaaatgctataagctagagaatgagaagctcttcgaggaattcctggaactgtgtaagatgcagaccgccgaccacccagaggtggtgccatttctgtacaatcggcaacaaagagcgcactctctgtttttagcctcagcagagttctgcaatatcctgtcccgggtcctgagcagggctaggagcagaccagccaagctgtacgtgtatatcaacgagctttgtacagttctgaaggctcatagcgcgaaaaagaagctgaatcttgctcctgccgcaacaacgtcaaatgagccatctgggaacaatcctccaactcacctgtcccttgatcctacgaatgccgagaacacagcctcacagtcacccaggacacggggaagcagaagacagatccagcggctcgagcaattacttgccctgtatgtggcggagattcggaggctccaggaaaaggaactcgacctgtctgaattagatgatcctgatagcgcttaccttcaggaggccaggttaaaacggaagctcatccgcctgtttggccgactgtgcgaactcaaagactgctctagcctaacaggcagggtcatcgagcaacgtatcccgtacagaggcacacgctaccctgaggttaataggaggatcgagagactaataaataagcctgggcctgacacgttccctgattacggtgacgtgctgagggctgtggaaaaggcagctgcccgacactccctgggcctgccgcgtcagcagctgcagttaatggcacaggatgcatttcgtgatgtcggcataaggctgcaggagaggcgtcatctggacctcatctacaactttgggtgtcacctaactgatgactatcgcccaggggtggaccccgctctgagtgatccagtgcttgcccgtaggctacgggagaatagatctctcgctatgtctaggcttgatgaggttatttccaaatatgcgatgctgcaggataaatcggaggagggggaacgcaaaaagaggcgcgctcgccttcaaggaacctccagtcactccgccgacacaccggaagcctctttggatagcggcgagggtccctctggtatggcttcacaaggatgtcctagcgcaagtagggcagagactgacgacgaggacgacgaggagtctgacgaggaagaagaagaggaagaggaagaagaagaggaggaagccaccgactccgaggaggaggaggacctggagcagatgcaggaggggcaggaagatgatgaagaagaggatgaggaggaggaggcagccgctggcaaggacggtgataagagcccaatgtcaagcttacagatttccaatgaaaaaaatctcgagccaggcaagcaaattagccggtccagtggggaacagcaaaacaaggggaggatcgtgagtcccagcctactgtctgaagaacccctggcgccttcttccattgatgcagaaagtaacggagaacagcctgaagaactaacactggaagaggagtcaccagtcagccagctcttcgaattggaaattgaggcgctccctttagacacaccctcatctgtggagaccgacatcagcagcagcagaaagcaatccgaagagcccttcaccaccgtgctggaaaatggcgcaggtatggtgtcctctacatctttcaacggaggggtgtcgccccacaattggggggactcagggcctccatgtaaaaagagccggaaagagaagaaacagaccggctcgggtccactcggcaattcatacgtggagcgccaacgctctgtgcatgagaagaatggtaagaaaatttgcacattgccctcccctccatcccctctcgcatctcttgcacctgtggctgacagcagtacacgggttgactctcccagccatgggctggttacatctagcctgtgcattccctctccagcgagattaagtcagactccccacagtcagcctcctaggccaggtacttgcaagacatcggttgcaacccagtgtgaccccgaagagattattgtactgagcgactctgactag

SEQ ID NO: 220403 - DNA, 2223 bp, synthetic construct
  misc_feature 1..2223: note = Description of Artificial Sequence: Synthetic coding sequence
  source 1..2223: mol_type = other DNA
atggcaacagctaacagcataattgttctcgatgacgacgacgaagacgaggccgctgcccagcccggtccctcccacccactgcccaacgccgcttcccccggtgccgaggccccatcctcaagcgaaccacacggcgcaagggggtcaagttcatcaggcggtaagaagtgttataagttagaaaacgagaaattgttcgaagagttcttggagctatgcaaaatgcagaccgcggatcatcccgaggtggttcccttcctgtataatcgacagcagcgagcacacagcttgtttctcgcctccgccgagttttgcaacatcttgagccgagtcctgtcccgtgccaggagtcgccctgccaaactgtacgtttacattaacgagctctgcactgtgctgaaagcccactccgccaaaaagaaacttaatctagccccagctgcgactacctctaatgagccgtccgggaataacccgccaacccatttgagtcttgaccccactaacgcagagaacaccgcaagccagtccccacgcacaagaggatctagacgacagattcagaggctggagcagcttctggccctctacgtcgctgaaattcgacgcctgcaggagaaggaactggacctctcagagcttgacgaccccgattccgcgtatctgcaggaggccaggttaaaacggaaactcatcagactgtttgggaggctgtgcgaactgaaagattgctcctctttgactggccgtgtgattgaacaacgaataccctatcgcggaacccggtatcctgaggttaatcggcgaatagagcgtctaattaataaaccgggaccagatacttttccggactatggagacgtcctgcgggcagtggaaaaggccgctgccaggcattccttgggccttccgagacagcagctgcagttgatggctcaggacgcttttagagatgtcgggataagactgcaggaacggcgacacctggacctgatctacaactttggctgtcacttaacagatgactatcggccaggggtcgaccccgcacttagcgatcctgtgctcgcaagacggctccgtgagaataggtctctggccatgagtagactggatgaggttatttccaaatatgcgatgctccaggacaaatcagaagagggagagaggaagaagcggagagcacggctgcaggggacatccagtcactctgcggatacccccgaggcctctctggattccggtgaaggcccttctggcatggcctcccaggggtgcccgagcgcctcgcgtgctgaaaccgacgatgaggacgacgaggaatccgacgaagaggaagaggaggaagaagaggaagaagaagaagaagctaccgacagcgaagaggaagaagaccttgagcagatgcaggagggacaggaagacgacgaagaagaagatgaagaggaagaagccgctgccggaaaagatggggataaatcacctatgtcttccttacaaatctccaacgagaaaaacctcgagcctggcaaacaaatttcccgcagctcaggggagcagcaaaacaagggacgaattgtgagtccaagcctgctgagcgaggagcctctggcccctagcagtattgacgcagaaagcaatggagaacagccagaggagcttacacttgaagaggaatcccctgtctcccagctgttcgagctggagatcgaggccctacccctcgacaccccttcttcagtagagacagacattagttcaagcagaaagcagagtgaggagcccttcactaccgtgctggaaaatggggctggaatggtatcctctacctccttcaacggcggagtgagcccccacaattggggcgattccgggcctccctgtaagaagtctcggaaagaaaagaagcagacaggttctgggcctcttggaaactcttacgtggagcggcagcgctccgtgcacgagaaaaacggaaagaagatttgcacactgccaagtccacccagtccgctggcctctcttgcacccgtggctgacagctcaacacgcgttgactcccctagccacggcctcgtaaccagcagcctgtgtattccatcgcctgccaggctttcacaaacaccccacagtcaacctcccaggcctggcacctgcaagacctccgtggcgacacagtgtgacccagaggaaataattgtactgtctgacagcgattag

SEQ ID NO: 220404 - DNA, 2223 bp, synthetic construct
  misc_feature 1..2223: note = Description of Artificial Sequence: Synthetic coding sequence
  source 1..2223: mol_type = other DNA
atggctacggccaattcaatcatcgtgctcgatgatgatgacgaagatgaagccgcagctcagcccggtccaagccaccccttgcctaacgcggcttctccgggtgctgaggctcccagttctagcgaaccccatggcgcacgcggatccagcagtagcggagggaaaaaatgctacaagctggagaacgagaagctgtttgaagagtttctggaactgtgcaagatgcagactgccgatcatcctgaggtggtgccgtttctgtataataggcagcagcgggctcacagcttgttcctggcctctgcagaattttgtaacatcttaagcagagttctctccagagctcgctctcggcctgccaaactgtacgtgtatatcaacgaactctgcaccgtgcttaaggcccattccgccaagaaaaagctgaatctcgcccctgccgctacaacatcaaatgagccctccgggaataacccgccaacccatttgagcctggacccaacaaatgctgaaaataccgcctctcagtctccccgaacaagaggctcacgcagacaaattcagagactcgagcagctgctggctctgtatgtggctgaaatccgaagactgcaggagaaggagctcgacctgtccgagctcgatgatccagacagtgcatatctccaggaggcacgactaaaaagaaaactcatccgcctttttggccgattgtgcgaattgaaggattgcagttccctgacaggaagggtgatcgagcagagaattccctacaggggtacaaggtaccccgaggtgaatcggagaatcgagcgtcttataaataagcccggtccagacaccttccctgattacggagacgtacttagagcagtagagaaggcggcagcacggcactcactcggccttcccaggcagcagctccagctcatggcccaggatgctttcagggatgtcggaattaggttgcaagaacggcgacatctggaccttatctacaatttcggctgtcacctcacagacgactacaggccgggagtggatccagctcttagtgacccggtgttggccagaagactgagagaaaatcgaagtctcgctatgagcaggcttgacgaggtaatcagtaagtacgctatgctgcaagacaagagtgaggaaggggaacggaaaaaaaggcgcgcaagactccaaggcactagctctcactcagccgacactccagaagcatccctcgattcgggggaaggacctagcggcatggcctcccagggctgcccatccgccagtagagcagaaactgacgacgaggatgatgaagagagtgacgaggaggaagaggaagaagaggaggaggaggaagaggaggccaccgattctgaggaggaagaggatttggagcaaatgcaagaaggccaggaagacgacgaggaggaggatgaagaggaggaggctgcagctgggaaagatggagacaaatctccaatgtcttcactacagataagcaatgagaaaaatctcgaaccaggcaaacagatctccaggtcctccggcgagcaacaaaacaaaggtagaatcgtgagccccagtctcctgtctgaggaaccactagcacctagtagtatcgacgctgaatctaatggggagcagccagaagaactcaccctcgaggaggagagtccagtatctcagctgttcgagcttgaaattgaggcactaccgctcgatactccctctagcgtggagaccgatatctcttcgtctcgtaaacaatctgaggagccgtttactacagtgcttgagaacggagcagggatggtgtcatcaaccagcttcaacggtggcgtttcaccacacaactggggtgactccggcccaccctgtaaaaaaagccgcaaagaaaagaagcaaacaggtagtggcccattgggcaattcatacgttgaaagacagcgttcagtgcatgaaaaaaacgggaagaagatctgtaccctgccttcccctcctagtccgttggcttccctagcaccggtagccgactcctccacccgggttgattctccgagccatggactagtaacctcgagtctgtgcattcctagcccggcacggttatcgcagactccacattcccagccaccacggcctggaacctgcaaaacaagcgtcgcaacccagtgcgatcccgaggaaatcatagtgctcagcgactccgactag

SEQ ID NO: 220405 - DNA, 393 bp, synthetic construct
  misc_feature 1..393: note = Description of Artificial Sequence: Synthetic coding sequence
  source 1..393: mol_type = other DNA
atggccacggcaaatagtattattgtgttagatgacgacgacgaggatgaagctgccgctcagcctgggccatcccatcccctgcctaatgccgcttcacctggggcagaagccccatcaagctccgaacctcatggcgctcgagggtcgtcgtccagtgggggtaagaaatgctataagctcgaaaacgagaaactgttcgaagaatttctcgagctatgcaaaatgcagacagccgatcatcctgaggtcgtccctttcctgtacaacagacaacagagagcacacagcctctttctggcgtcagcggaattttgcaacattttgagcagggtcttgagccgggctcgctcaaggcccgcaaaattgtacgtgtatataaatgagctgtag

SEQ ID NO: 220406 - DNA, 147 bp, synthetic construct
  misc_feature 1..147: note = Description of Artificial Sequence: Synthetic coding sequence
  source 1..147: mol_type = other DNA
atggctactgctaatagtattattgtgctcgatgatgatgacgaagatgaggccgctgcccagcctggccctagtcaccccctaccaaacgccgcaagccctggtgctgaggcccctagttcgagtgagcctcatggcgctcggtag

SEQ ID NO: 220407 - DNA, 393 bp, synthetic construct
  misc_feature 1..393: note = Description of Artificial Sequence: Synthetic coding sequence
  source 1..393: mol_type = other DNA
atggctaccgccaactctatcattgtgctggatgacgacgacgaggatgaagctgctgcccagcctggtccctcccatcccctccctaatgcagcctctccgggagctgaagcaccctcaagtagcgagcctcatggcgcaagagggtcaagttcctcaggtggaaagaagtgctataaacttgagaacgaaaagctgtttgaggaattcctcgagctgtgtaagatgcagaccgcagatcacccagaagtggttccttttctgtacaatcgacagcagagggcccactctcttttccttgcgagcgcggagttctgtaacatacttagcagggtgctcagtcgcgcacgaagccgcccagccaagctttatgtctacattaacgaactttag

SEQ ID NO: 220408 - DNA, 147 bp, synthetic construct
  misc_feature 1..147: note = Description of Artificial Sequence: Synthetic coding sequence
  source 1..147: mol_type = other DNA
atggccacggctaacagcattattgtgctggatgacgatgacgaagacgaggcggcagctcagcctggtccttcccaccctcttccgaacgccgctagccccggtgctgaagccccaagctcaagcgagcctcacggggctaggtag

SEQ ID NO: 220409 - DNA, 537 bp, synthetic construct
  misc_feature 1..537: note = Description of Artificial Sequence: Synthetic coding sequence
  source 1..537: mol_type = other DNA
atggccactgccaatagcattatcgtgttagacgacgacgacgaagacgaggcagctgcccagcccggacccagtcacccgctgcccaacgcagcctctcctggggctgaggcgccttcttcttctgagccccacggagcaagaggcagctcatcaagcggcggaaaaaaatgttacaagctggagaacgaaaaactctttgaggaatttctcgaactgtgcaaaatgcagaccgctgaccatccagaggttgtgccgtttctctataataggcaacagagggcacattccctgtttctggcctctgccgaattttgtaatatcctttctcgcgttctcagtagagcacgcagccggcctgcgaagttatatgtgtatatcaatgagttgtgcaccgttctgaaggcacattccgccaaaaaaaagctgaacctggccccagcagccaccacatctaacgagccaagcggaaataatcctcccacacacttatctctggatcctaccaacgccgagaacactgctagtcaatcatag

SEQ ID NO: 220410 - DNA, 537 bp, synthetic construct
  misc_feature 1..537: note = Description of Artificial Sequence: Synthetic coding sequence
  source 1..537: mol_type = other DNA
atggcaaccgccaactccattatcgtgctggatgacgacgacgaagatgaggcagcagcccaacccggaccgtcacaccctcttccaaacgcagcctctcctggagccgaagcgccttcatcttctgaaccgcacggcgctcggggatccagttcatccggcggtaaaaagtgctacaagttagaaaatgagaagctctttgaggagttcctggagttatgtaagatgcagactgcagatcatcccgaagtagttccttttctctacaacagacaacagagagcgcattctctcttcttggctagtgccgagttctgcaatattctttctagggtgttgtctcgggctaggtcaaggccggctaaattatatgtgtacatcaacgagctgtgtaccgtgctgaaagctcactccgcgaagaagaagctgaacctggcccctgctgccactactagtaatgaaccatcgggtaataatcctcctacccatctctcgctggacccaaccaatgccgaaaacacagcctcccagtcctag

SEQ ID NO: 220411 - DNA, 2223 bp, synthetic construct
  misc_feature 1..2223: note = Description of Artificial Sequence: Synthetic coding sequence
  source 1..2223: mol_type = other DNA
atggccacagcgaattccattattgtgctggacgacgatgacgaggatgaagcggcagcccagccaggcccttcacatcctctgccgaacgccgcttcccccggagcagaggctccttcttcatctgaaccacatggcgcaaggggctccagctcatccggagggaaaaagtgctacaaactcgaaaatgaaaagctatttgaggagtttctggagctttgcaaaatgcagacagctgaccatccagaggtggtgcctttcttgtacaatcgccagcagcgggctcattctctcttcctggcttcagcagagttctgcaatattctcagtagggtgctttcacgggctaggagccgccctgccaagctttatgtgtatattaatgaactttgcacagtgcttaaggcccactccgcgaagaaaaagctgaatttagctcctgccgctacgactagtaacgagcccagcggcaacaaccctccaactcatctgtctctggaccctactaatgctgaaaacactgcatcccaaagccccagaacccgcggttctcgccgacagattcagcgcctagagcagctgcttgccctgtatgtcgctgagatcagacgactgcaggagaaagagttggacctgtccgagttggatgatcccgactccgcatacctgcaggaagctcgcctaaaacgtaagctgattagacttttcggccgtctgtgcgagctgaaggactgctcttctttgactggaagagtaatcgaacaacggattccttacagagggaccagataccctgaggtgaatcggagaattgaacgtctgatcaataagcctggacctgacacctttcccgattacggggatgtactacgggcagtagaaaaagcagcagccagacactccctgggactgccacggcaacaactgcagctgatggctcaagacgctttccgcgacgttgggatcagattgcaggagcgaaggcacctggacttgatttacaattttggctgccacctgactgacgattacagaccaggcgttgatcccgcactgtcagacccagtgttggctaggcgcctgagggaaaatcgaagcctggcgatgagccggttggacgaggtcatttcaaagtatgcaatgcttcaggacaaaagcgaagaaggggaacgcaaaaagcgtcgagccaggttgcagggcacatcctcacatagcgccgacacacctgaagcgtcactcgactccggcgaaggtccttctggaatggcatctcagggctgtccaagcgcatctcgggcagagacagatgatgaagacgatgaggaaagcgacgaggaggaggaggaagaggaagaggaggaagaggaggaggccaccgattcagaagaagaagaggacctcgagcaaatgcaggaagggcaggaggacgacgaagaagaggacgaggaagaggaagcagccgcaggtaaagatggcgataagtctccaatgagctcgttgcagatttccaacgagaagaacttagagccagggaaacaaatcagccggagcagcggagagcagcagaataagggccgaatagtgtcacccagcctcctgagtgaggaacctttggccccatcgagcatagacgcagagtctaatggggagcagccagaagaacttactctcgaagaggagagtccagtttcccagctgttcgagctcgagattgaggcactgcctctcgacacaccaagctccgtggagacagacatcagcagcagtcgaaaacaatctgaggaaccctttactacagtgttggagaacggggcaggtatggtgtcgtccactagttttaacggcggtgtatctcctcataactggggcgactcagggcctccatgcaaaaaatcccgcaaagagaaaaagcagactggctcaggccctttaggtaactcgtacgtcgagcgccagcgatccgtgcatgagaagaacggtaagaagatatgtacacttccgtccccaccgtctccgttggcttccttggctccggtggccgattcaagcacccgagtggacagcccttcccatgggctggtgacaagctctctctgtattccttctcccgctcgtctgtcccagacacctcacagccaaccgccaagaccgggaacatgcaaaacctccgtggctactcagtgtgacccagaggagatcatcgtacttagcgactcagactag

SEQ ID NO: 220412 - DNA, 2223 bp, synthetic construct
  misc_feature 1..2223: note = Description of Artificial Sequence: Synthetic coding sequence
  source 1..2223: mol_type = other DNA
atggccacggccaacagcatcatcgtcctagacgatgacgatgaggacgaggccgcagctcagccgggtccgtcccaccctctacctaacgccgctagtccaggcgcagaggcccctagtagttccgagcctcacggagcccgtggatcttccagctcgggcggaaaaaaatgctacaaactggaaaatgagaagcttttcgaggagttcctcgaattgtgcaagatgcagacggcagatcaccctgaggtggtcccctttttgtacaaccggcagcaacgcgcacacagcttgtttttggcttcagcggaattctgtaacattctcagtagggtcctatctagagcacgttcccgtccagcaaagctttacgtgtacatcaacgagctttgtacggtgttgaaggctcactctgccaagaagaaactgaatctcgcaccagctgctacaacttctaacgaaccatccggaaataaccccccaacccacctgtccctcgatccgacaaatgctgaaaacacggctagccagtcccctcgcactcgaggcagcagacggcagattcagcgcctggaacagttgctcgctctctatgtggccgagatccgaaggttacaggagaaagaactggacctgtccgagctcgatgatcccgactccgcctacctgcaggaagccaggctgaagcggaaactgatccggctatttggcaggctctgtgaactaaaagattgcagctcattaactggtcgcgtcatcgaacagagaattccatacagaggtacaagatatcccgaggtaaatcgaaggatcgagaggttaatcaacaaacctggaccggacacatttccagattacggggacgtgttgcgcgctgtagagaaagctgccgcacgacacagcctgggactcccacgccagcaactgcagctgatggcccaggatgcattccgagatgttgggattagactccaggagaggcggcacttggatctgatctacaacttcggctgtcaccttacggatgattaccgtccaggggtcgaccctgccttgtcagatcctgtgctggctcgacgattgcgggagaacagatcactggctatgtcacgtctggatgaagtcattagtaaatatgccatgcttcaggacaagagcgaggagggagagcgtaaaaaaaggcgggcacggctccagggcacttctagtcacagtgccgatacgcctgaggctagcctggattcgggcgagggaccatccggaatggccagccagggctgcccatcagcctcccgggcagaaactgatgacgaggacgatgaggaatctgacgaggaagaggaggaagaagaagaggaagaagaagaggaggccactgatagtgaggaggaagaggatcttgagcaaatgcaagaagggcaagaggatgatgaagaggaggatgaggaggaagaagccgctgctggaaaggacggcgataaaagcccgatgtctagcttgcaaattagcaatgagaagaatctcgaacccggtaaacagatcagccgctcctctggggaacagcagaataaggggagaatcgtgtccccttcattactctctgaggaaccactggccccatcctcgattgacgctgaaagcaacggagagcagcccgaagagttaactctcgaagaggaaagtcccgtgtcacaactctttgaacttgagatagaggccctcccattggacacgccctcgagcgtggagaccgatatttccagttctagaaagcaatccgaggagccctttacaaccgtgctcgagaacggggcaggtatggtcagcagcactagcttcaacggcggtgtgtccccgcacaactggggtgatagcgggccaccatgcaagaagtcacgcaaagaaaagaagcaaaccggatctggaccactgggtaatagctacgtggaaagacaacgtagcgtacatgagaagaatggaaaaaaaatctgcaccctgccctcaccaccttcacctttagcgagcctcgccccagtggcagatagctcaacccgcgtagattcaccatctcacgggctggtgactagcagcctctgtatcccaagtccggcaaggcttagtcagaccccccactcccagccccctagacctggcacatgcaaaacatcagtagccacacagtgtgatcccgaggagataattgttctctcagattcagattag

SEQ ID NO: 220413 - DNA, 393 bp, synthetic construct
  misc_feature 1..393: note = Description of Artificial Sequence: Synthetic coding sequence
  source 1..393: mol_type = other DNA
atggcaactgccaatagcataatagtgcttgacgatgacgacgaagatgaagccgcagcacagcccggaccctcccaccccctgccaaatgctgcatcgccaggggctgaggcaccctctagtagcgagccacatggcgctcggggtagttcttccagtggcggtaagaagtgctataagctagagaatgaaaaactgttcgaggaattcctggaattgtgtaaaatgcagacagcggaccaccctgaagtcgtgccgtttctttataacagacagcagagagctcatagcttgtttttggctagtgccgaattctgtaacattctaagccgggtgttatcccgcgctcgctcacgaccagccaaactttacgtttatattaatgagttgtag

SEQ ID NO: 220414 - DNA, 537 bp, synthetic construct
  misc_feature 1..537: note = Description of Artificial Sequence: Synthetic coding sequence
  source 1..537: mol_type = other DNA
atggccaccgcgaactccatcatcgtgctggacgatgacgacgaagacgaagccgcagcacagcccggacccagtcaccccttgcccaacgccgcaagtccaggcgctgaggcgccaagttcctcggagccccacggagcccgtggatcaagtagctcaggcggaaagaagtgctataagctagagaacgagaaattgtttgaggagttcctggaactctgcaagatgcaaacagcagatcaccctgaagtagtgccgtttttgtacaaccgccagcaaagggcccattcactgttcttggcttcagctgaattttgcaatattctctcacgcgtgctcagcagggcaaggagcaggcccgcaaagctgtacgtctatataaacgaactatgcaccgttctgaaagcccacagcgcaaagaagaagctgaacctggcccctgctgcgaccacctccaatgaacccagcggcaataatcctcccactcacctgtccctggatcctactaatgctgaaaatactgcctctcagtcctag

SEQ ID NO: 220415 - DNA, 2223 bp, synthetic construct
  misc_feature 1..2223: note = Description of Artificial Sequence: Synthetic coding sequence
  source 1..2223: mol_type = other DNA
atggccactgccaactcaatcatcgtattggacgatgacgacgaggacgaggccgcagctcagcctgggccttcccaccctctccctaatgctgccagtcctggcgctgaggccccttcgagcagcgaaccccacggagccaggggctccagctcttcggggggtaagaagtgctacaagttggaaaatgaaaagttatttgaggagttcctggagctgtgcaagatgcagactgcggaccacccagaggtggtgcctttcctctataacaggcagcagagagcacattcactattcctggcatcagctgagttttgcaacatcctgagcagggttctgagtcgcgcaagatcccggcctgcgaagctctacgtttatataaatgagttgtgtacggtcctgaaagcccacagtgccaaaaagaaactcaacctggcacccgctgctactacctccaatgagccaagcgggaataacccgccaacccatctttccctggacccaacaaacgccgagaacaccgccagccaaagcccaaggactcgcggatcacgcagacagatccagcgcctcgagcaattgctggcactgtatgtggcagagatccgtcgcctgcaggagaaggagttggacctgtctgagctcgacgaccccgactctgcatacttgcaggaggcgcgactcaaaaggaaactgatccgactgttcggccgattatgcgaactgaaggattgctccagtcttaccggcagggttatcgaacagagaatcccttaccggggtacccgctatcctgaggtaaaccgccgtatcgaacgcctgatcaataagccaggacccgacacctttccagattacggcgatgttcttagggcagtcgagaaggcagctgcacgccactcactgggtctacctcggcagcagctgcaactgatggctcaagatgccttcagagatgtgggaatccggctccaggaacggagacacctggacctaatctataatttcggttgccacctgactgatgactatcgccctggagtggatcccgctctgtccgaccctgtcctggccaggagactgagagagaaccggtctctggccatgtcacgtctggacgaggttattagtaagtatgcaatgctgcaggacaagagcgaggagggcgagagaaaaaaaagacgcgcaagactgcagggtacctcatcccatagtgccgacacgccagaggcctccctcgattctggagaaggccctagtgggatggcatcacagggctgtccctcagcctcgagagctgaaacagatgacgaagacgacgaagagagtgatgaagaggaggaagaagaagaagaggaggaagaagaagaggccaccgattccgaggaggaggaagacctggaacaaatgcaggagggccaagaggacgacgaggaggaggatgaagaagaggaagctgcagcaggcaaagatggggataaatccccaatgagttccttacagatctctaatgagaaaaaccttgaaccaggcaagcagatctcccgctcgagcggagagcagcagaacaaaggacgcattgtgagtccaagtcttttaagcgaggaaccattggcccctagttctattgatgccgagtcaaacggcgagcagcccgaggaactcactctagaggaggaatctcctgtgtcccaattgttcgagttggaaatagaagctctgcccctggataccccgtcctccgtggaaaccgacatctcttcttcccgaaagcagtccgaggagccctttacaactgtattagaaaacggcgctggaatggtctcaagcacaagcttcaatggaggcgttagcccgcataactggggggattctggccctccatgcaagaagtccagaaaagaaaagaaacagacgggttccggcccactcggaaactcctacgttgaaagacagcggagcgtgcacgagaaaaacggcaaaaagatatgcaccctgccgtctccgccaagccccctggctagcctggctcctgttgctgattccagtaccagggtagattctcccagccatggtctagtgacatcttcactgtgtatcccaagcccggctcgcctcagccagacccctcattctcagccaccgagacctggaacttgcaaaacgtccgtggccacacagtgtgatccagaagaaattattgtgctcagcgactcagactag

SEQ ID NO: 220416 - DNA, 147 bp, synthetic construct
  misc_feature 1..147: note = Description of Artificial Sequence: Synthetic coding sequence
  source 1..147: mol_type = other DNA
atggccaccgctaatagtattatcgttctcgacgatgacgacgaggatgaggcggctgcacagccaggccctagccaccctctccccaacgcagcctccccgggagctgaggccccatcatctagcgaaccccacggagctcgctag

SEQ ID NO: 220417 - DNA, 393 bp, synthetic construct
  misc_feature 1..393: note = Description of Artificial Sequence: Synthetic coding sequence
  source 1..393: mol_type = other DNA
atggctacagctaactccataatcgtgctagatgacgatgatgaggatgaagccgctgcacagcccggaccaagtcatccactcccgaacgccgcaagcccaggcgctgaggccccttcgagcagtgagccccacggagccaggggaagctcctcctctgggggtaaaaaatgttacaagttggaaaacgagaaactgtttgaagagttcctggaactgtgtaagatgcagactgcggatcacccagaggttgtgccatttctctacaatcgacagcagagggcccacagcctgtttctggcctccgcggagttttgcaacatcctctctagggtcctgagcagggcgagatcacgtccagccaaactctacgtttacatcaatgagctgtag

SEQ ID NO: 220418 - DNA, 537 bp, synthetic construct
  misc_feature 1..537: note = Description of Artificial Sequence: Synthetic coding sequence
  source 1..537: mol_type = other DNA
atggctactgccaatagtataattgtcctggatgatgatgatgaagacgaggcagcagcacaaccgggaccatcgcaccctctcccaaacgccgcatctcctggtgctgaagcgccaagcagttctgagcctcacggcgcacgagggagcagctcttcaggcggtaaaaaatgctataaactcgaaaatgaaaaactctttgaggaattcctggaactatgcaagatgcagacagctgaccacccagaggtcgtgcccttcctctataaccgccagcagcgggctcactctttgtttcttgcctcggccgaattctgcaatatcctttcaagggttctcagtcgcgcacggtcaaggcccgcaaagctgtacgtctacataaacgagttatgtactgttctcaaggcccatagtgccaagaagaagctgaaccttgctcctgctgccacaacatccaatgagccatcaggaaataacccacctacccacttaagtctcgaccccaccaacgcagaaaatacggcctcccagagttag

SEQ ID NO: 220419 - DNA, 2223 bp, synthetic construct
  misc_feature 1..2223: note = Description of Artificial Sequence: Synthetic coding sequence
  source 1..2223: mol_type = other DNA
atggcaactgccaatagcattattgtgctggacgatgacgacgaagatgaggctgcggctcagcctgggccaagccatccacttccaaatgcagccagcccgggagccgaagccccatctagctcagagccacacggggctaggggaagcagcagctctggaggtaagaagtgttacaaactagagaacgaaaaactgttcgaggagttcctggaactctgcaaaatgcagaccgcagatcacccagaagttgtgccgtttctctataatcgccagcagcgcgcacactctctgtttctcgcctccgctgagttttgtaacattttgtccagggtcctgtctagagcaaggtcaagacctgcgaagctttacgtgtatataaacgagctttgtacggtgctcaaggcccactcggcgaagaagaagctcaacttggcgcctgctgctaccacgagtaacgaaccctcaggaaataaccctcctacccatctgtccctggaccctaccaacgccgaaaatacggccagccagtcgccaagaacacggggatcaaggagacagattcagaggctggagcagctgctggccttatacgtggccgagatcaggaggctgcaagagaaggagttggatctgtctgagttagatgatcccgactctgcgtatctccaagaggccaggctgaagcggaaactaattcgattgtttgggagattatgtgaattaaaagactgttcttccctaaccgggcgagtcattgaacagcgcatcccataccggggaactcggtatccggaagtaaataggcggatcgaacgactgatcaataagccgggacccgacaccttccccgattatggtgacgtgcttcgggcagtcgagaaagctgcagccagacactccctcgggttaccccgtcagcagctgcagctgatggctcaggacgcattccgggacgttggaattcggctgcaggagaggcgccatctggatcttatctataactttgggtgccatcttaccgacgattaccgccctggcgtggatcccgctcttagcgaccctgtcctggctcgtagattgcgggagaaccgctccctcgccatgagtagattggacgaagtgatctccaaatacgccatgctacaagacaagtcagaagagggcgaacgcaaaaagcgtcgtgcacgcctgcagggaacgagttcccactcagccgatacaccggaagcttccctggactccggagagggtcccagcggcatggcttctcaggggtgccccagtgcctccagagcagaaacagatgacgaagatgacgaggaatctgacgaggaagaggaggaggaagaagaggaagaagaagaagaggctacagattctgaagaggaagaagacctggagcagatgcaggaggggcaggaagatgacgaggaagaggacgaagaagaagaagctgccgctggcaaggatggggacaaaagccccatgtcaagtttgcagattagcaacgaaaagaatcttgagccaggcaaacaaatttccaggtccagtggcgaacaacagaacaagggaagaatcgtgtccccaagcctgctcagtgaggagcccctggccccaagtagcatcgacgctgaaagcaacggcgaacaacccgaggagcttacgttggaggaggaaagccctgtgtcccagctgttcgagctggagatcgaagctctgccccttgatacgccgtcctctgtggaaactgacatctcgtcttccaggaaacagagcgaagagccgttcactacagtactggaaaacggcgcaggcatggtgagcagcacctcatttaatgggggagtctcaccccacaactggggagactcaggtccaccttgcaagaaatcccgaaaggaaaagaagcagaccggctccggccctctaggcaactcttacgttgagcggcagagaagcgtgcacgaaaagaacgggaaaaaaatatgcaccctaccctcaccgccttccccactggcaagcctcgcccctgtcgcagactcttcaacaagggtcgattcaccatcgcacggcctggtcacttcgtcactctgcattcccagccctgccaggctgagtcagacaccacattcccagcctccccgacccggtacatgcaaaacaagcgtggccacacaatgtgaccccgaggaaatcatagtactcagcgattccgactag

SEQ ID NO: 220420 - DNA, 147 bp, synthetic construct
  misc_feature 1..147: note = Description of Artificial Sequence: Synthetic coding sequence
  source 1..147: mol_type = other DNA
atggctaccgcaaacagcataattgtgctcgatgacgacgacgaagatgaagccgcagcccagcccggaccgtcccacccgctacctaatgctgccagtccaggggctgaggcgccaagctccagtgagcctcatggggcacgatag

SEQ ID NO: 220421 - DNA, 1998 bp, synthetic construct
  misc_feature 1..1998: note = Description of Artificial Sequence: Synthetic coding sequence
  source 1..1998: mol_type = other DNA
atgcagaccgcggatcaccccgaggttgtgccatttctgtacaatcgccagcaacgggctcatagtctttttctagcctctgcagagttttgcaacatactatcccgggtgttgtcccgggcacggagtcgccctgccaaactatacgtgtatattaatgagctgtgtacagtgctgaaggcccactccgccaagaagaagctgaaccttgccccagccgcaaccaccagcaacgagccatctgggaataacccacctacacacctgtccctcgacccgactaatgccgaaaatactgcgagtcagagccctaggacccgcggtagtaggcgccagatccagcgattggaacagttgttagctctttatgtcgcagagattagacgactgcaggagaaagagctcgacctgtccgaattggacgatcctgacagcgcttacttgcaggaagcacgcctgaagagaaaactgatcagactttttgggagactgtgtgagttaaaagattgttcttcgctgactggcagagtcatagagcagcgaataccctacagaggaacgcgctatccagaagtgaacagaaggatcgagcggctgatcaacaagcccggacctgacacctttcccgattacggggacgtcctccgtgcagtggagaaagctgcagctcggcatagtctagggctgccacgccagcagctgcagttaatggctcaagatgcctttcgcgatgttgggattcggctccaggagcggcgacacttggatctaatatataattttggctgccatctaacagacgactaccgtccaggggttgacccggcattgtcggaccccgtactagctagacgcctgcgcgagaaccgctccctcgccatgtcccggctcgacgaggtaatcagcaaatatgcgatgctgcaggataaatcagaagaaggcgagcggaagaagcggcgtgcccgtctgcaggggacaagcagccactctgctgacactcccgaggcgagcctggatagcggggaaggcccttcagggatggcatcacagggctgtcccagcgcgagcagggcagaaactgatgacgaagacgatgaagaaagcgacgaagaggaagaggaagaggaggaggaagaggaggaggaagctactgattctgaggaagaggaagacttggagcagatgcaggagggacaggaagatgatgaagaggaagatgaagaggaagaggccgcagccggaaaggacggggataagagtccaatgtcatcacttcagatctccaatgaaaagaatctcgagcccggtaaacaaatcagccggtctagcggggagcagcagaataaggggcgtatcgtgagcccttcactgctgagcgaagagcccctcgcccctagctcaattgacgccgagtctaatggtgaacaaccagaagaactaaccctggaagaagagagtcctgtatctcaactcttcgaacttgagattgaggcattgccattggatactccttcctctgtggagactgacatatcttcatcccgtaagcagtctgaggaacccttcacaactgtcttggaaaatggagccggaatggtgagttccacatcgttcaacggcggtgtgagtcctcacaattggggcgatagtggcccaccctgcaagaaaagccgaaaagagaaaaaacagacaggcagcggaccgctgggcaactcctatgtggagcggcagcggtccgtccatgaaaaaaacggtaaaaagatttgcacgctcccttcacctccatccccactggcgtctctagccccagtggccgacagctccacaagggtcgactctccttcacacggactggtgaccagctccctgtgtatcccgagtcccgcaaggctttcacagacaccccattctcagcccccacggccaggcacatgtaaaactagcgtcgcgactcagtgtgatccagaagagatcattgtgctgagtgatagcgactag

SEQ ID NO: 220422 - DNA, 1998 bp, synthetic construct
  misc_feature 1..1998: note = Description of Artificial Sequence: Synthetic coding sequence
  source 1..1998: mol_type = other DNA
atgcaaaccgccgatcaccccgaggttgtcccctttttgtacaatcgccagcagagggctcactcactcttcctcgcctcggctgaattttgcaacatacttagccgcgttctgtccagggccagatcccgacctgcgaaattgtacgtgtacattaacgaactttgcacagttctgaaggcacactccgcaaagaaaaaacttaacctagccccagccgcaacaacatccaacgagccctccggcaataatccccctacccatctcagcctggaccccacgaacgccgagaatacagcgtcgcagtctccacgcacccggggtagccggagacagattcagagattggagcagctgcttgccctctacgtagcagagatccgtcgccttcaggaaaaggagctggacctgtctgagcttgacgaccccgattcagcctatcttcaggaggcaaggctgaaacggaaactcataaggctgttcgggcgtctatgcgagctgaaagattgttcatctctcaccggaagagtgatcgaacagaggattccttaccgaggcactcgatatccagaggttaacaggcggatcgagcgcctcattaataaacccggacctgacactttcccagattacggggatgtactaagggctgtcgagaaggccgctgcccgtcacagcctgggcctccccaggcagcagctgcagctgatggcccaggacgccttcagggacgtcggcatccgcttgcaggaaaggagacacctggacttaatttacaactttggctgccatctcaccgacgattatcggcctggtgtggatccagcactgtcggaccccgtgctggcaaggcgccttcgcgaaaatcgcagcctcgctatgagccggctggacgaagtgatcagtaaatatgccatgctccaggacaagtcggaggaaggtgagaggaagaagagaagagcacgcttgcaaggaacgagtagccatagcgctgataccccagaggcttctttagactctggagaaggaccatctggcatggccagccagggctgtcctagcgccagcagagctgagacggatgatgaggacgatgaggagtctgatgaagaagaagaggaagaggaggaggaggaggaagaagaggccacagactccgaggaggaggaggacttggagcagatgcaggaaggtcaagaggatgatgaggaagaggacgaagaagaggaagccgcagcgggaaaagacggggataaatctcctatgagctccctgcagatcagcaatgagaagaacctggaaccaggtaaacagatttcgcggtctagtggcgagcagcagaataaagggaggatcgtttccccaagtctgctcagtgaggaaccactggctccgtcctccatcgacgcagagtctaatggcgagcaacccgaagagctaactttagaagaggaatcaccagttagccagctcttcgagctggagattgaagccctcccattggacaccccatcctccgtcgagactgacatcagtagttctcgaaagcagtccgaagaaccattcacaacggtactcgaaaatggcgcaggaatggtcagctccacaagctttaatggaggtgttagtccccacaactggggggattccggcccaccatgcaagaaaagtaggaaggaaaagaagcagaccgggtctggcccattagggaacagctacgtagagcgtcagaggtccgtgcacgaaaagaatggaaagaaaatctgtacgctgccttcgccacccagccccctggcttcactggcccctgtagccgattcttcaacccgggttgatagtccctcccatggcctcgtcacttcttccctctgcatccccagtccagctagactgagccagactcctcattctcagccacccaggcctggtacctgtaagacttccgtggccacccaatgcgaccccgaagaaattatcgtgctgagcgatagtgattag

SEQ ID NO: 220423 - DNA, 1998 bp, synthetic construct
  misc_feature 1..1998: note = Description of Artificial Sequence: Synthetic coding sequence
  source 1..1998: mol_type = other DNA
atgcagacagctgaccaccctgaagtagtacccttcctctacaatagacagcagcgcgcacattcactctttctcgcttcagcagagttctgtaatatcttaagccgggtcctgagcagagcacgaagtcgcccagccaagctgtatgtgtacatcaatgagttgtgtacagttctgaaggcacattccgcaaagaagaagcttaatctggcccctgctgcaacaactagtaacgaaccctcaggtaacaaccctccaacccatctcagtctggatcctaccaacgccgagaacacagcaagccagtcaccccgaactagaggctctcgcaggcagattcagcgcctggaacagctactcgcactgtatgtggctgagatccggaggctgcaggaaaaagagttagatctgtcagaactcgatgatcctgactccgcgtatctgcaagaggctaggctcaaaaggaaactgatacgccttttcggcaggctctgcgagctcaaggactgttcctctcttactggcagggtaatagagcagaggatcccttaccgcggtaccagataccctgaggtgaacaggcgaatcgaaagattaattaacaagcccggaccagatactttccccgactacggcgacgtgctgagagccgtggagaaagccgctgcgaggcattcacttggattaccgagacagcaactgcagttaatggcccaagacgctttcagagatgtggggattcggctgcaggaaagaagacacctggacctgatatataatttcggatgtcacctgaccgacgattatcggcctggagtagacccagccttgtccgatcctgtccttgcacgcaggttaagggagaatcggagcctggctatgagtcggttggatgaggtcatttcaaagtatgccatgcttcaggacaagtccgaagaaggtgagaggaaaaagcggagagctcggctgcaaggaacaagttcacattctgctgacactcccgaagcctccctcgatagcggcgaagggccatcgggaatggcctcccagggttgcccctcagcttcccgggcagaaaccgatgatgaggatgatgaagagagcgatgaagaagaggaggaggaggaggaagaggaggaggaagaagcgaccgattctgaagaggaggaagacctcgagcagatgcaggagggacaggaggacgacgaggaggaggacgaggaggaagaggctgctgcgggtaaggatggagataaaagcccaatgtcctctcttcagatttctaatgagaaaaatttggagcctggcaaacaaatctctcggagtagtggggagcagcagaataaaggccgaatcgtgtcaccgagcctcctctcagaggaaccactagccccttcctctatcgatgccgaatctaacggcgagcaacctgaagagttgacattggaggaggagtcgcccgtcagccagctgttcgaacttgagatcgaggccctgcccctggacaccccatccagcgtggaaactgacatatcttcgtccaggaagcagtcagaagaaccttttacaacagtgttggagaatggtgccggtatggtgtcgtccaccagtttcaatggtggggtatcaccccacaactggggggattccggccctccctgcaagaagtcacgaaaggagaagaagcagacagggtccggaccattgggaaacagctatgtggaaagacagcgcagcgttcatgagaagaacgggaaaaagatctgtactctgccaagccctccttcaccactggcatcacttgctcccgtggccgattcctccaccagggtggacagtccctcccacgggcttgtgacctcgagcctgtgcattccatcgccagcacgtttaagccaaacccctcattcccagcctccaagacctggcacttgcaagaccagtgtggccacacaatgcgatcctgaagaaatcattgtgctgtcagactctgactag

SEQ ID NO: 220424 - DNA, 1998 bp, synthetic construct
  misc_feature 1..1998: note = Description of Artificial Sequence: Synthetic coding sequence
  source 1..1998: mol_type = other DNA
atgcaaacagccgatcatccagaggtagtgccctttctttataaccggcagcaacgggcacatagtctgttcctggccagtgcagaattctgcaacattctaagccgggtgctgagtagagcaaggtcacgcccagccaaattatatgtctatatcaatgaactgtgcactgtgctgaaagcccattcagctaaaaagaagctgaacctagcaccagctgccactacatcaaatgagccctccggaaataatcctcccacacacctctcactcgaccctaccaatgctgagaacacggcgtctcaatctcccaggactagaggttcacgccgacagatccagcgactcgagcaactcctggccttgtacgttgcagagatccggcgtttgcaagaaaaggaactggacttaagtgagctcgacgacccggacagtgcctacctgcaggaggcccgactgaaacgcaagttaatcaggctttttggccgactgtgtgagctcaaggattgcagcagtctgaccggaagagttatcgaacagcggatcccgtaccggggtactagatatcccgaagtcaatcgcagaatcgagcgcctgattaacaagcctggccctgatacttttcctgattacggcgacgtcttacgagcagtcgaaaaagctgccgctcggcattccctcggactaccccgacagcagctccaactcatggctcaggatgcgtttcgagacgtgggcattaggctgcaagagcggaggcatctggatctgatttataatttcggttgtcacttgactgatgactacagaccgggtgtggatcccgctctgtcagacccggtcttagcacgacggctgagagaaaaccgatcccttgcaatgagccgacttgatgaggtcatttccaagtatgccatgctgcaagataagagtgaggagggagagagaaagaagaggcgggcaagactgcaaggaacatcctcacactctgctgatacccccgaagcctctttggacagtggcgagggtcccagtggaatggcctctcaaggttgccccagcgcctcccgagctgagacagatgatgaggatgatgaggagtcagatgaggaagaagaggaagaggaggaggaagaggaagaggaggccaccgattctgaagaggaagaggatctggagcagatgcaagaaggtcaagaggacgatgaggaggaagacgaggaggaagaggcagcggctggcaaagacggagacaagagccccatgagctccttacaaatctccaacgagaagaatcttgaacccggaaagcaaataagtagaagcagtggcgagcagcagaataaaggacggatagtatctcctagtctgctgtccgaagagcccctggcccctagtagcatcgacgctgagagtaatggggagcaaccggaagaattgacactggaagaggagagcccggtgagccagctgttcgagcttgagattgaggccctgcctctcgatactcctagttctgtggaaacagacatcagttcgtctcgcaagcagagtgaagagccctttaccaccgttctcgaaaacggtgctgggatggtgtcctcaacttcatttaatggaggcgtgagtcctcacaactggggtgattccggacccccttgcaaaaagagtcgcaaagagaaaaagcaaaccggttctggaccactgggcaatagctacgttgaaagacagagaagcgttcacgagaagaatggtaaaaagatatgcacccttccttcacccccaagtcctctcgccagtctcgccccagttgctgactctagtacacgggtagacagtccaagccatgggctggtcacatcttctctgtgtataccttccccggctcgcttgtctcagaccccccatagtcagcctcctagacccggaacctgcaaaactagtgtggctacccagtgcgacccggaagagatcattgtgctgagtgatagcgactag

SEQ ID NO: 220425 - DNA, 1080 bp, synthetic construct
  misc_feature 1..1080: note = Description of Artificial Sequence: Synthetic coding sequence
  source 1..1080: mol_type = other DNA
atgaaagccactataatactgctcctcctggcccaggtctcttgggcgggaccattccagcaacggggtctgtttgactttatgcttgaggacgaggccagcggtattggacccgaagtgccagatgatcgcgattttgaaccttccctgggcccagtttgtccattcagatgtcagtgtcatctccgtgtggtccagtgcagtgacctgggactggataaagtgccaaaggacttaccccctgatacgaccctactcgatttgcagaacaataagataaccgagatcaaagatggggattttaagaacctgaaaaacctgcatgcccttatactcgtgaataacaaaatcagcaaggtatctcccggagcttttacgccactggtcaagcttgagagactgtacctatccaagaatcagctaaaggaactgcctgaaaagatgcccaagacgcttcaagaacttcgagctcatgaaaatgaaatcactaaggtccgcaaggtgactttcaatggtctgaatcagatgatagtgatcgaacttggaacaaatcccttaaaatcttccgggatagaaaacggggcttttcagggaatgaagaagctctcatatatcaggatagcagacactaatataacctcaatcccacaaggactcccacctagtcttactgagctgcacctagacggtaataagatatcccgggttgacgccgcaagcttgaagggtttaaacaacctggcaaagctggggctctccttcaatagtatttcagctgttgacaacggctctcttgcgaacacaccccacctccgagaactacatctggacaataacaagttaaccagagtcccagggggacttgccgagcataaatacatacaggtagtatacctgcataacaataacatttctgtagtcgggagttctgacttctgcccacccggtcacaatactaaaaaggcctcctactcaggagtgagtctgttcagcaatcccgtgcagtattgggagatccaacccagcactttccgttgcgtgtacgtgcggtcagcgattcagctgggtaattacaagtag

SEQ ID NO: 220426 - DNA, 7092 bp, synthetic construct
  misc_feature 1..7092: note = Description of Artificial Sequence: Synthetic coding sequence
  source 1..7092: mol_type = other DNA
atgccagtgctgggcgttgcctctaaattgcgccagcctgcggtaggctcaaaaccagttcatacagcactgccaatcccaaatctggggaccactgggtcgcagcactgctcatcacgacctctggaattaaccgaaacagagagctcaatgctgagctgtcagctggcccttaagagcacctgtgaattcggtgagaagaaacccctacaaggtaaagccaaggagaaggaggatagtaagatctacactgactgggcaaaccactacttggctaagtccggacataaaaggctcattaaagatctccagcaggatattgccgatggtgttttattggcagagatcatacagattattgccaacgaaaaggttgaggatattaacgggtgtcctaggtcacagtctcaaatgatcgaaaacgtggatgtgtgtttgagcttcctggccgcaagaggggtgaacgtgcaggggctatctgccgaagagataagaaacggaaatctcaaggcaattcttgggttatttttctctctttcccgctataaacagcaacagcatcaccagcagcagtattaccaatcattggtagagctgcaacagagagttacacatgctagccccccatcagaagcatcacaagcgaagacacagcaggacatgcagtcttccctggctgcacggtacgcgacacagtccaatcatagcggcattgctacatcgcagaagaaacccaccaggctccctggcccaagcagagtgccagccgcagggtccagttcaaaagtgcagggcgcttccaacctgaatcgtaggtctcaaagctttaactccattgacaagaacaaaccgcctaactatgctaatggaaacgaaaaggacagctccaaaggacctcagagctcttccggggttaacggcaacgtccagccacctagcacggccggtcagccacccgcatctgccatcccctcgccttcagctagcaagccctggagatccaaatccatgaacgtcaaacacagcgctacttcaactatgctaacagtaaagcagtcatccacagccacgagtcctaccccttcctcagaccgactgaaaccacccgtgtccgaaggggttaagacggcacccagcggccagaaaagcatgctcgaaaagttcaagctcgtcaacgcccgtactgcattacgccctccacagccgccaagttccggcccttcggatgggggaaaagatgacgacgccttctccgagtccggggaaatggaaggtttcaactctggccttaactcaggcggaagcaccaactcaagcccaaaagtttctccgaaactggctccacctaaggcgggtagtaagaacttgtctaataaaaaatccctgctgcagcccaaggagaaagaagagaagaacagggacaaaaataaggtgtgcacagagaaaccagttaaggaggaaaaagaccaggttacagagatggcacccaaaaaaacttctaaaattgcctcactgatccccaaggggagtaagaccacggcagcgaaaaaagaatccctgattccttccagcagtgggatcccaaagcctgggtctaaagtccccactgttaaacagaccatcagcccagggtctacggcctccaaagaaagcgagaaatttcgtactaccaagggttcgcctagtcagtccctcagcaagccaatcacaatggaaaaggcatccgcatcatcttgccctgcccctttggaaggaagggaagctggccaggcctcacctagcggatcctgtacaatgactgtcgcacagtcttctgggcagagtaccggtaatggcgctgtccaactgccccagcagcaacaacactctcaccccaatacggcgacagtagcaccgttcatctaccgtgcacactctgagaacgagggaacagccctgcccagcgccgattcctgcacgtctcccactaaaatggatctgagctacagcaagacggccaagcagtgcttggaggaaattagcggcgaagaccctgaaacccgccgtatgcggactgtcaagaacattgctgacttgcggcagaacttagaagagacaatgagttcactccgtgggacacagatttcgcattctacactggagaccactttcgatagcaccgtgactaccgaggtaaacggacgcaccatcccaaacctaacttcgcggccaactccaatgacatggcgcctcgggcaggcttgcccaagactgcaagccggagacgcaccatctctcggggctggttatccaagaagcggcactagcagattcattcacacggacccttcccggtttatgtacacaactccactgagacgcgctgctgtgtctcgcctgggcaacatgtcccagattgacatgtctgaaaaggctagctctgatttggacatgagctctgaggtagacgttggaggctacatgtccgacggagatatcctggggaagtcattaaggaccgatgacattaattccgggtacatgaccgatggaggactaaacctttatacacgaagtcttaaccgtattccagacaccgctacttcaagagatattattcagcgcggagtgcacgatgtgacagtggacgcagactcctgggacgactcttcttccgtctcatccggcttaagcgacacactggacaacatctcaaccgatgaccttaacacgacgagttcggtgagcagctacagcaacatcactgtccctagcagaaagaatacccagctgagaacagactcagagaaacggagtacaaccgatgaaacatgggactccccagaggagctaaagaaacctgaggaagatttcgatagtcacggcgacgctggcggaaaatggaaaaccgtcagctctggcctccctgaagacccagagaaagctggtcagaaggcttctctgagtgtgtcacagacaggctcatggagaaggggtatgagcgcacagggaggcgctccttcacgtcaaaaagcgggaacgtctgctctcaaaacgccaggcaaaaccgatgacgcgaaggcaagcgagaagggcaaagcgccactcaagggatcatccttgcagagaagcccttctgacgccggaaaaagctcgggagatgaagggaagaagcctccaagtggaatcgggaggtcaacagccacaagtagctttgggttcaaaaaaccctcgggagttggctccagtgccatgatcactagcagtggggcaacaatcacatccggaagtgcaaccctgggtaaaataccgaagagcgctgcaattggtgggaagagtaacgccggacgcaaaactagcttagacggaagccagaaccaggatgatgtagtactacacgtaagcagtaaaaccactctccagtaccgcagccttcctcggccatcaaagtcgagtaccagtgggattccgggacggggaggccataggagttcgacctccagtatagactctaacgtgagttcaaagagcgcaggagccaccaccagtaaattaagagagccaactaagataggtagtggacgatcgtcaccggtgaccgttaatcaaaccgataaagagaaagagaaggtcgccgtgagcgactcggaaagcgtatcactcagtggctcacccaaaagttcccctactagcgcctcagcctgcggcgctcagggtctccgacaacccggttccaagtaccctgacatcgcttcccccacttttcgcaggctattcggtgctaaggctggaggaaagtcagccagcgcccctaatacggagggcgtaaaatctagtagcgttatgccctcacctagtacgacactggcacggcaggggtctctggagagcccctcgagcggcacgggatcaatgggctccgccggagggctgagcggaagctccagcccattgttcaataagccctccgatttaaccaccgatgttatctcactcagccactctctggcaagcagtcccgcttctgttcatagcttcacgtctggcggtctggtctgggccgctaatatgtcatcctcctccgcgggatctaaagacactcctagttaccagtccatgacaagcctgcatacctcatctgaatcaattgatttgccactgtcgcaccacggatcacttagtggtcttactacgggaacacatgaggtgcagagtcttctaatgaggaccggaagtgtgcgctctaccctgagcgagagcatgcagctcgataggaatacactgcccaaaaagggtctgcgctatacaccttcttcaagacaggctaatcaagaggaaggcaaagaatggttacgcagtcactcaactggcggactgcaggacacagggaaccagtcgccactggtctcaccttcagcaatgagtagttcagctgccggtaaataccatttttctaacctcgtttctcctaccaatctgtctcaattcaatctcccaggaccatccatgatgcggagtaattcaatcccagcccaggatagtagcttcgatctctatgacgactcccagttatgcgggtccgccactagtctggaagagcggcctcgtgcaatttcacattcaggatctttcagggacagcatggaagaagtccatggaagttctctgagcctcgtgtcctcaacttcctctttatactctactgctgaggcaggcggatctctagagcagatccacaagctgcggagagaactggtggcctcgcaggagaaggtcgcaaccctcacatctcagctgtctgccaacgcccatttagtggcggcatttgaaaagtctctaggaaacatgactggaaggctgcaatctctcaccatgactgctgaacagaaggagtcagaactgatcgaactaagggagacaatcgagatgcttaaagcacagaactccgccgctcaggctgccattcagggggcactgaatggccctgaccaccccccaaaagacctgagaattcggaggcaacactcttcagaaagcgtttcgtcgatcaattcagctacctctcactcctccataggttcgggaaacgacgccgatagtaagaaaaaaaaaaagaagaattgggtgaactcgaggggcagtgagttgagatcttctttcaagcaggctttcggcaagaagaaatctacaaaaccaccttccagccattcagacatagaggagctgaccgacagtagcttgccagcgtctcctaagctaccacataatgccggagattgtgggtccgcatccatgaaaccctcccaaagcgccagcgccatttgcgaatgcaccgaggccgaagccgaaatcattctgcagctcaagtcagagctacgcgagaaggaactgaaacttaccgacatccgtctggaggctctgtcatccgcacaccatctggatcagatcagagaggctatgaaccggatgcagaacgaaatcgaaattttgaaggctgaaaacgatagactcaaggccgagactgggaacactgcaaaaccaaccaggccgccatcagagtctagctcctccacttcatccagcagctcacgccaaagcctcggtctttccctcaataatctcaacatcacagaggcagtgtcgagcgatatcctccttgacgacgcgggagatgcaaccgggcataaagatggacgatctgttaaaatcatcgtgtccatctccaagggttacggtagggctaaggaccagaaatcacaagcctatctgattggaagcatcggcgtgtccgggaagactaagtgggatgtgttggacggggtcatcagaaggctgtttaaagaatacgtgtttaggatagacacgagtacctcactcgggctctcttcggattgcattgcctcctattgcatcggggacttgattaggagtcataatctagaggtgcccgagctgcttccctgcggttatctcgttggcgataataatatcattacagtgaaccttaaaggcgtggaagagaactcactggactccttcgtgtttgataccctgatacccaaaccaatcacccagagatacttcaatctactgatggaacatcaccggatcatcctttcagggccatctggaacaggtaaaacgtacttggctaataagctggctgagtacgtgatcacgaagagtggtaggaaaaaaacagaagacgctatcgctacattcaacgttgaccataagagtagcaaggaactgcaacagtatttagcgaaccttgctgaacagtgttcggctgataataacggagtggaactgcccgtcgtcattatcctggacaacctgcaccatgttggaagcctgtctgacatctttaatggatttctcaactgtaaatataataagtgcccctacattattggcactatgaatcagggcgtgtcatcctctcccaacttggagctgcatcacaatttccgctgggtgctttgtgccaatcataccgagccggtcaagggattcttggggagatatcttcgcagaaagctgatcgaaatcgaaatcgagcgaaatattcgcaacaatgatctggtgaagataatcgattggatacccaaaacgtggcatcacctgaactccttccttgaaacacacagcagttcagacgtaaccattggccctcgccttttcctcccatgccctatggacgttgaaggaagcagagtgtggtttatggatctctggaactactcccttgtgccctacatcctggaggctgtgcgggaggggttacagatgtatgggaagcgaaccccttgggaggatccttctaaatgggtgcttgatacctacccttggtcaagcgccactctgccccaggagtcccccgctctcctgcaactaagacccgaagatgttggctatgaatcctgtaccagcaccaaagaagcaacaacgagcaaacacatcccgcagaccgacacagaaggtgatcccctaatgaacatgctaatgaagctgcaagaggcagctaattattcctctactcaatcttgcgattcagaaagtactagccatcacgaggacatactcgactcatcgttagagtctaccctctac

SEQ ID NO: 220427 - DNA, 519 bp, synthetic construct
  misc_feature 1..519: note = Description of Artificial Sequence: Synthetic coding sequence
  source 1..519: mol_type = other DNA
atgaaggccaccatcattctcctgttactcgcccaggtgtcgtgggcgggtcccttccagcagagggggctctttgactttatgcttgaggatgaggcgtctggtatcggcccagaagttcccgacgacagagatttcgaaccttccctcggcccagtgtgtccttttagatgccagtgtcacctgcgcgtggtgcaatgcagtgatctgggcctagataaggtgcccaaagaccttccaccggatacgactttgcttgacctccaaaataataagatcacagagatcaaagacggcgatttcaagaacctcaaaaatctgcacgtggtctatctgcataataacaatatcagtgtcgtgggttcatctgatttctgtccaccaggccataatacgaagaaagcttcttacagtggagtctcattgtttagcaatccagtccaatactgggaaattcagccctcaacctttcgttgtgtatacgtgcgttcagccatccagctggggaactacaagtag

SEQ ID NO: 220428 - DNA, 1080 bp, synthetic construct
  misc_feature 1..1080: note = Description of Artificial Sequence: Synthetic coding sequence
  source 1..1080: mol_type = other DNA
atgaaggccaccattatcctcctgcttttggcccaagtctcatgggccggacctttccagcagagaggcctgttcgactttatgctggaagatgaggcgtccgggatagggcctgaagtgccagatgatcgcgatttcgaaccatcccttggccctgtatgccccttccgatgtcagtgtcacctgagggtcgtgcaatgcagtgacctcggactggacaaggttcccaaagatctgcctcctgatacaacacttctggacctgcaaaataataaaataaccgaaatcaaggatggtgacttcaagaacctgaagaatctccacgcactcattctcgtcaacaacaaaattagcaaggtgagcccaggagccttcacaccattagtgaagctagaacggctgtacttatccaagaaccaacttaaagagctcccggagaaaatgccaaagacacttcaggaactcagagcacacgagaacgaaattactaaagtgaggaaggtgacgtttaacgggctcaaccaaatgatcgttattgagctgggcaccaaccccctcaaatcgagcggcattgagaatggggctttccagggaatgaaaaagttgagttacatccgaatcgcggataccaatattacctccatccctcagggcttgcctccgagtctcaccgaactgcatctggacggcaacaagatctccagggtggatgccgctagcctgaaagggctaaataacttagccaaactcggcctttcattcaactccataagcgctgtcgacaacggtagtttggctaacacaccgcacctaagggaactccatttggacaacaacaaattaaccagagtccccggaggactggcagagcacaagtatattcaagtggtataccttcataacaacaacatatccgtggtgggttcctccgacttctgtccgccaggccataatactaagaaggcatcatatagcggagttagcctgttttccaaccctgtacagtattgggagatacagcccagcactttcaggtgtgtgtacgttagatctgctattcagttaggtaactacaaatag

SEQ ID NO: 220429 - DNA, 753 bp, synthetic construct
  misc_feature 1..753: note = Description of Artificial Sequence: Synthetic coding sequence
  source 1..753: mol_type = other DNA
atgaaggcaacaattattctgctcctcctggcccaggtctcctgggctggaccatttcaacagcggggactctttgatttcatgctggaggacgaggcatccgggattggacctgaagtaccagacgaccgcgattttgaaccatcccttggcccagtttgtccttttcgctgtcagtgtcatctgcgcgtggtccagtgcagcgaccttgagttgggtactaacccgctaaagagttcgggcatcgaaaatggcgcatttcaaggcatgaagaagctcagttacatcagaatagccgatacaaatattacctcaattccacagggccttccacctagtctgactgagctgcacttggacggaaataagatttctagagtggatgcagcatctttgaaaggcctgaacaatttggcgaagttgggtctgtcctttaattccataagtgccgtggataatggctctctggccaataccccgcacttgcgtgagcttcacctggacaataacaagttaactagggtaccagggggattggccgaacacaaatacatacaagttgtatatctgcataataataatattagtgtggtgggctcttcagatttctgccctcctggtcataatacaaagaaggcatcctattctggcgtatccttattttcaaatcctgtgcaatactgggaaatccaaccttcaacttttagatgcgtgtacgtacgttcagcaatccagcttggaaactataaatag

SEQ ID NO: 220430 - DNA, 639 bp, synthetic construct
  misc_feature 1..639: note = Description of Artificial Sequence: Synthetic coding sequence
  source 1..639: mol_type = other DNA
atgaaggctacaatcattttgctcctactggctcaggtttcttgggcgggtccattccaacagagaggcctgttcgacttcatgttagaagacgaggcatcaggcattggccctgaagtgccagatgaccgcgactttgagccaagtctgggtccagtgtgtccttttaggtgccagtgccacctcagggtcgtgcagtgctcagacctcggactgcccccatcactgacagaactgcacctggacggtaacaaaatctcacgcgtcgacgccgcatccttaaaaggacttaacaatttagccaagctgggcctgtccttcaacagtatcagtgctgtggacaacggatctctggccaacactccgcatctgagagagcttcatcttgacaacaataagcttacccgggttcccggagggctggctgagcacaagtacatccaggtcgtgtacctccacaataataatattagcgtcgttggctcatctgatttttgtccccctgggcataatactaagaaagcctcctatagcggcgtctctttgttcagcaaccctgttcagtattgggaaatccagcccagcacctttaggtgcgtatacgtgagatccgctatccagctgggaaattacaagtag

SEQ ID NO: 220431 - DNA, 519 bp, synthetic construct
  misc_feature 1..519: note = Description of Artificial Sequence: Synthetic coding sequence
  source 1..519: mol_type = other DNA
atgaaggcaaccatcatcttattactgttagctcaggtgagctgggccggtccattccagcagaggggactattcgacttcatgttggaggatgaagcctctggaattggaccagaagtacctgatgatcgggacttcgagcccagcctgggcccagtgtgtcctttcagatgccagtgccatctccgcgtcgtccagtgctctgatcttggccttgacaaggttcctaaggatctgccccctgatacaacactgttagacttgcagaataacaaaatcaccgagatcaaggacggtgacttcaagaatttaaaaaacttacacgtggtctatctgcacaacaataatatttctgtcgtggggtccagtgatttttgcccgcctggccataatactaagaaagccagctacagcggggtgagcctgttctctaatccggttcaatattgggaaatccagccaagcacttttcgctgcgtgtacgtaagaagcgcaattcagttggggaactataagtag

SEQ ID NO: 220432 - DNA, 228 bp, synthetic construct
  misc_feature 1..228: note = Description of Artificial Sequence: Synthetic coding sequence
  source 1..228: mol_type = other DNA
atgaaagccacaattatcctgttactattggcacaggtgtcctgggctgggcctttccagcagcgtggtctcttcgatttcatgttagaggacgaagcctctggcattggcccagaagtcccagacgaccgagacttcgagccttctctgggaccagtgtgcccatttcgctgtcagtgccacttacgggttgtccaatgctccgacctgggctgtctgccctcctag

SEQ ID NO: 220433 - DNA, 639 bp, synthetic construct
  misc_feature 1..639: note = Description of Artificial Sequence: Synthetic coding sequence
  source 1..639: mol_type = other DNA
atgaaagcgaccatcattctcctcctgctagcacaggtctcttgggcaggcccttttcagcagcgcggactctttgatttcatgctggaggatgaggcatcggggataggccctgaggtgcctgacgatagagattttgaaccctctctcggcccagtttgtcctttcaggtgccaatgccatctgcgagtggtgcaatgttcagatctaggtttaccaccttcccttactgagctgcatctagatggtaacaagatttctagagtggatgctgcttcactgaaagggttaaacaaccttgccaagcttggcctgtcctttaacagtattagtgccgtggataacggatctctcgctaacactccgcatttgcgggaactccacctcgacaataataagctgacaagggtccctggcggtctcgcggaacataaatacatccaggtggtgtatctacataataataatattagtgtcgttgggtctagcgacttctgcccaccaggacataacacaaagaaagcttcttacagtggagtttccctattttcaaaccccgttcagtactgggagattcagccgtccacctttaggtgcgtgtacgtcagatcagccatccaactggggaactataagtag

SEQ ID NO: 220434 - DNA, 540 bp, synthetic construct
  misc_feature 1..540: note = Description of Artificial Sequence: Synthetic coding sequence
  source 1..540: mol_type = other DNA
atgaaggccacgattattctgctgctattggctcaggtaagctgggctggcccttttcagcagcgaggccttttcgactttatgctggaggacgaggcctctggaatcgggccagaggtgcctgatgaccgggacttcgagccatctttaggtcctgtgtgtccatttcgctgtcagtgccacctccgagtggtgcagtgttctgatctcggactggacaaggtccccaaagatttacctcccgataccacactgctggatctgcaaaataacaaaattacagagataaaggatggagatttcaagaatctcaaaaatctgcacgcgctgatactggtgaataacaaaataagcaaggtctcgccaggtgcttttactcctctggtgaaactggagagactgtaccttagtaagaaccaactaaaagagctgcccgagaaaatgccgaaaacccttcaggaattacgtgctcatgagaacgaaattaccaaagttaggaaggtgactttcaatggtctgaatcagatgatcgttatctag

SEQ ID NO: 220435 - DNA, 360 bp, synthetic construct
  misc_feature 1..360: note = Description of Artificial Sequence: Synthetic coding sequence
  source 1..360: mol_type = other DNA
atgaaggccactattattctcctgctcctggctcaggtctcctgggccggacccttccagcaaagaggtttgtttgacttcatgcttgaggatgaggcctctggcattggaccagaagtccctgacgatagggattttgagccttcactgggacccgtttgtccttttcggtgccagtgccacctgagggtcgtgcagtgctccgacctgggactcgacaaggtgccaaaggacctgcctcccgatactactctactggacctccagaacaataaaattacggagatcaaagatggagattttaagaatctcaaaaatctacatgcgctcatcctggtgaacaataaaataagtaagtag

SEQ ID NO: 220436 - DNA, 525 bp, synthetic construct
  misc_feature 1..525: note = Description of Artificial Sequence: Synthetic coding sequence
  source 1..525: mol_type = other DNA
atgaaagccactatcattctgctattgcttgcgcaggtgtcctgggcaggcccttttcaacaaagaggactcttcgactttatgttggaggacgaggcatccggaatcggccctgaagtcccggatgacagggatttcgaaccctccctagggcctgtgtgtccattccgctgccagtgccatctccgcgtcgtccagtgcagcgacctggggctcgataaggtgccaaaagacctgccacctgacactacactgcttgaccttcagaataataagataaccgaaattaaagacggagatttcaaaaatcttaaaaacttacatgcactcattttggtaaataacaaaatcagtaaggtgagccctggtgccttcacccccctggtgaagttagaacggctgtacctatccaagaatcaacttaaagagttgccagaaaaaatgccgaaaacactacaagaattacgggcacatgaaaatgagattactaaggtgcgtaaagtcacctttaatggattgaattag

SEQ ID NO: 220437 - DNA, 537 bp, synthetic construct
  misc_feature 1..537: note = Description of Artificial Sequence: Synthetic coding sequence
  source 1..537: mol_type = other DNA
atgaaggctactatcattctcttactcctggcgcaggtttcttgggccggtccttttcagcagagaggacttttcgacttcatgcttgaggatgaggcaagtggaatcggccctgaagtgcccgacgatcgggatttcgagccctcgctcggccctgtttgtcccttcagatgccagtgccacctccgagtggtgcaatgctcagacctgggactggacaaggtgcctaaagacctaccaccagatactacactcttagatctgcagaacaacaaaatcacggagattaaagatggtgatttcaagaacttgaagaatcttcatgccctgatattagtgaataacaaaatatccaaggtctcccctggcgcttttaccccactggtgaaactggaacgcctctacttatcaaaaaaccagttgaaagagcttcctgaaaagatgccaaagacccttcaggaactcagggcacacgagaacgagatcactaaagtgcgcaaggtgacatttaacggcctgaaccagatgattgtttag

SEQ ID NO: 220438 - DNA, 1080 bp, synthetic construct
  misc_feature 1..1080: note = Description of Artificial Sequence: Synthetic coding sequence
  source 1..1080: mol_type = other DNA
atgaaggccactataattctgctgctgttagcacaggtctcctgggctggccctttccagcagaggggactctttgacttcatgcttgaggatgaggctagtggtatcggtccagaagttcctgatgaccgagactttgagccgagcctggggccagtatgtccatttcgctgccagtgtcacctcagagtggtgcagtgcagcgatctcggacttgacaaggtaccaaaggacctgccaccagatacgaccctgctggatcttcaaaacaataagatcacagaaattaaagacggggacttcaaaaatttgaaaaacctccacgctcttatccttgttaataataaaatttccaaggtgtctcccggtgcttttacccccctggtaaagctcgagcggctgtatctgtcaaagaaccagcttaaggagctgcctgaaaaaatgcccaagacacttcaggagctgagagcgcatgaaaatgagattaccaaggtccgcaaggtgacattcaatggccttaatcaaatgatcgtgatagagctaggaaccaatccactgaagtcctcgggtatcgagaacggggcttttcagggaatgaagaagctctcttacattagaatcgccgatacaaatatcactagtatccctcagggtctgcccccttcactcaccgagcttcacctggacggtaacaaaatcagtagggtggacgctgcgtctttgaaaggactgaacaacctcgccaaactcggactctcttttaatagcattagcgcggttgataatggatctctggcaaacacgcctcacttgcgcgaattgcatcttgataacaacaaattgactcgggtccctggaggactagccgagcacaagtacatacaggttgtgtacctgcataacaacaatataagtgtggtggggtcctcagacttttgcccaccgggtcacaatacaaaaaaggcctcatactcaggcgtttctctgttctccaatccagtgcaatattgggagattcagccatctacatttcgctgtgtgtacgtccgaagtgccatacagctgggcaactacaagtag

SEQ ID NO: 220439 - DNA, 5598 bp, synthetic construct
  misc_feature 1..5598: note = Description of Artificial Sequence: Synthetic coding sequence
  source 1..5598: mol_type = other DNA
atgacgcggtgggtgccgactaaacgggaggagaaatacggagtggctttttataattatgacgcacgcggagcagacgagttgtctctgcagattggcgatactgtgcatatcctcgaaacctatgaggggtggtacaggggatacaccctcagaaagaaaagtaaaaaagggatcttccctgccagttatatccacttaaaggaggccatcgtggagggtaaaggccagcacgagaccgttatccctggagatttacctctgatacaggaggttactaccactttacgcgagtggtccacgatctggagacagctgtacgttcaggataatcgagaaatgttccgctccgtgcggcacatgatttatgatctgatcgagtggagaagccagattctgagcggaactctcccacaagatgagctgaaggagctcaaaaagaaggtcaccgctaagattgactatggcaacaggattctcgacctggatcttgtggtgcgagacgaagatgggaatattcttgatccagagttgacatccaccattagcctgttccgcgcacacgagattgccagcaagcaagttgaagaaaggctgcaagaagagaagagtcagaagcagaacatcgacataaaccgccaggccaaattcgctgccacaccaagcctggcgctgtttgtaaacttgaagaacgttgtatgcaagatcggcgaagatgccgaggttctgatgagcctgtacgaccccgtggaatccaagttcattagtgaaaattatctggtcaggtggagctcgagtggtctcccaaaggacatcgatcgactgcataacctgagagcagttttcaccgacctggggagtaaagacttaaaacgtgaaaaaatcagtttcgtgtgtcaaatagtaagagttggaagaatggagctgcgtgacaacaacacacggaagctaacttctggtctcaggcgaccttttggagtcgctgtgatggacgtcactgatatcatcaatggcaaggttgacgacgaggacaaacagcactttattccatttcagccagtggcaggggaaaatgacttcttgcaaacagttatcaataaagttatcgccgcaaaagaagtcaaccacaaggggcaagggctctgggtgacattgaagttactaccaggtgacattcaccagatccggaaagaatttcctcatttggtagaccggacaaccgcagtcgccaggaaaactgggttcccagagattataatgccaggtgatgtgcggaacgatatctatgtcacactggtgcagggcgattttgacaagggatctaagacaaccgccaagaacgtggaggtgaccgtgtcagtctacgatgaagacggaaaacggctggagcatgtgatattcccaggcgctggcgatgaagctatctctgagtacaaatctgtgatctactaccaggtaaagcagcccaggtggtttgagacggtcaaggtggccatccctattgaagatgtgaaccggtcccacctgcggttcacctttcggcacaggtcttcacaggatagcaaggataaaagtgagaagattttcgccttagcctttgtgaaactcatgcggtacgatggcactacacttcgagacggagaacacgatctcattgtttacaaggccgaggctaaaaaactcgaggatgctgctacttatctctctctgcctagtacaaaggctgagctcgaggaaaagggtcacagcgcgacgggaaaaagtatgcagtcactgggtagctgcacaataagcaaggactcattccagatcagcaccctcgtgtgttcaacaaagttgacccaaaatgtggacctgttgggcttgctgaaatggcgctcaaatacatcgctgcttcagcaaaacctgaggcagctgatgaaagttgacggcggtgaagttgtcaagttccttcaggataccctggatgccctcttcaacatcatgatggagaacagcgaatcggagactttcgataccctagtgttcgacgctctggttttcatcataggactgattgcagacaggaaattccagcacttcaaccctgttctggagacatatataaagaaacatttttcagccaccctggcctacacaaagctaaccaaggtgttgaagaactatgtagacggagccgaaaagccaggagtgaacgaacagctctacaaagccatgaaagcattggaatccatttttaaattcattgtgaggagccgcattttgtttaatcaactctacgaaaacaagggggaggctgactttgtcgagtcactcctgcagctgttccggtccattaacgatatgatgagctccatgagcgaccagacagtacgcgtgaagggcgcagccttgaaatacctgccgacaatcgtgaatgacgttaagttggtgtttgacccgaaagagctgtccaagatgtttacagaatttatcttaaacgtccccatggggcttcttaccatacagaaactgtactgtcttatagagatcgttcatagcgatctgttcacccagcatgattgccgggagatactactgcctatgatgacggatcagctcaagtaccacttggaaaggcaggaagatctggaagcgtgctgccaactgttaagccacattttagaagtcctttaccggaaagacgtcggtcctacccagcggcacgtacaaatcattatggaaaaactgctgcggaccgtgaatagaacggtgataagtatgggcagggacagcgagctaatagggaacttcgttgcatgcatgactgccatacttcggcagatggaagactaccactacgctcaccttatcaagacttttgggaaaatgcggacagatgtggttgatttcctgatggaaacatttatcatgttcaagaaccttatcggcaagaacgtttacccctttgactgggtgattatgaacatggttcaaaacaaagtttttttgcgcgcaattaaccaatacgctgacatgctcaacaaaaagtttcttgaccaggccaattttgaactgcagctttggaacaactatttccaccttgcagtagccttccttacacaggaaagtctacagctagaaaatttctcatcggccaaaagagctaagattttgaataagtatggcgacatgagaaggcaaatcggctttgagatcagggatatgtggtacaacttaggccagcacaaaataaaatttatccctgagatggtcggacctatcttggaaatgaccttgatccccgagacagagctgcgcaaagccactatcccaatttttttcgacatgatgcagtgtgagtttcattctacaagaagtttccaaatgtttgagaacgaaattattacaaaactggatcatgaggtggagggtggcaggggagacgagcagtataaagtgctgtttgacaagatcttgctggagcactgccgcaagcacaaatacctcgcaaaaaccggcgagacattcgtaaaacttgtggtgcgacttatggaacggctgcttgattatcgaacaatcatgcacgatgaaaataaagaaaataggatgtcttgcacagtcaatgtgctgaacttttacaaggaaatcgagagagaggaaatgtacatccgctacctatataagctctgcgatctacacaaggagtgcgataactacaccgaagcagcgtatactcttttgctgcatgccaaactgttgaagtggtcggaagatgtgtgcgtcgctcaccttacgcaaagagatggctaccaggctaccacgcaggggcagctgaaagagcagctgtatcaagaaataatccactactttgacaagggcaagatgtgggaggaggctatcgcgctgggaaaagaactcgctgagcagtacgaaaacgagatgtttgattatgaacagctgtctgagctgctcaagaagcaggcccaattttacgagaatatagtgaaggttatacgcccaaagcccgactacttcgccgtgggctattatggacagggattccctactttcctgaggggaaaggtttttatctacaggggcaaggaatacgaaagaagagaagacttcgaggccagactgctgacccagtttcctaacgccgagaagatgaagaccacaagcccccctggcgatgacataaagaactctcctggacagtacattcagtgtttcactgttaagcctaagctggatctgcctcccaaatttcaccgcccagtgtccgagcaaatcgtgagcttctaccgcgtcaatgaggttcagcgcttcgagtatagcaggccaattcgtaaaggcgagaaaaatcctgataatgagtttgcaaacatgtggattgaaagaaccatctatacgaccgcatataaactcccaggtatcttacgctggtttgaggttaaatcagtgttcatggttgagatatcacctctagagaatgctattgagaccatgcagcttactaatgataagatcaacagtatggtacagcagcatctggatgatccctcactcccaattaatccactcagtatgttgctgaatgggatcgtggacccagcagtgatgggcggattcgccaattacgagaaagccttttttaccgaccgttatttacaggagcacccagaagctcacgagaagatcgagaagctgaaggacctgattgcatggcagatccccttcctcgccgagggcatccgaattcacggtgataaggtgaccgaagcccttaggccctttcacgaaaggatggaagcatgcttcaagcagttgaaagaaaaagtcgaaaaggagtatggggtcagaatcatgccgtcatccctggatgaccgcagaggctcccgcccaagaagcatggtgcggtcctttactatgcccagctcaagccgcccactctctgttgcctccgtgtcctccctctctagcgatagcactcctagccggccagggagcgatgggtttgcactagagcctctgctgccgaaaaaaatgcacagtagatctcaggataagttagacaaggacgatcttgagaaggaaaagaaggacaagaaaaaagagaaaagaaatagcaagcaccaggaaatattcgagaaagaattcaagcctacggacatctccctgcagcagtcggaagccgtcatattgtccgagaccataagtcctctccgtccccagcgccctaagagccaagttatgaacgttatcggctcggaacgtaggttctccgtgtcccctagctctcctagctcccagcaaacaccgcctcccgtgacacccagggcgaagttatcattcagcatgcagagctcacttgaattaaacggtatgacgggcgcagatgtcgccgacgtgcctccaccactgccattaaagggaagcgtggcggattacgggaatttaatggagaaccaagatctacttggcagccccactccccctcctcctcctccgcatcaacgccacctgcctcctccacttccttcaaaaaccccaccccctccccctcctaagacaaccagaaagcaggcctccgtggactccgggatcgtgcagtaa

SEQ ID NO: 220440 - DNA, 6561 bp, synthetic construct
  misc_feature 1..6561: note = Description of Artificial Sequence: Synthetic coding sequence
  source 1..6561: mol_type = other DNA
atggccggtgaacgcacacggcgatttacccgaagtctcttgcgtccgggtcaggcagcagagctcagacactccgccgcttccgcagctgccgtggcagtgtcctcgagacagcagcagcggcaggaaaaaccccgtctgctcgaacctctggattacgagacagttatagaagagctagagaagacctacaggaacgatcctttacaggacctgctgtttttcccatccgatgatttctccgccgcaactgtgagttgggatatccgaacactgtatagcacagtgccggaagatgctgagcacaaagcagagaatcttctggtgaaagaggcttgtaagttctactccagccaatggcatgtcgtcaattacaagtatgaacaatattctggcgacatacgacaactgcctcgcgctgaatacaaaccagaaaagctcccatcccacagcttcgagatcgaccacgaagatgctgataaagacgaggacacaacttctcactccagctccaagggcggtggtggagcgggaggaacaggcgtatttaaaagcggttggctgtacaagggaaactttaactccaccgtgaacaacacagtcactgtacggagctttaagaagaggtattttcagctgactcagctccccgataacagctacatcatgaatttctataaagatgaaaaaatcagcaaggagcctaaaggctgtattttcctcgactcttgcaccggcgtcgtccagaacaataggctgcgcaagtatgcttttgagttgaaaatgaacgacctaacctactttgtcctcgccgctgaaacggaaagtgacatggatgagtggattcatactctaaacagaatcctccagatcagcccagaaggtccactccaagggagacgttccaccgaattgactgatctgggactcgattcgctggataactcagtcacttgtgaatgcactcccgaggagaccgatagcagtgagaacaacttgcacgctgactttgctaagtatttgactgagacagaggatactgttaaaacaaccaggaatatggaacgcctaaacttgttctcacttgatcccgatatcgacacgctgaaactgcagaaaaaggacctcttagagcctgaaagcgtcattaagccatttgaggaaaaagcagcaaagcgtatcatgatcatttgcaaggctctaaattcaaacctacaaggatgtgtgaccgagaacgagaacgatcctattacaaatatagagcctttctttgtgtctgtggcactttatgacctgagagacagccggaagatatctgcagacttccacgtggacttaaaccacgcggctgtgcgccaaatgctgctcggtgcaagtgttgccctggagaacgggaacattgacaccataacaccgagacagtctgaagagcctcacatcaaagggctgcccgaggagtggttaaagttcccgaaacaggcagtctttagcgtgtcaaacccccactccgagatagtactagtggccaaaatcgagaaagtgctgatgggaaacatcgcctccggtgcggaaccctatatcaagaatcccgacagtaataaatacgcccagaagatccttaaatccaatcggcagttttgcagcaaacttgggaagtaccgcatgcctttcgcgtgggcagtgagatcagttttcaaggacaaccagggaaacgtggaccgggacagtagatttagcccgctctttagacaggaatcgtcaaaaattagcacagaagaccttgtcaagctggtgtcagactatcggcgagctgacaggatatccaagatgcaaacaattcctggaagcttagatattgctgtggataacgtgccactggagcacccaaattgcgtgacttcatcctttatcccagttaaaccttttaacatgatggctcaaacggaacccaccgtcgaggtggaagagtttgtttatgattccaccaagtactgcaggccttatcgcgtgtataagaaccagatttacatctatcccaagcatctcaagtacgattcccagaaatgttttaacaaagcaagaaatattacagtctgtattgaattcaaaaacagcgatgaagaatctgccaaaccacttaaatgtatctacggcaaacctggaggtccactgttcacttctgccgcatatacagcggtcctgcatcacagtcagaatcccgacttcagcgatgaggtgaaaatagagctgccaacgcagctgcatgaaaagcaccacatcttattctcgttctatcatgtgacctgtgatattaacgccaaagccaatgctaagaaaaaagaggccctggagacttccgttgggtatgcttggctgcctttaatgaaacacgaccagatcgccagccaggaatataacattccaatcgccacctcactaccaccaaactatttatccttccaagattccgcctctggcaagcacggcggttcagatattaaatgggtggacggcggaaaacccttattcaaggtgtcaacttttgtggtttcaaccgtgaacacgcaggacccacacgtcaatgcgttcttccaagaatgtcagaagagagaaaaggacatgagccagagcccaactagcaactttataagaagctgcaaaaatctcctgaatgtagaaaagattcatgctatcatgtcttttttgcctattatcctgaaccagctttttaaggtcctcgtccaaaatgaagaggacgaaatcacaacgacagtcacccgggtactcactgacatcgtggctaagtgccacgaagagcaactggaccattcagtgcaaagctacattaagtttgtattcaaaactagagcttgcaaggagcggacagtgcacgaagaattggctaagaacgtaacgggccttctgaagtctaacgattcaaccacggtgaagcacgtgctgaagcactcctggttctttttcgccatcatactgaagtcgatggctcagcacttgatcgataccaacaagatccaactccccaggccccagagattccccgagagttaccagaatgaattggacaatctggttatggttctcagcgaccacgtgatttggaaatacaaggacgcactggaggaaacccgaagggccaatcacagcgtcgcaaggtttctcaagaggtgctttacttttatggacagggggtatgtgttcaagatggtcaacaactatatatccatgttctcttccggcgacctgaagaccctctgccagtataagttcgatttcttacaagaggtatgccaacatgagcacttcatccccctttgtctgccaatccgaagtgcaaatatccctgatccactgacacctagcgagtcaacccaggagttgcacgcttccgacatgccagagtactccgtgaccaacgagttttgcaggaaacatttcttgataggcattctcctgcgcgaagttggctttgccctacaagaagatcaggacgttagacacctagctttggctgttcttaaaaacctaatggctaagcactcattcgatgatcgttacagggagccacggaaacaagctcaaattgcatctctttacatgcccctctacggaatgttgctggacaacatgccgaggatctatcttaaggacttgtatccttttactgtcaataccagcaatcaaggtagtagggacgatctctctaccaatggcggatttcagtctcagacggcaataaagcatgcaaatagcgtggacacgtctttctctaaggacgttctgaattctatagcagcattctctagcatagccatctcaactgtgaaccacgctgacagccgggcttcacttgcatcccttgattcaaacccttccactaatgagaaaagctctgagaaaaccgacaattgtgagaaaattcctcgtccactgtcgctcatagggagcacattaaggtttgacaagctggaccaggcagagacccgttcccttctcatgtgtttcctgcatatcatgaagacgattagctacgaaaccctaattgcatactggcagagagcgccttctccagaagtcagcgacttcttctccatactcgatgtgtgcctgcagaactttaggtatctagggaaacggaacatcattcgaaagatcgccgctgcatttaagttcgtccaaagcactcagaacaacgggactttgaaaggatcaaacccttcatgtcagacctctggcctgctgtcacagtggatgcactctactagttctcatgagggacacaagcagcataggtctcagacactacctattataagaggcaagaatgcactgagtaacccaaaactgctccagatgctggataacactatgacatccaatagcaacgaaatcgatatcgtgcaccatgttgacactgaggccaacattgcaacggaagtgtgcctgactattctggatcttctgtccctgtttacacaaacacaccagagacaactacaacagtgcgattgccagaattctttaatgaaaagggtgttcgatacctacatgctgttctttcaagtgaaccaatcagccaccgcgctgaagcatgtgtttgcctccctaagactgttcgtgtgcaaatttccaagcgcatttttccagggccctgccgatctttgcggttcgttctgctatgaggttctgaaatgctgtaatcaccgctctcgctcgacacagaccgaagcctctgcgctgctgtatttcttcatgaggaaaaactttgagtttaacaaacaaaaaagtatcgtccgcagccatctgcaactgattaaggccgtgtctcagctgatcgccgacgccggaatcgggggtagtcgattccagcactccctagccataacgaacaacttcgccaatggggataagcagatgaagaactccaactttccagctgaagtgaaagatttaacaaagcgaattcgaacggtcctgatggccacagcacagatgaaagaacatgaaaaggaccctgaaatgcttgtcgatctgcagtacagccttgctaattcctatgcatctactccggaactgcgccgaacatggctcgagtctatggcaaaaattcatgctaggaacggagatctctctgaggctgcgatgtgctatatccacatcgcagcgctgatcgccgaatatcttaaacgaaagggctattggaaagtggagaaaatttgcacggccagtctgctaagcgaggacacacatccatgcgacagtaattcactgcttactacaccatcagggggatccatgttctctatgggctggccagccttcctctcaataacgcctaacatcaaagaggagggagctatgaaagaagattccggcatgcaagatacaccttacaatgaaaatatcctggtagagcagctgtatatgtgcgtggaattcctgtggaagtcagagaggtatgaactaatcgccgacgtaaacaaacctattatagccgtattcgaaaagcagagggactttaagaaactgtctgacttgtactatgatattcacagatcatatctaaaggtggccgaagtcgtcaacagcgaaaaacgtctatttggtcggtactacagagtcgccttttacggacaggggttctttgaggaagaggagggcaaggagtatatctataaggagccaaagctgacggggctcagcgagatcagccaacgactgctgaagttgtacgcagataaattcggcgcagacaatgtgaaaattatccaggactctaacaaagtgaatccgaaggacctggatcctaagtacgcttatattcaggtgacatatgtcactccatttttcgaagaaaaggaaatagaggatagaaagacagactttgagatgcaccacaatattaatcgcttcgtgtttgagacaccatttactctgagcggaaagaagcacgggggtgtcgccgaacagtgtaaacgcaggaccatccttactaccagtcacttatttccctatgttaaaaaaagaatccaagtcatcagccaaagttcaacggaacttaatccaatagaagtagcgatcgacgagatgagtaagaaggtgtcagaattaaatcagctctgtacaatggaggaggtggacatgatccggttgcagctcaagctgcaagggtccgtcagcgtgaaggtgaatgcgggtccgatggcctacgcaagagcttttctggaagagacaaatgccaaaaagtatccagataaccaggtcaaactgcttaaggaaattttccgtcagttcgccgatgcctgcggccaggccctagacgtgaatgagcggctcatcaaagaggatcagctcgaataccaagaggagctgagatctcactataaggacatgctgagtgagttgtctactgtgatgaatgaacagatcacaggcagggacgatctgagtaaaaggggcgtggaccagacctgtacaagggtcatttccaaggccacccccgctctgccaactgtgagtatctcctcctctgcagaggtctag

SEQ ID NO: 220441 - DNA, 2103 bp, synthetic construct
  misc_feature 1..2103: note = Description of Artificial Sequence: Synthetic coding sequence
  source 1..2103: mol_type = other DNA
atgacaagtaattccaatgagatagacattgtgcatcatgtcgatacagaggctaacatagcaacagaagtatgcttaacaattctggacctcttgtcccttttcacgcaaacccaccagagacagctgcagcagtgcgattgccagaatagcctgatgaaacgggtgtttgatacctacatgcttttcttccaagttaatcagtcagctacagcactcaagcatgtcttcgccagtctgcgcctcttcgtttgcaagttcccctcggctttctttcaggggccagcagatctgtgtggctcattctgctacgaagtgctcaagtgctgtaatcaccggtccagatcaacacagactgaagcatccgctttactctacttttttatgaggaagaatttcgagttcaacaaacaaaagtctattgtgaggagccatctgcagctgattaaagcagtttctcagctgatcgcagacgccggtatcggtggatcccgtttccagcactcactggctatcaccaataacttcgcgaatggggacaaacaaatgaaaaatagtaactttccagccgaggtgaaagatttaaccaagcggattagaactgttcttatggccacagcccagatgaaggagcatgagaaagatccagagatgttggtggatttgcagtactctctggctaacagctatgcttctactcccgaactgagaagaacttggttagagtccatggccaaaatccatgctcgcaacggcgatttatctgaggctgctatgtgttatatccacatcgccgctcttatcgcagagtatctaaaacgcaagggcatgttcagcatggggtggcctgccttcctgtcgattactcctaatataaaggaggaaggggctatgaaggaggatagtgggatgcaagacacaccatacaatgagaatattctagtagagcagctgtacatgtgtgtggagttcctatggaaaagcgaacggtacgaacttatcgccgacgttaacaaacccatcatcgctgtgttcgagaaacagagagatttcaagaaactgagcgatctatactacgatatacatcggtcatacctgaaggtcgccgaggtcgtgaatagcgaaaaacgactgtttggacgttactaccgggtggccttttacggccagggtgtcggattttttgaagaggaggaaggcaaggagtacatatataaggagcccaagttgacaggattgtccgagattagtcaacggctgctgaagctttacgccgataagtttggcgctgacaacgtaaaaataatccaggactcaaacaaagttaatccaaaggacttggacccaaaatacgcctacattcaagtgacctacgttaccccattctttgaggagaaggagatagaagaccgcaagacagatttcgaaatgcatcataatatcaacaggtttgtattcgaaacccctttcacgttgtccgggaagaagcatggcggtgttgctgagcaatgtaaacgcaggacaattcttactacttcacatttgttcccatacgtcaagaagagaatccaagtcatcagccagtctagcaccgagctgaatcccatcgaggtcgctatagacgaaatgagtaaaaaggtgtccgaactaaatcagctgtgcaccatggaggaagttgatatgatcagacttcagttaaagctgcagggcagcgtgtcggtgaaagtcaacgccggtcccatggcgtacgccagagctttcctagaggagactaacgcgaaaaagtaccccgataaccaagtaaaattgcttaaagagatcttccgccagttcgccgacgcctgcggacaggccctcgacgtaaacgaaaggctgattaaggaagatcagctggaataccaggaggaacttcgcagccactataaggacatgttaagtgagcttagcacagtgatgaacgagcagctttgccgcggaccgtgtttgtacagcttctgttcctcggtgtcatcaatctcactgagtacagtttccaagagtgactacggccagggaaggccagtgaaagctagatccggcccaaaccttcactcctcaaactag

SEQ ID NO: 220442 - DNA, 6542 bp, synthetic construct
  misc_feature 1..6542: note = Description of Artificial Sequence: Synthetic coding sequence
  source 1..6542: mol_type = other DNA
atgtcttttaggggcaaggtgttcaaaagagaaccttccgagttctggaagaagcgtagaaccgtcaggcgggtgaaccaggaggaaattcaccgcttctctagtcaggagaaacctcgcttgcttgaaccactggactatgaaaccgtgatcgaggagctggaaaaaacctacaggaacgacccactgcaggacctcctttttttcccttcagatgatttttctgccgcaacggtctcctgggatatccgcacactctactcaactgtgccggaagacgccgagcataaggctgagaatcttctagtgaaagaggcctgtaaattttacagctctcaatggcacgttgtaaattacaagtacgaacaatactcaggcgatatccgccagttgccaagggcagaatataaaccagagaagttaccttctcatagttttgaaatagatcacgaagatgccgacaaggatgaagacaccacaagccactctagttccaagggcggtggcggagctggcggaactggagtgttcaagtctgggtggctgtataagggcaatttcaatagcaccgtgaacaacactgtcactgtccggtcatttaaaaagcgctattttcaactcacccaacttccagacaattcctatattatgaacttttataaggacgagaagatctcaaaggaacccaaaggatgtatatttcttgactcctgtaccggagtggtgcagaataatcggcttcgaaagtacgcatttgagttgaaaatgaatgatttgacgtattttgtcctggccgctgagaccgagtcggacatggatgaatggatacacacactcaataggattcttcaaatcagcccagaggggcctctgcaggggagacgaagcacagaactaacagacctcggactcgactccttggataacagtgtgacttgcgagtgcacaccggaggagacagacagctctgagaacaaccttcacgcagactttgctaagtacctgactgagactgaagacacagtcaagacaactagaaatatggagcgcctcaatttattttctctcgaccccgacatcgatacgctgaagctccagaaaaaagacttactggaaccggagtccgtgatcaaaccttttgaggagaaggcagctaaacggatcatgatcatctgtaaggcgctgaactccaatttacagggatgcgtaactgaaaacgagaacgatcccataacaaatatcgagccatttttcgtctccgttgcactgtacgatctgcgtgactctaggaagattagcgcagatttccacgtggatctcaatcacgccgcagttcgacagatgttgttgggcgcttctgttgcgttagaaaacggcaacatagatacaatcactccacggcagtctgaggagccacacattaagggactgcccgaggaatggctgaaatttcccaagcaagccgtcttcagtgtgtcaaatccccactcggagattgtcctcgttgctaaaatcgaaaaggttctaatgggcaatattgcgtcgggcgcagagccctatattaagaatcccgattccaacaagtatgcccaaaagatcctcaaatcaaaccggcaattctgctccaagctgggcaaatatagaatgccatttgcctgggccgtgcgctctgtgtttaaagataaccagggcaacgtagacagagatagccgcttcagtccactgtttcgccaggaatcaagcaagatttctacagaagatctcgtgaaattggtgtcagactacaggcgcgctgaccggattagcaagatgcagacaattcctgggagcctggatatagccgtggataacgttcccctggagcacccaaactgcgtgacctctagctttataccagtaaagccatttaacatgatggcccagacggaaccaacagtggaggtggaggagttcgtctacgacagcacaaaatattgccgtccatatcgggtatataagaaccaaatttatatctacccgaagcacctgaaatatgattcacagaaatgttttaataaagccaggaacattacggtgtgtatcgaattcaaaaactccgacgaagagagcgctaagcctctgaagtgtatctatggcaagccgggtggccctttgtttaccagcgctgcatatactgccgtactccatcacagccagaatcctgacttctcagacgaagtcaagatcgagcttccgactcaacttcatgagaaacatcatatcctgttttcattctaccatgtgacctgtgatatcaatgcaaaggccaatgccaaaaaaaaagaagccctggagactagcgtcggctacgcttggctacccctgatgaagcatgaccaaatagcttctcaagagtacaatattccaatcgccacctctctgccaccaaactatttgtctttccaggatagtgcaagtggcaagcacggtggttccgacataaagtgggttgatggcggaaagcctctgttcaaagtcagtacctttgttgtcagcactgtaaatactcaggatccgcacgtgaatgccttttttcaagaatgccagaagagagaaaaagatatgtcccaaagtccaactagcaattttatccgctcttgcaagaacctgctcaacgtcgaaaaaatacacgcaataatgagcttcttgccaatcatactgaaccagctgttcaaggtgctggtgcagaatgaggaagacgagatcaccaccacggtcactcgtgtgttaaccgatatagttgcgaagtgtcacgaagaacagctagaccacagcgtgcagagttatattaaattcgtgttcaaaaccagagcctgcaaggaacgaaccgtgcacgaagagttggctaagaatgtcaccgggctcctgaagtccaacgattccactactgtgaagcacgtgctgaagcacagctggtttttcttcgctatcattctcaagtctatggctcagcatctgatagatacgaataagatccagttgcctcggccacaaaggttccccgaatcttaccagaacgagttggacaatctggtgatggtgctgtctgatcatgtgatttggaagtacaaggatgctttggaggagactaggcgggcaaaccactccgtagcaagatttctgaagcggtgcttcactttcatggatcgcggatacgtcttcaagatggtgaacaactacatttcaatgttttcatccggcgacctgaaaacactttgccagtacaaattcgatttcctccaggaagtgtgtcaacacgaacactttatcccgttatgtctccccatccggtcagccaatattcccgatcctcttacccctagtgagtccacacaggaactacacgcttcagacatgccagaatatagcgtgactaatgagttttgccggaaacacttcttaattgggatccttcttcgcgaggtcggtttcgcactacaagaggaccaggacgtgcgacacttggctctggccgtgctgaaaaatctcatggctaagcacagcttcgatgacaggtatagagaacctcggaagcaggcccagatagcaagcctgtatatgcccctgtatggtatgctgttggacaatatgcctcgcatctacctgaaagatctctacccattcaccgtgaacacgtcaaatcaaggttctcgcgatgacctgagtacgaacggaggtttccagtctcagaccgccatcaaacacgctaactcagtcgacacaagtttttctaaggatgtgttgaatagtattgccgctttcagtagtatcgcgatttcaacagtgaaccacgcagatagcagagcttcacttgctagtcttgattccaatcccagtactaatgagaagagcagcgaaaagacggataattgtgagaagattcccagaccattatccctgattggttccacgctgagattcgataaacttgatcaggcagaaacccgctctctgctgatgtgtttccttcacattatgaagaccatttcttatgagactctgatcgcttattggcaaagggccccttccccagaggtctctgactttttttctatactggacgtctgtttgcaaaacttccgctacctcggtaaaaggaatattattcgaaagatcgctgcagcatttaagtttgtccagagcactcaaaataacggcacactgaaaggctctaacccttcttgccagacgtctggtctgctctcacagtggatgcactcaacaagctcacatgaggggcacaaacaacaccggagtcagacgctgcccattatcagaggcaagaacgctttatcgaacccaaaattactgcagatgctcgacaacactatgacctcaaactccaatgaaattgacattgtgcaccatgtagatactgaggcaaacatcgccacagaagtgtgtctcaccatcttggatcttctcagcctattcacacaaacccaccagcgtcagcttcaacagtgtgactgtcaaaactccttgatgaagcgcgtgttcgatacgtatatgctgttttttcaagtgaaccagagcgctactgccctgaaacatgtgttcgcctcactgcgattattcgtctgcaagttcccatctgccttctttcaaggaccagcggatttgtgcggtagcttttgctacgaagtgctcaagtgctgcaaccaccgcagtcggtcgacccagaccgaggcaagtgctctcttatacttctttatgaggaaaaactttgagttcaataagcagaagagcatcgtgcgttcccacctgcaactgattaaggccgtgtcacagctcattgccgatgctggaatcgggggtagcagattccagcacagcctggccatcaccaacaacttcgctaatggcgacaaacagatgaagaactcgaattttcccgctgaagtgaaggacctgactaaacggatacgcaccgtcctgatggctaccgcccagatgaaagagcacgaaaaggacccagaaatgctggtggacctgcagtacagcctggcaaatagctatgcttctactccagagctgcggaggacatggctggaaagtatggcaaaaatccatgcccgtaatggcgacctgagcgaggccgctatgtgttacatccacatcgcggcactgatcgcggagtacctgaagaggaagggatactggaaagttgagaaaatttgtactgcttccctcttaagcgaggacactcatccgtgtgacagcaatagccttctgactacaccgagtggaggatccatgttctcgatgggctggcctgcctttctttctatcacccccaacatcaaggaggagggggcaatgaaagaggactcaggtatgcaagatactccctataacgagaacattttagtggagcaattatacatgtgcgtggagtttctttggaagtccgaacgctacgagttgattgccgatgtgaataagcctattatagcagttttcgagaaacagcgagatttcaaaaagctcagcgatctgtactacgatattcatagaagttacctcaaagtggccgaagtggtcaattctgagaaaaggctctttggacggtactaccgcgtcgcattttacggccaggggttcttcgaagaagaagagggaaaggaatacatctataaagagcccaaactcaccgggctctctgagatctcccaacgacttcttaaattgtatgcagataagtttggggctgacaatgtgaagataattcaggatagtaataaggtcaatcccaaggatcttgacccgaagtatgcctacatacaggtgacatacgtgacaccattcttcgaggaaaaagaaattgaagaccgcaagactgacttcgagatgcatcataatatcaaccggtttgtcttcgaaactccttttacgctcagcggaaagaaacatgggggagtagcagagcagtgcaaaaggaggaccatcctcactacatctcacctttttccttacgtgaaaaaacgcattcaggtgatttcgcagtcctcaacggagctgaatcctattgaggtggcgattgacgagatgagtaaaaaggtttccgaactgaatcagctctgcactatggaagaggttgacatgatcagactgcagcttaagctgcaaggcagtgtctcagttaaggtaaatgcagggcctatggcatacgcaagagccttcttggaagaaaccaatgccaaaaaatacccagacaatcaggtgaagctgcttaaggaaatcttccgtcaatttgcagacgcttgcggccaggcgctggacgtgaacgaacggctaatcaaggaggaccagctggagtatcaggaagagctgcgctcgcactacaaggacatgctgtccgagctgtcgaccgttatgaatgaacagattacaggccgtgacgatttatccaagcggggagtagaccagacatgtaccagagtgatcagcaaagccacgcccgcactgcctacggtgtctatttcgtcctctgccgaagtgta

SEQ ID NO: 220443 - DNA, 5493 bp, synthetic construct
  misc_feature 1..5493: note = Description of Artificial Sequence: Synthetic coding sequence
  source 1..5493: mol_type = other DNA
atggcaccgtggcgcaaggcagacaaggaacggcacggtgtcgccatctataacttccaagggtccggagcccctcagctctccctgcagatcggcgacgtcgtccgcatccaagaaacgtgcggcgactggtatcgagggtacctcatcaagcataagatgctccaaggtatatttcccaaatcatttattcacatcaaagaagttaccgtagaaaaaagacgcaataccgaaaatatcatccctgcagagattcctttggcccaagaggtgaccacaacactttgggaatggggctctatctggaagcagctctatgttgcttcgaaaaaagagcggtttctgcaggtccagtccatgatgtacgacttgatggagtggcgcagtcagttgctctcgggtacactaccaaaagatgaacttaaggaactaaagcaaaaagtaaccagcaagatcgactatggcaacaagatactcgaactggaccttatcgtaagagacgaagacgggaacattctcgaccccgacaacacctctgttattagcttgtttcacgcccacgaagaagcaaccgacaaaattacagagagaattaaagaggagatgagtaaggatcagcccgactatgccatgtactccagaatttcttccagccctacccactctctgtatgtgttcgttcgcaacttcgtctgcagaatcggggaggacgcggagttgttcatgagtctgtatgaccctaacaagcagacagtgataagtgagaactatctagttcggtggggttcgcgcggatttcccaaagagattgaaatgctgaacaacctgaaggtcgtcttcactgatctgggaaacaaggaccttaacagagacaaaatttatctgatttgtcagatagtgcgggtgggcaagatggacttgaaagatacaggggctaaaaagtgtacacagggacttagacggccttttggcgtggctgtgatggacattacagacattatcaagggtaaggccgagagcgacgaggagaaacaacactttatccccttccacccggtgaccgctgaaaacgatttcctgcactctttactgggcaaggtgatcgccagcaagggcgactctgggggacagggcctctgggtcaccatgaaaatgcttgtcggggatattattcaaatccgaaaggattaccctcatctggtggatagaacgactgttgtcgcacgaaagctcggctttcctgaaataattatgccaggtgatgtcagaaatgatatttacattacattgctgcaaggtgatttcgataagtacaataagaccacgcagagaaacgtggaggtgataatgtgcgtgtgtgctgaagatggtaaaactctgccaaatgctatctgtgtgggggcaggtgataagcctatgaatgaatatagatccgttgtttattaccaagtgaagcagccaagatggatggaaacagtgaaggttgccgtcccgatcgaggatatgcagcggatccatctccgattcatgtttcggcaccggagttccctcgagtcgaaggacaaaggtgaaaagaatttcgccatgtcatacgtaaagttgatgaaggaagacggtaccaccttgcatgacggatttcatgatcttgtggtcctgaagggggattcaaagaaaatggaagatgccagtgcctacctgacattgccatcttatcgccaccatgtggaaaataagggtgcaaccctgagccgatcgtcaagctctgtagggggtctgtccgtgagctccagggacgtgttttctattagtaccctggtgtgttctactaaattgactcaaaacgtaggcctcctcggccttttaaagtggcgcatgaagccccagctgctgcaggaaaacctggaaaaattgaagattgtagatggtgaagaagtggttaaatttctacaggatactctggacgcactgtttaacatcatgatggagcacagccagtcagatgagtatgacatcctggtattcgatgccctgatctacatcatcggactaattgccgaccggaagtttcagcacttcaatacggtgctggaagcttacatacaacagcatttcagtgctacactagcctacaagaagctcatgacagttctgaaaacttatctggataccagttcacgcggagaacaatgtgaacctatcctacgcacattgaaggccctggagtacgtgtttaagtttatcgttagatctcgaaccttgtttagtcaactctatgagggcaaggagcagatggagtttgaggagtctatgcgaaggttgtttgagagtattaataacctaatgaagagtcagtataaaaccactatcttactgcaggtggccgcactgaagtacattccatctgtccttcacgatgtagagatggtgttcgatgccaagctgctgtcacagctcctctacgagttttatacatgtattccacctgtgaagttgcagaaacaaaaggttcagtcgatgaatgagatcgtccagtccaatcttttcaaaaagcaggagtgcagggacatactcctgccagtcatcacgaaggaactgaaagagttgctagagcagaaggatgacatgcaacaccaggtgctggaacgaaagtattgtgtagagctgcttaacagcatcttggaggtgctgtcttaccaagacgctgccttcacctaccatcacatccaggagataatggtgcagctgttgagaaccgttaatcggaccgtgattactatgggtcgtgaccatattctcatatctcatttcgtggcgtgtatgacagccatcctaaatcagatgggcgaccagcattacagcttttatattgaaacttttcagacctcctctgagcttgtcgacttcttgatggaaacctttattatgttcaaggaccttatcgggaagaacgtgtatccgggtgattggatggctatgtccatggtccaaaacagagtgttcttgagggccataaataagtttgctgagacaatgaatcagaagttcctcgaacacacaaactttgaattccagctctggaataactattttcatttagccgtagcatttatcactcaggattctctccagctggagcagttcagtcatgctaaatacaacaaaatcctgaataagtatggtgatatgaggaggcttatcggattcagcatacgagatatgtggtacaagctggggcagaacaaaatttgcttcataccgggtatggttggtcccatcctggagatgacactgatcccagaggcagaactgcgcaaggccacgattcccattttttttgacatgatgctctgtgagtatcagcgcagcggagatttcaaaaaatttgagaacgagattatccttaagcttgatcacgaggtggagggcggtcggggagacgaacagtacatgcaactcctagagtccatcctcatggaatgtgccgcagaacaccctacaattgctaaaagcgtcgagaatttcgtcaatcttgttaaggggttactggagaaacttctggactatagaggcgtgatgacggacgaaagcaaggacaataggatgagctgtaccgtgaatctgttaaatttctacaaagacaacaatagagaggagatgtacataagatacctttacaaattgagagatctgcatctggattgcgacaactacactgaggcagcctacactctgctgctgcacacctggctgctcaaatggagtgatgaacaatgcgccagccaagtgatgcagaccgggcagcagcacccacagacccacagacaactcaaggagacactgtatgagaccataattgggtattttgacaaaggcaagatgtgggaggaagccatttccctgtgcaaggagctggcggaacaatacgaaatggagatctttgactatgagctgctgtcacagaatctgatccagcaggcaaaattttacgagagtattatgaagatccttcggcctaagcccgactatttcgctgtaggatactatggtcagggcttcccttctttcctcaggaacaaggtgttcatatacaggggcaaggagtacgaaaggcgggaggacttccagatgcagctaatgacacagtttccaaatgctgagaagatgaacacgacatctgcaccaggtgacgacgttaagaatgctcctggacagtacatccagtgctttactgtgcaacctgtgctagatgaacaccccaggttcaagaacaaaccggttcccgatcagatcataaacttttacaaaagtaattacgtccagcgctttcattattctcggcctgtcagacggggtactgtagaccccgagaatgaattcgcatccatgtggatagaaaggactagttttgtgaccgcttataaactgcctgggatcctccggtggttcgaggtcgtccacatgtcgcagacgacaatcagccccttggaaaacgccatcgagactatgtccactgcaaacgaaaaaatcctcatgatgatcaaccagtaccaatcagatgagaccctcccaatcaatcctctcagcatgctcctgaacggcattgttgatcctgccgttatggggggttttgctaagtatgaaaaggcattttttacagaagaatatgtccgtgatcaccctgaagaccaggacaagctgacgcacctcaaggacttgattgcttggcagatcccctttttgggggcaggaattaagatccatgagaaacgcgtgtctgacaatcttcgcccatttcatgacagaatggaggaatgttttaagaatctgaaaatgaaagtggagaaggagtacggcgtcagagagatgccagatttcgacgaccggcgagtgggacggccacgatcaatgcttcgtagctataggcagatgagtatcatttctttggcttcaatgaacagcgattgttccacaccaagcaaacctacaagtgaaagtttcgacctggagttggcttcacccaagactccacgggtcgagcaggaagagccgatctctcccggttcaaccctgccagaagtcaaattgaggaggtcgaaaaaaagaactaagcgaagttccgttgtattcgccgatgaaaaagccgctgcagagtccgacttgaagcgattgagtaggaaacacgagttcatgagtgacactaatctttcagagcacgcggcaatccccctcaaggcttctgtgctcagtcagatgtcctttgctagtcagagtatgcctacaatcccggctctggcactgtccgtggctggtattcctgggcttgatgaggcaaacacatcccctcgtctgagccaaacttttctccagttgtccgatggagataagaagactctcacccgcaaaaaggttaatcagttcttcaaaactatgctagccagcaaatctgccgaagagggtaagcaaatcccagattcacttagtacagacctgtat

SEQ ID NO: 220444 - DNA, 1011 bp, synthetic construct
  misc_feature 1..1011: note = Description of Artificial Sequence: Synthetic coding sequence
  source 1..1011: mol_type = other DNA
atgtgcgtctgtgcagaggatggaaagacactgccggttgcagtccctatagaggatatgcaacgaattcacttgagatttatgtttcgccaccgctcgtcactggagtccaaggataaaggcgaaaagaattttgcgatgagttacgtgaaactcatgaaggaagatgggaccaccctccatgacggatttcacgatttagtggtcctgaagggtgattccaaaaaaatggaggatgccagcgcctatctgactcttcctagctaccgccatcatgtcgagaataaaggagctaccctctctagatccagttcttcagtcggagggctttctgtgtccagtagggacgtattctcaatcagtacacttgtgtgtagtaccaaattaacccaaaatgtcggacttctcgggctgctcaaatggcgcatgaaaccccagctcgaggagtccatgagaagactcttcgagagtattaacaatctcatgaaaagccagtacaaaacaactattcttctacaagtcgccgcacttaaatacattccaagcgtgctgcacgatgtggaaatggtgttcgatgcaaagttgctgagccagctgctgtatgagttctacacgtgtatccctccggtgaaactgcagaagcagaaggtgcaatctatgaatgaaatagtccagagcaatttatttaagaaacaggaatgccgggacatcctgctacccgtgatcactaaagagctgaaagagctgctcgaacagaaagacgacatgcaacatcaagtcttggaaagaaaatactgcgtggaattgcttaatagcattctggaggtgctgtcttaccaggatgccgcttttacttaccatcacatccaggagatcatggtccagctgttgcgcactgtgaacaggaccgttatcacaatgggaagagatcacatactcatcggagcttgctgtaattgcgggttcccctcttccactccccactcacttattcagtggctgtggggctag

SEQ ID NO: 220445 - DNA, 2676 bp, synthetic construct
  misc_feature 1..2676: note = Description of Artificial Sequence: Synthetic coding sequence
  source 1..2676: mol_type = other DNA
atgaccgcaattctgaaccagatgggcgaccagcattacagcttctacattgagacctttcaaacctcctcagaacttgtggattttctgatggagactttcatcatgttcaaggatctgatcggcaaaaacgtgtacccaggggactggatggctatgtctatggtgcagaaccgggtgttcctgcgcgcaattaacaaattcgccgagacaatgaatcaaaagtttctggaacacacaaattttgagttccaactttggaacaactactttcacctggcagtggcttttataacacaggacagccttcagttggaacagttttcacacgcaaagtacaataagatcttgaacaaatatggagatatgagacgtctgattgggttctcaatcagggacatgtggtataagcttggccagaacaaaatttgctttatccctggaatggttggccctattctggagatgacacttattcctgaggcagagttacggaaggcaaccattccaatcttctttgacatgatgttatgtgaataccaacgatccggcgatttcaaaaagtttgagaacgaaataatcttgaagttggatcacgaagttgaaggcggacggggtgatgagcagtatatgcagttgctggagtccattctgatggaatgtgctgctgagcatccaaccattgccaagtccgtagaaaatttcgttaatttagttaagggtttattggagaaactgctggattacaggggagtcatgacagacgagagtaaggataatagaatgagctgtacggtcaatctcctgaacttctataaggataacaaccgagaggaaatgtacatccgctatctgtacaagttacgggatctgcacctagactgtgacaactacaccgaggctgcctataccctcctcctgcacacatggctgctaaaatggagtgatgagcagtgcgcctcccaggtgatgcaaactggacaacagcatccacaaacgcatagacaactgaaggagacattgtacgagactattattggctacttcgataaaggaaagatgtgggaggaggctatcagtctctgcaaagagctggccgaacagtacgagatggagatcttcgactacgagttactgagccaaaatcttattcagcaggcgaagttctacgagagcattatgaagatattgagacccaaacctgattattttgccgtggggtactatggccagggttttccctcattcctccgaaacaaggtctttatatatcgcggtaaggaatatgagaggcgagaagactttcaaatgcagctgatgactcagttcccaaatgccgaaaagatgaacactacgtccgccccaggcgatgatgtgaagaatgcaccgggacagtatatccaatgcttcactgtgcagcctgtgttggacgaacatccacggtttaagaataagccagtacccgatcaaatcatcaacttctataaatccaactacgttcagcggttccactacagtagacccgtgcggagaggcactgtagaccctgagaacgagtttgcatctatgtggatagagcgtacgagcttcgtcactgcctataaactgcccggaattctgcgatggtttgaagtcgtccatatgagtcaaaccacgattagtccgcttgaaaacgccatagagacgatgtccactgccaatgagaaaattctaatgatgattaatcagtatcagtcagacgagaccttaccaatcaatccgctcagcatgcttctcaacggcattgtcgaccccgctgtgatggggggtttcgcgaaatacgaaaaagctttttttactgaagaatatgttagagaccatccagaagatcaggacaaactcacccacctgaaggatctgattgcttggcagatcccattcctcggggctggcattaaaatccacgagaagcgtgtgagtgataacctcagaccgttccacgaccggatggaagaatgttttaagaatttaaagatgaaagtcgagaaagaatacggtgttagggaaatgcccgattttgatgatcgtcgagtgggaagacccagatcaatgctccggtcttatagacaaatgtcaattatttcactagcctctatgaattccgactgctctacaccatccaagcccacatcagaatctttcgatcttgagctggcaagcccgaagacccctcgggtcgaacaggaagagcctattagcccgggttctaccctgccagaggtgaagctcagaaggtcaaagaaaaggacgaaacggtcatcagtagtcttcgccgatgagaaagccgcagccgagagtgatctgaagcgcctctctagaaaacacgagtttatgtctgatactaacctgagtgaacatgctgcaatcccactgaaggcgtcggtgcttagtcagatgtcttttgcatctcagtctatgcctacaatccccgcactagccctctccgtcgccggaataccaggtctggacgaagcaaacactagtcctaggctctcccagacctttctgcagctgtccgatggtgacaaaaagaccctgactcgcaagaaagtaaaccaatttttcaagactatgctagcatctaaatccgctgaggaggggaaacaaattcccgatagcctgtctaccgacttgtag

SEQ ID NO: 220446 - DNA, 6093 bp, synthetic construct
  misc_feature 1..6093: note = Description of Artificial Sequence: Synthetic coding sequence
  source 1..6093: mol_type = other DNA
atgtggacgcctactgaagaagagaaatatggtgtggtaatctgcagcttccgcggatcggtaccccagggcctggtgttggagataggggaaacagtgcagatcctggagaagtgcgaggggtggtaccgtggagtgagcaccaaaaaacccaatgtcaagggaatcttccctgcaaactacattcatttgaaaaaggccatagtatcgaataggggacaatatgaaacggtcgtaccacttgaggactccatcgtaaccgaggtcactgcgacactgcaggaatgggcctccctatggaagcaactctatgtaaagcataaagtcgacttattctacaaactacgccacgtcatgaacgaattgatcgatctacgcaggcagctgctgagtggccatttgactcaggaccaggtgagggaagtaaaacggcacattacagttcgccttgattggggcaacgagcatcttgggctcgacctcgtaccccgaaaggattttgaggtagtggactctgatcagatatctgtatccgacctgtacaaaatgcacctgtccagtcggcagtccgtgcagcagtctacatcacaggtggacacgatgcggccacgccacggcgaaacctgtcgcatgcccgtgccccatcacttctttctatctctcaagtctttcacatataacaccatcggtgaagacactgatgtatttttctcactctacgatatgcgcgaaggcaagcagatcagtgagcgttttctagtgagactgaacaagaatggcggtccgaggaaccccgaaaagattgagcggatgtgcgcacttttcacggatctgtcctctaaagacatgaagcgggatctctacattgtagctcatgtcattagaattggtaggatgctactgaacgactcaaaaaagggcccaccccacctgcattaccgccgtccatatggctgcgcagttctttccatcctggacgttctgcagtcactgaccgaggtgaaagaggaaaaggactttgtgctgaaagtgtacacatgcaacaatgagagcgagtggtcccagatccacgaaaatatcattcgtaaaagctctgcaaagtatagcgcacctagcgcaagtcacggactcatcatcagcttgcagcttttacggggtgacatggagcagattaggcgcgagaatcccatgattttcaacagaggtttggctatcacgaggaagctggggttccccgatgttattatgccaggcgacattagaaacgacctgtatctgaccctggagaagggtgatttcgagaggggagggaagtccgtccaaaaaaatattgaggtcaccatgtacgtgctttatgcggatggcgaaatcctgaaggactgtatttcgctgggatcaggcgaaccgaaccgctccagctaccacagtttcgtcctctatcattctaattctccacgatggggagagatcattaaactgcctattcccatcgacagatttcgcggatcgcacttacggtttgagtttcggcattgctctacaaaggataagggcgagaagaaactgttcgggtttgcattttctaccctcatgcgagatgacggcaccacactcagtgacgatattcatgaactgtacgtttacaaatgcgacgaaaacagtacttttaataaccacgcattgtacctgggcctgccctgctgtaaggaggattataatgggtgtcctaatattccctccagcctgatctttcaacggtccaccaaagaatcttttttcataagtactcaactctcaagcaccaaactgacccagaatgtggacctgctggcactgctgaaatggaaagccttcccagacagaatcatggatgtactcgggaggttacggcacgtatctggcgaggagatcgttaaatttcttcaagatatcctagacaccttattcgtgatcttagacgataatacagagaaatacggcttgctggtgtttcagagcctagtgttcattattaacctgctcagagatattaagtattttcacttcagacccgtcatggacacttacatacaaaaacattttgccggtgcgctggcctataaagagttaattaggtgcctgaagtggtatatggactgttccgccgaactgatcagacaggaccacatccaggaggcgatgcgggcactagagtatctctttaaatttatcgtgcaatcccgcattctctatagcagagctacctgcgggatggaagaggaacagtttcggagtagtattcaagagctgttccagagtattcgtttcgtactgagtctcgattctcgcaacagcgaaacactgctcttcacccaggctgccctcctgaattcttttcccaccatcttcgacgaattgctgcagatgttcactgtgcaagaggtggccgagttcgtgcgcggtacccttggcagcatgccgtcaacggtgcacataggccagtccatggacgtcgtcaagctgcagtctattgctcgaaccgtggatagcaggctgttcagtttcagcgagtctcgcaggattctacttcccgtagtgctgcatcacatccacctgcacctcaggcaacagaaagagttgttaatctgttccggcatcctcgggtcaattttctctattgtcaaaacaagtagcttagaagcggatgtgatggaggaggtggagatgatggtcgaatcactcttggacgtgctgctgcagaccctcctgaccatcatgagcaagagtcacgcccaggaagccgttcgcggacagagatgcccccagtgtaccgccgagattacgggggaatacgtgtcatgtttactgagccttctgcggcagatgtgcgacacacactttcagcacctgctggataactttcagagcaaggatgaactgaaagagttcctgctgaaaatcttctgtgtcttcaggaacttaatgaaaatgtccgtgtttcctcgcgattggatggtcatgaggctgctcaccagcaacattattgtgacaacagtgcaatatctatcgagtgcactgcacaagaacttcacggagacggactttgattttaaagtgtggaacagttacttcagcctggccgtgctcttcatcaatcagccttccctgcagctggaaatcattacgtccgctaagagaaaaaagatcctggataaatacggtgacatgcgcgtgatgatggcctacgagcttttctccatgtggcagaatctgggcgaacataaaatccacttcattccagggatgattggccctttcctgggggtgactctggttcctcagccagaagtcagaaacatcatgattccaatcttccatgatatgatggattgggaacaaagaaaaaacgggaattttaaacaggtggaggctgaattgattgataaactggacagtatggtgtccgagggaaagggtgatgaatcttacagagagttattctctcttcttactcaactgtttggtccgtacccatcgctgctagaaaaggtggagcaggagacatggcgcgagaccggcatctccttcgtgaccagtgtcacgagacttatggaacgcctcttggactaccgcgactgtatgaaaggtgaggagacagagaataaaaaaataggttgcactgtgaatctgatgaatttttataaaagcgagattaataaggaggagatgtatatacgttacatccacaaactgtgtgatatgcacctgcaggcagaaaactacacagaggccgcattcaccctgctgctgtactgcgaactgctgcagtgggaagacaggcccctaagagagtttctgcactacccgagccagactgaatggcagaggaaggagggtctgtgccgcaaaattatacattatttcaacaaagggaaatcttgggagtttggtatacctttgtgccgtgagttggcttgccagtatgagtccctgtacgactaccagagtctctcctggatcaggaaaatggaagccagctactatgataatatcatggaacagcagcgacttgaacctgaattttttcgagtgggcttctatggcaggaagttccctttctttctccgtaataaggagtatgtttgccgtgggcacgactatgagcgactagaggctttccaacagcgaatgttaagcgaattcccacaggccgttgcaatgcagcatcccaaccacccggacgacgccatactgcagtgtgatgcacagtatctgcagatttacgctgtaacacccatccctgattatgtggacgtcttacaaatggaccgcgtgccagacagggtcaagtccttttaccgggtcaataacgtaaggaaatttcgctatgaccgcccttttcataaagggcctaaggataaggagaacgagtttaagtctctttggattgagcgcacgacactgaccctgactcattctctgccagggatatctagatggttcgaagtcgagcgcagagagctcgttgaggtatccccactggagaatgccatccaggtcgtggaaaacaagaaccaagagctgcggagcctgatctcacagtatcaacataaacaggtccacggcaacatcaacttgttgagtatgtgcctgaacggcgtcattgatgccgctgttaatggagggatcgcaagatatcaagaggccttttttgataaagattacataaataagcaccccggtgacgctgagaaaataactcaacttaaagagctgatgcaggaacaagtgcatgtcctgggagtgggtctcgcggtgcacgaaaagtttgtccacccagagatgcgccctctgcataagaagctgatcgaccagtttcaaatgatgcgcgcttccctgtaccacgaatttccaggtttagacaagctgtccccagcctgttctggtacctcgacccccaggggcaatgtcctcgcaagtcatagtccaatgagcccagagagcattaagatgacccacagacattctcctatgaatctgatggggacgggacggcactcctcctcgtcactatcttcccacgctagttctgaggctggcaatatggtgatgcttggagacggatctatgggggacgctcccgaggacctgtaccaccacatgcagctggcctaccctaatcctagatatcaagggtcagtgactaatgtgagcgtcctctccagcagccaagcttccccttcttctagttccctgtctagcacccactcagctccctcccagatgattacatcggcaccaagctccgcacggggttctccaagcctgccagataagtatagacatgcacgggagatgatgctgctgttgccaacgtatagagatagacctagctctgcaatgtatccagccgctattctggagaatggacagccgcctaacttccagcgtgctctctttcagcaagtcgttggagcctgcaaaccatgttctgacccgaacctttcagttgcggagaagggacactactccctacatttcgacgcctttcaccatcctctgggcgatacccctccagccctgcctgccaggactttgcgcaagtctcccctgcacccaatcccggcaagcccaacttctccccagtcgggtttagacggatctaactcaacactatcaggttccgctagttcaggagtgtcctcgctctccgaaagcaactttggccactcctctgaagcgcctcctcgcaccgacacaatggattccatgcctagccaggcatggaatgcagacgaagacctggagccaccttacctgcccgtgcattattccctaagtgaatcagccgtgctggattctattaaagcccagccatgccgcagccactcagccccaggatgtgtaataccacaagaccccatggatccgccagctctaccccctaaaccttaccatcctaggttgcctgctctggagcacgacgaaggcgtgctccttcgtgaggagactgaacgcccacgtggtttacatcggaaggccccattgcctccgggaagcgctaaggaagaacaggccagaatggcctgggaacatggacgtggggaacagtag

SEQ ID NO: 220447 - DNA, 1785 bp, synthetic construct
  misc_feature 1..1785: note = Description of Artificial Sequence: Synthetic coding sequence
  source 1..1785: mol_type = other DNA
atgccaaagtggctcgaggagaccgagaataagaaaataggctgcacggtcaacctcatgaatttctacaaaagcgagatcaacaaagaggaaatgtatataaggtatattcataagctgtgtgatatgcaccttcaagccgaaaactacaccgaagcggcatttacccttcttctgtattgcgaactgcttcaatgggaagatcggccattgcgggagttcttgcattacccgagtcagaccgaatggcagcgtaaggaggggctttgtcggaaaataatccactacttcaacaaggggaaatcttgggagtttggcataccgctctgccgcgagctggcctgccagtatgaatcactgtacgattaccagtcactaagttggatccgcaagatggaggctagttactatgacaatataatggagcagcagaggctggagccggagtttttccgcgtcggcttctacgggagaaaatttcccttctttctcagaaataaggagtacgtgtgtagggggcacgactacgagagattagaagccttccagcagcgaatgctgagcgagttcccccaggccgtggccatgcagcatccaaaccacccagatgatgccattctgcagtgcgacgctcagtacctgcagatctatgccgtaacacccattcccgattatgttgacgtgcttcaaatggaccgcgtccccgacagagtaaagtcattctaccgggtgaacaatgtgcgaaaatttcggtatgacaggccattccacaaaggcccaaaagataaagaaaacgagtttaaatctctatggattgaaaggacaacattgacgctgacacacagtcttcctggtattagtcgatggttcgaggtcgaaagacgggagctggtggaagtgtctccccttgaaaatgccatccaggtggttgagaataagaatcaggaactgagatctctgatatctcagtatcagcacaagcaagttcacgggaacattaacctgctgtccatgtgcctcaacggagtgatcgacgccgcagtgaatggcggtattgcgaggtaccaagaggcattcttcgataaagactatatcaataaacacccgggtgacgcggagaagatcacccagctgaaggaactgatgcaagagcaggtgcacgtcctcggggttggccttgctgtccatgagaagttcgtgcatcctgagatgcgcccattgcacaaaaagctgatagatcagttccagatgatgagagcaagcctttaccacgagtttccaggactggataagctctctcctgcttgcagtggcacaagcacgccaagggggaacgttctggcctctcattcgcccatgagtcctgagtctatcaagatgacccaccggcactcccccatgaacctgatgggcacaggcagacacagctctagtagtctctccagccatgcaagttctgaagcgggaaatatggtgatgctgggcgatgggtcaatgggagacgctccagaggatctctaccatcacatgcagctggcatacccaaacccccgataccaggggagtgtgacgaacgtgtctgtgttatcctcttctcaggcaagcccatcgagtagctctttgtcatcaacccatagcgcaccatctcagatgattacgtccgctccttcctccgcccgaggtagcccctctctgcccgacaagtatcgccacgccagggagatgatgcttttgctgccaacctatagagatagacctagcagtgctatgtatcccgcagcttag

SEQ ID NO: 220448 - DNA, 5777 bp, synthetic construct
  misc_feature 1..5777: note = Description of Artificial Sequence: Synthetic coding sequence
  source 1..5777: mol_type = other DNA
gtgattgcttctttccgaggcactgtcccatatggtctttctctggaaattggagacacagtccaaatcctggagaagtgcgacggatggtatagaggattcgccctgaaaaatcctaacataaaaggtatcttcccttctagctacgtgcacctgaagaacgcttgcgttaaaaacaagggtcagttcgagatggtgattcccactgaagatagtgtgattactgagatgacttcaacactaagagactggggcacaatgtggaaacagttgtacgtgcgtaacgagggtgacctatttcacagactgtggcacatcatgaacgaaatcctagatctgagaaggcaggtgctcgttggccacctgacgcatgacaggatgaaggatgtgaagcgtcatatcacagccaggctcgactggggaaacgaacagctcggcctcgatctggtgcctcgcaaagaatacgccatggtggacccagaagatatcagcatcacggagctgtatcgcctaatggagcatcgacatagaaagaaggatacacccgtgcaggcctcctcccaccacttgtttgtacagatgaaaagtctcatgtgctctaatctcggtgaagaactggaggtcatctttagtctgttcgactccaaagaaaataggcccatttcagaaaggttcttcctccggctcaacagaaatggcctgccgaaagccccagacaagccagagcgacattgcagtctgttcgtggatctggggagcagtgaactgcgcaaagatatctatattaccgtccatattatccgcattggccgaatgggggcaggcgaaaaaaaaaacgcttgctccgtgcagtataggcggccttttggatgtgctgtgctttcaatagcggacctcctgacgggagagacaaaagatgatttaatcctgaaagtgtacatgtgcaatacggaaagcgagtggtaccagatccatgagaatatcattaagaagctcaacgcacgctataatttgacaggcagtaacgccggactggctgtctccctgcagttgctgcatggagatatagagcagattcgaagggagtattctagcgtgtttagtcatggcgtgagcatcactcgtaagttaggttttagcaacatcattatgcctggcgaaatgcgcaacgatttatacattaccattgaaagaggcgagttcgaaaaaggcggaaaatcagtggcacgtaacgtcgaagtcacaatgtttattgttgatagtagtggccagaccctcaaggattttatcagctttggttctggagagcctcccgcttccgaataccactctttcgtactttatcataacaatagcccaaggtggtccgagctcctcaagttgccaataccagtcgacaagttcagaggtgcacacatcaggttcgagttcaggcactgttcgacgaaggagaaaggagagaaaaagctcttcggttttagttttgtgcctctgatgcaagaagacggcaggaccttgccggatggcacccatgaactgatcgtgcacaaatgcgaagagaatacaaacctccaggacactactaggtatcttaaactgcccttttctaaaggaatctttctcgggaataacaatcaagccatgaaagcgaccaaagagagcttctgcattacgtcatttttatgtagtacgaagctcacgcaaaatggagatatgttggatttattgaaatggagaactcatccagataaaataacgggttgcctgtccaagctgaaagaaattgacggatcagagatagtgaagtttctccaagatacattagacacccttttcggaattctggacgaaaacagtcagaaatacggatcaaaggtattcgactcgcttgtgcacatcataaatctcctgcaggacagcaaattccaccactttaaaccagttatggacacatacatcgagtcccacttcgcaggcgctcttgcgtacagggatttgatcaaggttctgaagtggtacgtggatcggatcaccgaggccgaacgacaagaacacattcaggaggtgctgaaggctcaggaatacatattcaagtacatcgtccaaagcaggcgtttgtttagcctggcaacagggggtcaaaacgaggaagaattccgttgctgcatccaagaacttcttatgtctgtccgctttttcctctcacaggagtctaagggttcaggagcgctttctcagtctcaggcggtgttcctgagctcctttccagcagtgtactcagagttacttaagttgtttgatgtacgggaggtagcgaatctggttcaagacactctggggtctctgccgacgattctgcacgttgacgactccttacaagcaataaaattacagtgcattgggaaaacagtggagagtcaactctacaccaaccctgacagtcggtatatcctcctccccgtggttctccatcacttgcacatccacctgcaagaacagaaagatctcataatgtgtgcacggattctgagtaacgtattctgccttattaaaaagaattcaagcgaaaagagcgtcttagaggaaattgatgtgatagtcgcgagcctgctggacatactgttgagaacaattttggagataacatcccgtcctcagcctagctccagcgccatgcgcttccagtttcaagatgtgaccggcgagtttgtggcatgtctgcttagtcttctgagacagatgacggacaggcattatcagcagttattagactcgtttaacacaaaggaagaactcagggatttcctgttgcaaatattcacggtattccggatcttaattcggccagaaatgttccccaaggactggactgttatgcgcctagtcgcaaacaacgtgatcatcacaacagtgctatacctgtccgacgcactgagaaagaatttccttaatgagaacttcgactacaaaatctgggattcttacttttatctggcggtaattttcattaatcagttatgcctccagctcgaaatgtttactcccagtaagaagaagaaagtgttggaaaaatacggcgatatgcgcgtcactatgggctgcgaaatcttcagtatgtggcagaacctgggtgagcacaagctccattttatacctgcccttatcggcccttttctggaagtaacacttatacctcagcccgacctccgcaacgtcatgatcccgatattccacgacatgatggattgggaacagagacgcagcgggaattttaaacaagtggaagctaaactgattgataagctggacagtctgatgagcgagggcaagggcgacgaaacctaccgggaactctttaattcaattataccattgttcgggccatatccctccctgctgaaaaagattgagcgggaaacttggcgcgagtctggcgtaagtctgatagccactgtgacccgacttatggagcgtctcctggattaccgagattgtatgaagatgggggaggttgacggcaagaagatcggttgtacggtaagcctgcttaacttctacaagaccgagctaaacaaggaggagatgtacatccggtatatccataagctttacgacctgcacctgaaagcacagaattttaccgaggccgcatacacactcctactgtatgacgagctgctggaatggtctgatcggccactgcgcgaattcttgacctaccccatgcagaccgaatggcagcgtaaagagcaccttcacctcactattatacaaaacttcgatcgcggtaaatgctgggagaacggaataattttgtgcagaaagatcgccgaacagtacgagagttattacgattaccgaaacttgtccaaaatgcggatgatggaggcaagcctgtacgacaaaatcatggatcagcagcggctggaaccggagtttttcagagtggggttctacggaaagaagttccccttctttctacgaaataaggagttcgtgtgtaggggtcacgattacgagaggttggaggccttccagcaacggatgctcaatgaattccctcatgccattgccatgcagcatgctaatcagcccgacgagactatcttccaggctgaagctcaatatcttcagatctatgcggtcaccccaatccccgagagtcaagaagtgttacagagagagggagtcccggataacattaagtcattttacaaagtgaaccacatctggaagtttagatacgacaggcccttccataaggggacaaaggacaaggagaatgagtttaaaagcctctgggtagagcggacatccctctacctcgtccaaagtctgccgggtatatcgaggtggttcgaggttgaaaagagggaggtggtggaaatgtctcccctagagaatgcaatagaggttctagaaaacaaaaatcagcagctgaagacactgatatcccagtgccagactcgccagatgcagaacatcaatccactcactatgtgtttgaacggtgtcattgacgccgcagtgaacggcggtgtttcccggtatcaggaagcctttttcgtgaaggagtatatcctctctcaccctgaggatggggagaaaatcgcacggctcagagagttgatgcttgaacaggcgcagattctggagtttggacttgccgtgcatgagaagttcgtgccacaagacatgagaccactacacaagaagctcgtggatcagttttttgttatgaagtcgtctctcgggatccaggagttttctgcatgcatgcaagcaagtcccgtccacttcccaaatggtagccccagagtttgtaggaactcggccccagccagcgttagtcccgatggtacacgtgtcatcccaagacggtcccccctgtcttatcccgctgtgaacagatactcatcctcttctctttcctcccaggcttcagccgaggtcagcaatattaccggacaatcagagtcttcggacgaggtgttcaacatgcagccctctccctcgacctcctcactttcctcaacgcactccgcctcaccgaacgttaccagttccgcccctagttcggctcgtgcctccccactgctttctgataagcataagcactcgcgagagaacagttgtctttccccaagagaaaggccttgtagcgctatttatcctaccccagttgagcccagccagagaatgctatttaatcatattggggatggagctctgcctcgctcagatcccaacctgtcagcccctgagaaagcctccccagccaggcataccactagtgtctcaccatctccggctgggaggagccccttaaaaggtagcgtccagtcttttacccccagcccggtggagtatcattcccctgggctgattagcaactcaccagtgctgtccggttcatattcctcaggaataagttcgctgtcccgctgctccacatcggagaccagcggctttgagaatcaagttaacgagcaaagtgctcccctccccgtccccgtgccagtgcctgtgccgtcctatggtggtgaggaacctgtgaggaaagagagcaaaactcctccaccatacagtgtgtacgagcgcaccctccgacggcctgttccactgcctcactcactttcgatccctgtaactagcgaaccacctgccttacccccaaagccactagccgcaagatcatcacatcttgagaatggtgcaaggcgcacagatccaggtccgagaccgcgaccactgcctcgcaaggtctcccaactcta

SEQ ID NO: 220449 - DNA, 5864 bp, synthetic construct
  misc_feature 1..5864: note = Description of Artificial Sequence: Synthetic coding sequence
  source 1..5864: mol_type = other DNA
gttatcgcaagctttagaggcacagttccatacgggttaagtttggaaattggcgatactgtgcaaatcctagagaagtgtgacggatggtataggggttttgctctgaaaaatcccaacattaagggcattttccctagtagctacgtgcatttaaagaacgcctgcgtgaaaaataaggggcagtttgagatggttattcccactgaggactccgtgattaccgaaatgaccagcaccttgagggactggggcactatgtggaagcaactgtacgtgcgcaatgaaggagatttgttccaccgcttatggcacataatgaacgaaatattagacctgcgcaggcaggtgctcgttggacacctgacacacgatcggatgaaggacgtgaaacgccacatcactgccaggctagactggggtaacgagcagctgggcctggacctggtgccccgtaaagaatatgctatggtcgatcctgaagacataagtattacagaactgtataggctcatggaacaccggcatagaaagaaggacacaccagtgcaggctagtagtcatcatctattcgtgcaaatgaaaagcctgatgtgctccaacctaggagaagagttagaggtcatcttcagcttgtttgattccaaagagaaccggccaatctcagagcgtttctttctgaggctcaaccgcaacgggttacctaaggctcctgataagccggagcggcattgctctcttttcgtggatctgggaagcagcgagttgcggaaagatatttatattacagtgcatatcattcggatcggcagaatgggcgcaggcgagaaaaagaatgcatgcagcgtgcagtatcggagaccttttgggtgtgctgtactgtctatcgcagatctccttactggggaaacaaaggacgatctcatcctcaaagtgtacatgtgcaacacggagtcagagtggtaccaaattcacgagaatatcattaagaaactcaatgctcgatacaatctgactggatctaatgctgggttggccgtcagtcttcaactcttacacggcgacatagagcagattcgtagggaatattcgtccgtcttttctcacggtgtaagtatcactaggaagctgggattctccaatatcatcatgccgggagaaatgcgcaatgacctgtatatcacgatcgaaagaggagagtttgaaaaggggggaaagagcgtcgcccgaaatgtagaggtcacaatgttcattgtcgactcttccggacaaactctcaaggattttatctcttttggatcaggagagcctcccgctagcgagtaccactcctttgtgctttatcataacaacagccctagatggtcagagctgttgaagctgcctatccccgtggacaagtttcgaggggctcatatccgcttcgagtttcggcactgttccaccaaagagaaaggcgaaaagaagcttttcggattttcattcgtccctttgatgcaagaagacgggagaaccctgccggatggtacccacgaattaatagtgcacaagtgcgaagagaataccaaccttcaggacaccactaggtacctgaaactccctttctcaaaaggtatatttcttggaaacaacaaccaagccatgaaggccacaaaagaaagcttctgcataacctcattcttatgttctactaagctcactcagaacggtgacatgcttgatctcctcaagtggagaacccaccctgacaagattaccggatgtctttccaagttgaaagagatcgatggtagcgaaatagtaaaatttcttcaagatacactggacactcttttcgggatcctggacgaaaactctcaaaaatacggatctaaagtttttgattccctcgttcatatcattaatcttctccaggatagcaagttccaccactttaagcccgtcatggatacgtacattgagagccatttcgccggagcattggcctacagagacctcatcaaagtcctcaagtggtatgttgacagaatcactgaagcggagcgacaggagcacatccaggaagtgctcaaagcccaggaatacattttcaagtacatagtgcagtcgcgtcgcctgttttctttggccacaggtggccagaacgaagaggaatttagatgctgcattcaggagctgctgatgtcggtgcgcttttttctgagtcaagaatctaaggggagcggcgctttgagccaaagccaggctgtgttcttgtcaagttttccagctgtctatagcgaattactgaagcttttcgacgtgcgcgaagtcgcgaacctggttcaggacacgctcggatctttgcctaccatccttcacgtggatgatagtctgcaggcaattaagctgcagtgcattggaaagactgtggaaagtcagctgtacacgaacccagattcccggtatattctgctgcccgttgtattgcatcatcttcatatacacttgcaggagcagaaggatctgatcatgtgcgctagaattttgtccaacgttttctgtttgattaaaaaaaacagtagcgagaagtccgtgctagaggagattgacgtgattgtcgcaagcctcctggatatactcttacggactatcctggaaatcaccagcaggcctcaaccttcctccagcgccatgaggttccagttccaggacgtaactggagagttcgtagcttgcctgctgtcactgctccggcagatgacagaccgacactaccagcagctcctggactctttcaatactaaagaggaactgagagattttctgcttcagattttcactgtcttcagaatcctcattagacctgaaatgttccccaaggactggactgtgatgagactggtggctaacaacgtgataattaccacagtactgtacctttccgacgctctccggaagaattttctgaatgagaattttgattacaagatttgggactcctatttctatctcgccgtgatcttcataaaccaactgtgtctccagctcgagatgttcactccaagtaagaagaaaaaagtactcgaaaaatatggtgacatgagagtgaccatggggtgtgagattttcagtatgtggcaaaaccttggtgaacacaaactgcactttataccggctcttatagggccattcttggaggtgaccctgattcctcaaccagacctcaggaatgtcatgatccctattttccatgatatgatggattgggaacagcgcagaagcggcaattttaagcaggtggaggcaaaattgatcgataagttggattctctgatgtcagaaggcaaaggggacgaaacttacagagagctgttcaattctattcttttgaagaaaatagaacgcgagacttggcgagagtctggcgtgtctttgattgccacggtgacacgattaatggaaaggctgttagactaccgtgattgtatgaaaatgggcgaagtggatggtaagaagatcggctgcacagtctcccttttgaacttttacaagactgagttaaacaaggaggagatgtatattcggtatattcacaagttatatgatctgcacttgaaagcgcagaactttaccgaagctgcctacaccctactactctacgacgaactgctcgaatggtctgacagaccccttcgcgagtttttgacctaccccatgcaaaccgaatggcagcgaaaagaacacctccatctgactattatccagaattttgaccggggtaagtgctgggaaaatggcatcattctttgtcggaaaatcgcggagcagtatgaaagttattatgattaccggaacctgtccaagatgaggatgatggaagcaagcctgtacgacaagattatggaccaacaacggctggagcctgaattctttagggtggggttctacggtaaaaaattcccttttttcttacgtaataaggagtttgtgtgtaggggccacgattacgaaaggctggaagctttccagcaacggatgctcaacgagtttcctcatgccattgccatgcagcacgctaatcagccagatgagacaattttccaggcggaggcccagtacttacaaatttacgcagttacccccatcccggagtcacaggaggtgttgcagcgagaaggggtgccggataatattaagtccttttacaaagtgaaccacatatggaagtttcggtacgatcggccttttcataaggggacaaaagataaagagaatgagttcaagtctttgtgggtcgaaagaacaagtctttatcttgtgcagagtttacccggaatcagccggtggtttgaagtggagaaacgtgaagtggtggagatgtcacccctagaaaacgcaattgaagttcttgagaataagaaccaacagctcaagaccctcatttcgcagtgccagactagacaaatgcaaaatattaatcccttgaccatgtgtctgaacggagtgatcgatgcggcagtcaacgggggagtgtcaagatatcaggaggccttcttcgtcaaggaatatattctgtcgcatcccgaggacggggaaaaaatcgcacggctcagagagctgatgctggaacaggcccaaatactggagtttggactggccgttcatgagaagtttgttccccaggatatgcggcctctgcataaaaagcttgtcgaccagttctttgtcatgaagtcgtcccttggaatccaggaattcagtgcctgcatgcaggcttcccccgtgcactttcccaacggatctccaagggtctgccgaaatagcgcgccagcatcagtctcccctgacggaacccgagtcatcccaaggaggagtcctttgtcctaccccgctgtcaatcggtactcttcaagttccctgagttcccaggcctctgcagaggtgagtaacatcactggccagtcggagagtagcgatgaggtcttcaacatgcagccttcccccagtacaagcagcctgtcatccactcatagtgcctcacctaacgttaccagcagcgccccatcatcagctagagccagcccacttctctccgacaaacacaaacatagcagagagaactcttgcctttccccaagagagcggccatgtagtgcaatttacccaactccagtcgagccatctcagcggatgttgttcaatcatatcggagatggtgctttacctaggtctgatcctaacctgagtgctcctgagaaagccgtaaatccaactccatcctcctggtccctcgactcaggaaaggaggccaaaaatatgtctgacagcggcaagctgatttcccctccagtacccccacgcccaacacaaaccgcttcccctgctagacacacaaccagtgtgtctccaagtcccgctggcaggtctccactgaagggatccgttcagagctttacccctagcccagtagagtaccattctccaggactcatttctaacagtcccgtcctgagtgggtcctactccagcggaatcagttctctgtcacggtgctcaacctcagaaacttccggattcgagaaccaagttaatgagcaatctgctcctctgccagtccccgtgcccgtgccagttccctcatacggcggagaagaacccgtgcggaaggaaagtaaaacccctccaccttattccgtgtacgaaagaacattgcgaaggcccgtgcctttgccgcactcattgtctatacccgttacttcagaaccaccagctcttccaccgaagcccctggccgctcgcagctctcatcttgaaaatggggcaagaaggacggatccaggacctcggcctcgaccccttccgaggaaggtgtctcaactgta

SEQ ID NO: 220450 - DNA, 5927 bp, synthetic construct
  misc_feature 1..5927: note = Description of Artificial Sequence: Synthetic coding sequence
  source 1..5927: mol_type = other DNA
atgtggatacccaccgagcatgaaaaatacggcgtggtgatcgccagttttcggggtactgttccttatggactttccctcgaaataggcgatacagttcagattctggagaaatgtgatggctggtaccgcggattcgcattaaaaaaccccaacatcaagggcatcttcccgagttcctacgtgcacctcaagaacgcatgcgttaagaacaaagggcaattcgagatggtgattcctacagaggatagtgtgattactgaaatgacatctacgctgcgggactggggaaccatgtggaaacagctctatgttcggaacgagggcgacctgttccaccggctctggcacatcatgaacgaaatcctagacctccgtcgtcaggtcttggtcggccatctgactcatgatcgtatgaaagacgtcaaacgacacattacggcgcgactggattggggcaacgaacaattagggttagacctggtgcctcggaaggagtatgctatggtggatcctgaggacatatcgatcacagagctctatcggctcatggaacaccggcataggaagaaggacactccagtgcaggcctcctctcaccatctctttgtgcagatgaagtctttaatgtgcagcaacctgggtgaggagctggaagtcatttttagcttattcgattccaaagagaatcgccctatctcagaaagatttttcctgcgactgaatagaaacggcctcccgaaggccccagacaagccggagcggcactgttccctgttcgtggatctcgggtcctctgagctgagaaaggacatctacataacggtgcatatcataaggatcggtaggatgggagcaggtgagaaaaaaaatgcatgtagcgttcagtaccggaggccattcggctgcgccgtgctgtccatcgcagatctgctgactggtgaaaccaaagatgatctcatcctaaaggtgtacatgtgcaatacagagtctgagtggtatcagattcatgagaatattattaagaaacttaacgccaggtacaacctgacaggctctaatgcgggtctggccgtgtcactgcagttattacacggggatattgagcagattcgtcgggaatactcatcagtgttcagtcacggagtgagcattacaagaaaactcgggttctcaaacatcataatgccgggtgaaatgaggaacgatctatacattaccatcgaaaggggcgagttcgaaaaaggcggtaaatccgtggctagaaatgtagaggtcacaatgtttatagtggacagttcagggcagaccctgaaagactttatcagttttggttccggagaaccacccgcttccgaatatcactccttcgtcctgtaccataacaatagtcctaggtggtcagaactcctgaaattgccaatccccgtggataagtttcgcggagcccacataagattcgagttccggcactgctccacaaaggaaaaaggcgagaaaaaactgttcgggttctcatttgttcctctgatgcaagaagatggacggacactgccagatggcacacacgaactgatcgtccacaagtgtgaggaaaacacgaacctccaggatacaacccgatatctgaaactcccatttagtaagggaattttcctgggaaataataaccaggccatgaaggctaccaaggaaagtttttgtataaccagcttcctgtgctctaccaaactcacccagaacggcgacatgctggaccttctgaaatggcgtactcaccctgacaaaattactgggtgcctatcaaaattgaaagagattgatggcagtgagatcgtgaaattcctccaggacactctcgataccctgttcgggattttagacgaaaattcacagaaatacggtagcaaggtgtttgacagtctggtgcatatcatcaatctgctccaagatagcaagtttcatcactttaaaccagtcatggacacttacattgaaagccacttcgcaggtgccctcgcctaccgggacctgattaaggtgctgaaatggtatgtcgacaggattactgaggcagagagacaggaacacattcaggaggtcctgaaagcgcaggaatatatcttcaagtacatcgtgcagtctcgcaggctcttctcgctcgctaccggagggcagaacgaagaagagttcaggtgttgtatccaggagctgttgatgtctgtcaggtttttcctgagtcaggagagcaagggcagtggcgcattgtctcaatctcaggcagttttcctgtcatcctttccggctgtgtactcagagctgctcaaactattcgacgtgagagaagttgccaacctagttcaggataccctcggctccctccccaccatactacacgtggatgattccctgcaagctattaagctgcagtgtatcggcaaaacggtggaaagtcagctatatacaaatcctgactctaggtacattcttctaccagtggtactgcaccacctgcacattcatctgcaggagcagaaagatctgattatgtgcgccagaatcctttccaacgtgttttgtctgatcaaaaaaaactcttctgagaagagcgtcttggaggaaattgacgtaattgtggccagtctgctggatatcttgttaaggacaatcctagaaatcactagccggcctcagccttctagcagcgctatgcgctttcagtttcaggacgttaccggggagttcgtggcttgtctcctgagccttcttcgccaaatgactgatcgccattatcaacaactgttagacagtttcaacacaaaggaggaactgagagactttctgctgcaaattttcactgttttccgaatactgatcaggccggaaatgttccccaaagattggacagtgatgcggcttgtagccaacaacgtgataatcaccaccgtgctgtacttgtccgatgctctgagaaaaaattttctgaacgagaacttcgattataagatctgggatagttacttctatctcgccgtgatttttatcaatcagttatgtctccaactggaaatgttcaccccatcaaaaaagaagaaggttctggagaaatatggcgacatgcgggtgacaatgggctgtgaaatattttctatgtggcaaaatctgggcgagcacaagttacatttcatccccgcactgattggaccgtttctcgaagtcaccctgattccccaacctgatctgagaaacgtcatgatcccaatcttccacgacatgatggattgggagcaaagaaggtccggcaatttcaagcaggttgaggctaagttaatcgacaagctggacagtttgatgtcagagggaaagggagacgagacatatcgtgagctttttaacagtatcattcctctgtttggcccatacccttcactgttgaaaaaaattgaaagggagacatggcgtgaaagtggcgtgtcactgattgccacggtgacccggttgatggaaaggttactcgactatagagattgcatgaaaatgggtgaggtggatggaaagaaaataggctgtacagtgtcgttgttgaacttctacaaaacggagctgaataaagaagagatgtacattcgttacattcacaaactctatgatcttcatttaaaggcccaaaatttcacagaagctgcatatacactgcttctttacgatgaattgctcgagtggagtgatcgccctctgagagaatttctcacatatcctatgcaaaccgagtggcagagaaaggagcatctccatctgaccattatccagaacttcgataggggaaagtgctgggagaatggtatcatcctgtgccgaaagatagctgaacaatacgaaagctattacgattatcgcaatctgagtaagatgcggatgatggaagcttctctatatgacaaaatcatggatcaacagagactggagccagagtttttccgcgttgggttctacggaaagaaattccccttctttttgcgaaataaggaattcgtgtgccggggacatgactacgagcgcctggaagccttccaacagcgtatgctcaatgagtttcctcacgccatcgccatgcagcacgccaaccagccagatgagactatatttcaagcagaggcccagtacctgcaaatctacgcagtaacccccatccctgaaagtcaggaagttcttcagagggagggcgtccccgacaacataaaatcattctacaaagtaaaccatatctggaaattcagatacgaccgaccctttcacaaaggaactaaggacaaggagaatgaatttaagtcgctctgggtggagaggaccagcttgtatctggttcagagcctccccggtatcagccggtggttcgaggtggagaagagggaagtcgttgagatgagcccactggaaaacgcgatcgaggtcctggagaacaaaaaccagcagctgaaaactttgatctcacagtgtcagacccgccaaatgcagaatataaaccctctcacaatgtgtcttaacggagtaattgacgcagctgtgaacggaggagtaagccggtaccaagaggccttttttgtcaaggagtatatactgtctcacccagaggatggtgaaaaaattgctcggttgagggaacttatgctagagcaagcacagatactggaattcggactggctgttcatgaaaagtttgtgccccaggacatgaggccactgcataaaaagctagtggatcagttcttcgtcatgaaatccagtttagggattcaggagttttcagcctgcatgcaggcttctcccgtacacttccctaatgggagcccaagggtctgtcggaacagcgcccctgcaagcgtgagccctgacgggacgagagtgatccccagacggtctcccctgtcctatccagccgttaataggtattcctcatccagcttatcaagccaggcatctgctgaagtctcaaatattactggtcagtccgagtcctcagatgaggtttttaatatgcagccttctccctccaccagcagcttgtcttcaactcacagcgctagccctaatgtcacttcctccgccccatcatcggcaagagctagccccttactctctgataagcacaagcacagcagggagaactcgtgtctgtcccctcgtgagaggccgtgctcagcaatttaccccacacccgtggaaccttcccagagaatgctctttaatcacatcggcgacggagctttgcctaggtctgatcctaacctgtctgctccggagaaggcagtgaatcctacgccctcatcttggtccctagactctggcaaagaggctaaaaatatgagcgacagcggaaagctaatatcccccccagtcccgcctcgccctacccaaacagcctctccagcacggcatacaacctctgtatctccctctcccgctggaagatctccactgaaaggctctgtgcaatctttcacaccatcaccagtcgaataccatagccctggcctcatctccaatagccccgtgctgtccgggtcatacagcagtggcatatcctccctgtcacggtgcagcacgtctgagaccagtggtttcgaaaaccaagtcaatgaacagtccgctccactgccagtgcctgtgcccgtgcccgtgcctagctacggcggtgaggaacctgtgcggaaagaaagcaaaactccccctccttactcggtatacgaacgcaccctgagacgccctgtaccattgccacattccctgtctatccccgtcacatcagaacctcccgctctgcctcccaagcccctcgcagccagaagtagtcacttggaaaacggagccagacggactgacccgggtccacgccctcggccactgccccgtaaggtgtcccagctgta

SEQ ID NO: 220451 - DNA, 5900 bp, synthetic construct
  misc_feature 1..5900: note = Description of Artificial Sequence: Synthetic coding sequence
  source 1..5900: mol_type = other DNA
atgtggatccccaccgaacatgaaaagtacggcgtggttattgctagtttcaggggcacagtcccatacggattgtccttggagattggagataccgtccagattctggagaaatgcgatggttggtaccgcggttttgccctgaaaaaccccaacatcaagggcattttcccctcatcctacgttcacctgaaaaacgcctgcgtcaagaataagggacagtttgagatggtaataccgactgaggattcggtcataacagagatgacatctactctcagagactggggtactatgtggaagcagctctacgtacgaaacgaaggtgacctattccatcgtctgtggcacattatgaatgaaattctggatttgcggaggcaggttttggttggtcacttaacccatgacaggatgaaggatgtgaagcggcatattaccgcccgtttagattggggaaacgagcagctgggcctggaccttgtgcccaggaaggagtacgccatggtggaccccgaggacatctctattactgagttatatagacttatggaacacaggcatcgcaaaaaggacacacctgtgcaggcatccagtcaccacctttttgtccagatgaagtccctgatgtgttcgaatctaggcgaggaacttgaggtaatcttctctctgtttgatagcaaagagaatcgccctatttcggagcgcttcttcttgcgcctgaatcggaacgggctgcctaaggcaccagacaaacctgagagacactgttcgttattcgtggatctcgggagcagcgagctaagaaaggatatttacatcactgtacacatcattcgcatcgggcgtatgggtgcaggcgaaaaaaagaatgcctgttccgtccagtataggagacctttcggttgcgcagtcctgtccatcgcagacctactcactggcgaaaccaaggacgacctaattctgaaagtttacatgtgtaatacagagagtgagtggtaccagattcacgagaacataataaagaaactgaacgcccgttataatttgaccggctctaacgccggtcttgccgtgtctctgcagctcctgcatggcgatatagagcaaattcgcagggaatactccagtgtgttctctcacggagtgtccataacacgcaagcttggcttctccaatataattatgccgggagaaatgcgcaatgatctctacattaccattgagagaggcgaattcgaaaaagggggaaagtcagtcgccaggaatgtggaggttaccatgtttatcgtcgatagctccggacagaccttgaaggatttcatctcattcgggagcggtgagccacctgccagcgaataccactcctttgtcctgtaccacaacaacagcccacggtggagcgagctgctgaagttacccatccctgttgataagttccgtggggcacacatccgcttcgaattcaggcattgttccactaaagaaaaaggggaaaagaaactattcgggtttagcttcgtgcctctgatgcaggaagacggaagaactctgccggacggaacacacgaactcattgtccacaagtgtgaggagaacaccaatctgcaagacacgacacgctatcttaagctgccattcagcaagggcatttttctcggcaacaataaccaggccatgaaggctacaaaagaaagcttctgcatcaccagctttctgtgttctaccaaacttacccagaacggggacatgctggacctgctgaaatggcggacccaccccgataagatcaccgggtgtctgtctaagctgaaagagatcgacgggtctgagatcgtcaagtttctccaggacactctggatacattgtttggcattctggatgaaaattcccagaaatatggaagcaaagtattcgattcactggttcacatcatcaacctcctccaggattcaaagttccaccattttaagccagtcatggatacctacatcgagtctcatttcgctggggctctggcttatcgggacttaataaaagtgttgaagtggtacgtggacaggatcactgaggcggaaagacaagagcatattcaggaggttctgaaggcgcaggagtacatattcaagtatatcgtccagagcagacgactgtttagcctcgccactgggggtcagaatgaggaggaatttcgttgctgtatccaagaactcctgatgtctgtgaggtttttcttgagccaggaatccaaagggagtggagctctgagtcagtctcaggctgtctttttatcctcattcccagccgtgtattctgagctccttaaactgttcgacgtccgggaagtagccaatctggttcaagatactctgggctcactgccaactatcttacatgtagatgactccctgcaggccataaaattgcaatgtatcggaaaaacagtagagagccaactgtacactaatccagatagcagatatatcctactccctgttgttttgcaccacctgcatatccacttacaggaacagaaggatctgattatgtgcgcgagaatactgtccaacgtgttttgcctcataaaaaaaaacagctctgaaaagtccgtgctcgaggagatagatgtcattgtggctagcttgttggacatactcctgcgaacaattctggagattacaagcagaccccagcctagtagtagcgccatgaggttccagtttcaggacgttaccggagagtttgtcgcctgcctactgagcctgttgcggcagatgaccgaccgtcattatcaacagctgttggacagttttaacaccaaggaggaattacgcgacttcctcctccagatctttactgtctttcggatccttattcgtccggagatgttccctaaagactggacggtcatgaggttggttgctaataatgtaataattactactgtattatatctgagtgacgccctgaggaagaatttcttgaacgaaaatttcgattacaaaatctgggacagttacttctacctcgccgtgatattcatcaaccagctttgtctgcaattggagatgttcacaccctccaaaaaaaaaaaggttctggaaaaatacggggacatgcgggtaactatgggttgtgaaattttctccatgtggcagaatctcggggaacataagcttcattttatccctgctctcatcgggccattcctggaggttacccttattccccagcctgatctgcgcaacgtcatgatccccatattccatgacatgatggactgggaacaaagacgatccggcaatttcaaacaagtggaagctaaacttatagacaagctcgattccttgatgagcgaaggtaagggagatgagacatacagggagctgtttaactctatccttttgaagaagatcgagcgtgaaacctggagggagagcggagtgtcgctgattgcgaccgtcaccaggcttatggagcgcctgctcgattacagggattgcatgaagatgggcgaggtggacggaaaaaagattggctgcacggttagtctgctgaacttttataaaaccgagttgaacaaggaggagatgtatataagatatatccataagctatacgacctccatctgaaagcccagaattttacagaggccgcatatacactgctgctatacgatgaactgctggagtggagcgatagaccactgcgcgagttcctgacataccccatgcagacagagtggcagagaaaagagcatctccacctgacaatcatccagaatttcgataggggaaaatgttgggaaaacggaatcatcctgtgtcgcaagatcgcagagcaatatgagagctattatgattaccgaaacctgtcgaagatgcgcatgatggaagcatccctgtatgataaaatcatggaccagcaacgattagagcccgagttctttcgcgtaggtttttacggcaagaagttccccttcttccttcggaataaggaatttgtctgtaggggacatgactacgaaagattagaggcctttcaacaaagaatgttaaatgaattcccacacgccattgctatgcagcatgcaaatcagccagacgagacaatttttcaggctgaggctcagtatctccagatttatgccgtcacaccgatccccgagagccaggaagtacttcagcgggagggcgtgcctgacaacatcaaaagtttttacaaagtcaaccacatttggaaatttagatatgatcggccatttcacaaggggaccaaggacaaagagaatgagtttaaatctctctgggtggagcggacctcattgtacctcgtgcaaagtctgccaggaatttcccgctggttcgaagtggaaaagagagaagtggtcgaaatgtcacctctggaaaacgctatagaggtgctcgagaataaaaatcaacaactcaagaccctaatatctcaatgccagacccggcagatgcagaacatcaatcccctgaccatgtgcctaaacggagtcatcgatgctgccgtgaatggtggggtgtcacgatatcaagaagcctttttcgtgaaggaatacatcctgtcccacccagaggatggcgagaagatagctagacttagggagctgatgctggaacaggcacagatccttgagtttggactggccgtgcacgagaagttcgtgccccaggacatgcggccactgcacaagaagcttgtagatcagtttttcgtcatgaaatctagtctggggattcaggagttcagcgcttgcatgcaggcatcacccgtccactttcctaatggtagccccagagtctgtcggaattctgccccagctagtgtctctcccgacgggacccgcgtgataccaaggcggagccccctttcataccccgctgtaaatcgttactccagctccagccttagctctcaggcgtctgccgaagtgtctaatatcacgggtcagtcagagtcatcagacgaggtatttaacatgcagccaagtccgagtactagctccctgagcagcactcattcagcgagccctaatgttacaagttccgccccatcctctgccagggcatcaccactgctgtcagataaacacaaacattctcgggagaattcttgtctgtcgcctcgagagcgaccttgctcagccatatatcctacccccgttgagccctcccaacggatgctcttcaatcacatcggggatggagctctgccgagatcagaccccaatctgtcagccccagagaaagccgttaatccaacacccagctcctggagcctggatagtgggaaagaagctaagaatatgtcagatagcgggaagctaattagcccccctgtgccgcctcgtccaacccaaacggcttcacccgctcgacataccacctcagtcagtccttctcccgcaggtaggagccccctgaaggggagcgtccagtcctttacaccctccccagtagaatatcatagtcccggactgatcagtaattcaccagtactcagtggctcctactcttcaggtatctcaagcttgtcccgatgctccacaagcgaaaccagcggattcgagaaccaggtcaacgagcagagcgctcccctaccagttccagtgcctgtacctgtaccgagctatggcggagaagagcccgtgcggaaagagagcaagacaccccctccatattccgtgtacgagcgcaccctgcggaggcccgttccattaccccatagcctaagcatccccgtgacctcagagccacccgcattaccccctaaaccactcgccgctagatcgtctcatctagaaaatggagccagacgcacggatcctggacctcgcccaaggcccctacctagaaaagtcagtcagctgta

SEQ ID NO: 220452 - DNA, 2550 bp, synthetic construct
  misc_feature 1..2550: note = Description of Artificial Sequence: Synthetic coding sequence
  source 1..2550: mol_type = other DNA
atgaagatgcacagtaccgaaaggattccactctttggaccttatccttctctactgaagaagatagaaagggagacctggcgcgaaagcggagtgtcacttatcgccaccgtgactcggctgatggaaaggcttttggattacagagactgtatgaagatgggcgaggtggacggaaagaagattggatgcaccgttagcctgctgaacttttataaaaccgaattgaataaggaggaaatgtacatcaggtatattcacaaattatacgacctgcatctgaaagcccagaactttactgaagccgcttataccttactcctgtatgacgagctcctggaatggtccgaccggccattgcgggaattcctcacataccccatgcagaccgaatggcagaggaaagagcatctgcatctaacaattattcaaaactttgaccgcggaaaatgctgggagaatgggattatcctgtgtaggaaaattgccgaacagtatgaaagttattacgactatcgtaatctgagtaaaatgcgcatgatggaggctagtctgtatgataagattatggaccagcagcggctagaaccagagttctttagagttggattttacggaaaaaaattccccttctttctcagaaacaaggagttcgtgtgcagggggcacgactacgaacgccttgaggccttccagcagcggatgctcaatgagtttccccatgccatcgccatgcagcatgcgaaccagccggacgagactatttttcaagcagaggcccagtacctgcagatctatgctgtgacaccaataccagaaagccaggaagttctacagagggagggggtgccggataatattaagtctttctataaggtgaaccatatatggaaattcagatatgatagaccgttccataaaggtaccaaagacaaagagaacgaattcaagagcctttgggtcgaacgcacatcattgtatcttgtccaatccctccctggtatttcgagatggttcgaggtggagaaacgggaggtggttgagatgtcaccactggaaaacgctatcgaggtcctcgaaaataagaaccagcagctcaagacactgattagtcagtgtcaaactagacagatgcagaacatcaatcccctcactatgtgtctaaacggggtcatcgatgctgctgttaacggcggagtgtccagatatcaggaggctttctttgttaaggagtacatcctctcacatcccgaagatggagaaaaaatcgcaagactgagggagctaatgctggagcaggcccagatactcgagtttggactcgcagtccatgaaaagttcgtaccacaggatatgaggcccctgcacaaaaaactggtcgaccaattctttgtaatgaaatcttctctcggtattcaggagttttccgcatgtatgcaggccagcccagtccatttccctaatggcagccctcgcgtctgccgtaatagtgcacccgcaagcgtgtccccagatgggacccgcgtgattccgaggaggagtcccctgagctacccagccgttaacagatacagctcatcatctttgtcctcacaggcgtccgcagaggtttccaacatcacagggcaatcggaaagttccgacgaagtgttcaacatgcagcctagccccagcacctcaagcctatcctcgactcacagtgcaagtcccaacgtcacatcatctgcaccttcttccgccagggctagccctctgttatccgataagcacaaacatagccgggagaactcctgcttgagtccacgggaacgtccatgttctgccatctatccgactcctgttgagccaagccagagaatgctgttcaaccacatcggtgacggtgccttaccacgcagtgatcccaacctgtctgcacccgagaaggccgtaaaccccaccccaagcagttggtctcttgactcagggaaggaagccaaaaacatgtccgactctggcaaactcatttctccccctgtccctccacgacccactcagactgcttcccccgctaggcatactaccagtgtctctccgtcgccagcagggaggtcccccttgaaggggagtgtgcagtcctttactccaagcccagtcgaatatcatagccctggtttgatctcaaactcacctgtgctgtctggctcttactcctctggcatttctagcctgtcccggtgcagcactagcgagacaagtgggttcgaaaaccaagtgaacgagcaatcagctcccctaccagtccccgttcctgtgcccgtgccgagttatggcggtgaagagcccgttcggaaggaatcaaagaccccacccccttactcggtgtatgaacgcaccctgcgaaggcccgtaccgctgccccacagtctgtccatccccgtcacgagtgaacccccagctttgcccccaaaacccttagcagctcgctcgagtcatttggagaatggcgctaggcgaaccgatcccggtccgaggcccagaccactgcccagaaaagtaagtcagctttag

SEQ ID NO: 220453 - DNA, 3318 bp, synthetic construct
  misc_feature 1..3318: note = Description of Artificial Sequence: Synthetic coding sequence
  source 1..3318: mol_type = other DNA
tggatcccctctgagaagcaaacattttttaccgttattgcatctttccgtgggaccgtcccgtacggtctcagcttagagattggcgatacggtgcagattctggaaaaatgtgatggatggtacaggggatttgccctcaaaaacccgaacatcaaaggaatttttcccagtagctacgtgcatctgaaaaatgcttgtgttaaaaacaaaggccaatttgaaatggtgatcccaaccgaagacagtgttattaccgagatgaccagcaccctgagggactggggtaccatgtggaagcagctgtatgtccgaaacgagggtgacctattccatcgtctatggcacataatgaatgagattcttgatttgcggagacaggtgcttgtgggccacctcactcacgacaggatgaaagatgtgaagagacatatcacagcccgactggattggggaaatgaacagctgggtctcgacctggtgccgaggaaagaatacgcaatggtggatcctgaggacatctcgataacagagctctatcggctcatggagcaccggcataggaaaaaagatacaccagtccaggcgagcagccaccacttatttgtacagatgaagtcactgatgtgttccaacctaggtgaggaacttgaagtcatattttcacttttcgactccaaggagaataggcccatttccgagaggttcttccttcggctaaaccggaacggactcccaaaggctcccgacaagccagaaagacactgcagcttattcgtggacttaggatccagcgagctccggaaagacatctatattacagtccacatcattcgcattggaaggatgggagccggagagaagaagaacgcctgttctgttcagtaccgaagaccattcggatgcgcagttctgagcattgccgacctactcacaggtgaaactaaggatgatctaattctgaaagtatatatgtgcaatacagagagtgagtggtaccaaatccacgaaaacatcatcaagaaattaaatgcacggtacaacctgaccggctctaatgccggtttggccgtctctctccaactgctgcacggggatattgagcagatcaggagggagtactcatctgtcttttcacacggggtgtccataacgagaaagctcgggttttccaatattatcatgcccggagaaatgaggaatgacctgtatatcactatcgagcgtggggagtttgagaaaggcggaaaatctgtggccaggaacgtcgaagtcaccatgttcatcgtggactcttcaggtcaaacgctcaaggactttatttccttcggatccggggaacctcctgcttctgagtaccactcttttgtgctctatcacaataactcccccaggtggtcagaactgttaaagcttcccatccctgttgataaattcaggggggcacatattcgcttcgagtttcgtcactgcagcacgaaagagaagggagagaaaaaattgtttgggttcagcttcgtccctctgatgcaggaagacggtaggacattacctgatggaacacacgagctgatcgtgcataagtgtgaggaaaacacaaatctccaggacacaacaaggtaccttaaactaccattctctaaaggaatctttctcggaaacaacaaccaggctatgaaagcaaccaaggagagtttttgtataaccagttttttgtgctctacaaaactgacccagaacggtgatatgctggacttgctcaagtggcgtacccaccccgacaaaatcacggggtgtctctctaaactaaaagagattgatggtagcgagatcgttaagtttctgcaggacaccttggatacactgttcggcatcctagacgaaaacagtcagaaatacggctctaaagtgtttgacagcctggtccatataataaatttactgcaggactctaaattccaccactttaagcctgtaatggacacatatatagagagtcactttgccggtgccctggcctacagggatttgatcaaagtgctgaaatggtatgtagaccgaataactgaggcagagcggcaggagcacatccaggaagtgctcaaggcccaggaatatatcttcaagtatatcgtgcaatcccgaaggctgttttccttagcaacggggggacagaatgaggaggaattccggtgttgcatccaggagctactgatgagtgtccggtttttcttatcgcaggagagcaaaggaagcggcgctctgtcccagtcccaagctgtctttctctcaagttttccagctgtctacagtgaactcctcaaattatttgatgtgcgtgaagtcgccaacctggtgcaggatacactgggaagcctgcctactatcctgcatgtggatgactcactgcaggcaattaaattgcagtgtatcggcaagaccgtggagtcgcaattgtacacaaaccccgactctaggtatatcctgctgcctgtggtccttcaccatctccatattcacctacaagagcaaaaagaccttatcatgtgtgctaggatattgagcaacgtcttttgtctgattaagaagaattcctccgagaagagtgttcttgaagaaatcgatgtcattgttgccagtctcctcgacatcttgcttcgtacaatccttgagatcaccagtcgtcctcagccatcatcatctgctatgagatttcaatttcaggacgtgacaggagaatttgtagcttgcttattgtccctgctgaggcaaatgacagatcgccattaccagcagttgctcgattcattcaacacgaaggaggaactcagagacttcctccttcaaatattcacggtgtttaggattttgattcgccctgaaatgtttcccaaggattggactgtgatgcgcctggtagccaataacgtgataatcacaacggtactgtatttgtcggatgcccttagaaaaaacttcttgaatgaaaatttcgattacaagatctgggatagctacttttatctggccgtcatctttatcaatcagttgtgcctgcagctggagatgttcacgccctcaaaaaagaagaaagtcctggaaaaatacggcgatatgcgtgtaacaatggggtgcgaaatattctcaatgtggcaaaacctgggcgaacacaaactgcatttcattcccgctctgaggcaggagaaccgactcaacctgggcggaggcggttgctccgagccaagagcatgtcactgcacccccgcttgggctacaaagcgtgactgcgtgagcaagaagaaagagaagaagacatag

SEQ ID NO: 220454 - DNA, 6144 bp, synthetic construct
  misc_feature 1..6144: note = Description of Artificial Sequence: Synthetic coding sequence
  source 1..6144: mol_type = other DNA
atggcagcatccgaacgccgagcatttgcgcacaagataaacagaactgtcgccgctgaggtgcgaaagcaggtttctagagagcgcagcggcagcccccacagcagccgaaggtgctcatctagtctcggggtcccactcaccgaggttgtcgaacccctggacttcgaggacgtactgctctcccggccacctgacgctgaaccaggccctctgagggatctggtggaattccccgcagatgatttagagcttctgctccagcccagggaatgcaggaccaccgagccgggaattcctaaggacgagaaactcgacgcccaagtgagagctgccgtcgagatgtatatcgaggattgggtgatcgtgcatcggcgataccaatatttgtccgccgcatatagccccgtgacgacggacacacaaagggagcgccagaagggcctgcctagacaggttttcgagcaggacgcttccggcgacgagaggagtggcccagaagattctaatgacagccggaggggttcaggatcaccagaggacacaccaagatcaagtggtgctagcagcatcttcgatttgagaaatctcgccgcagactccctccttcctagcctcctagaaagggccgcacctgaagatgtagatcgaagaaatgaaacgctccgaagacaacatcgtccgcctgctctgctgactctctatcccgcaccagatgaagacgaagccgtggagcggtgtagccggccagagcctcctagagaacacttcggtcagcgcatcctggtcaagtgcctgagcctgaaatttgagattgagattgaaccaatctttggcatcctcgctctgtacgacgtccgggagaaaaaaaaaatcagtgagaatttctactttgatctgaactctgatagcatgaagggattacttagggctcatggaacccacccggcaatctccaccctcgcacgaagtgccatcttcagtgtcacataccccagtcctgatatctttctcgttatcaaactggaaaaagttttgcagcaaggagatatatctgagtgttgtgaaccctacatggtactcaaagaggtcgacacggccaagaataaagaaaagctggagaaactccggctggccgctgagcagttttgcactcgtctgggcagatatcggatgccttttgcatggaccgccgtgcatctggccaatatagtttcctccgctggacagctcgaccgcgactccgactcagagggggagcgtcgacctgcctggactgaccggcgtcgcaggggaccccaggaccgggcatcgtccggcgatgacgcatgttcattcagtggttttcgcccagctaccctgactgtgacgaacttttttaagcaggaggccgagcggctgagtgatgaggacctcttcaaattcctggcagacatgcgccgtccctccagcctgcttcgcagactacgtcctgttaccgctcaactcaagatcgacatctctccagctccagagaaccctcatttctgcctttcccccgaactgttgcatatcaagccctatcctgaccccaggggccgacctaccaaggagatcctggagttcccggcacgggaggtgtacgcccctcacacctcttatcgaaacttactatatgtctatccccactcattgaatttttcctcgcggcaggggtctgtccggaatctagctgtgagggtacagtacatgacgggggaagacccttcccaagcacttcctgttatcttcggaaaatcttcttgttccgagttcaccagggaggccttcacaccagttgtgtaccataacaagtctccagaattctatgaagagttcaagctgcacctaccggcttgtgtcactgagaatcaccacctgctgttcacattctaccacgtgtcctgtcagccaagacccggtacggctctagaaacccctgtcgggttcacatggatacctctattgcagcacggacgcctgcgcaccgggccattctgcctcccagtgtcggtggatcagccgcctccgagttattcagtgctgacgccggacgttgccctgcccggtatgcggtgggtggacggacataaaggcgtgtttagcgtggagctgaccgcggtctcttctgtccacccacaggacccctacctggacaaattttttacactcgtgcacgtgctggaagagggagctttcccatttcgattaaaagataccgtactctcggaagggaatgtagaacaagagttaagagccagtctcgccgcacttcggctcgcgtctcccgagcctttagtggcattctcacatcatgtattggataaactagttcggctcgtgattaggccccctattatcagcggccagattgtcaacttggggagaggcgctttcgaggccatggcacacgtcgtctcacttgttcacaggtccctggaagcagcacaggatgcccgaggacactgtcctcagctcgccgcatacgtacattatgcctttcggctccctggtacagagccatcattacccgacggagcccctcctgtgaccgttcaggctgcaactctcgcccgtggaagtggcagacctgcctccctgtatcttgcccgatccaaaagcatctcttcttctaatcctgatctggccgtggcgcctggctccgttgatgacgaagttagtaggatccttgctagcaaactcttgcatgaggaattggcactccaatgggtggtctcctcatccgctgtgcgcgaagccatactacagcacgcatggttcttttttcagctgatggtgaaaagcatggccttacacttactgctcggacagcgtctggatacgcctaggaaactccggtttcccggtcgctttctcgatgatattactgccctggtagggagcgtggggctagaggtgattacccgggttcacaaggacgttgaactggcagagcaccttaatgcaagtctggcttttttcttatcagacttactgtctctggtggatcgtggattcgtctttagcttggttcgagctcactataagcaggtagctaccagactgcagagttcccccaaccccgctgccctcttgactttgcgcatggagttcactagaatactttgctcgcatgagcactacgtgacacttaatttgccatgttgccctctgagcccccctgctagcccatcaccaagtgtgtcatccaccaccagtcagtctagcaccttctcttctcaggccccagaccctaaggtaacatctatgtttgagctgagtggaccattcaggcaacagcatttcctggccggtctcctcctcaccgagctggcgctggccctggagccggaagcagagggtgctttcctgttacataagaaggccatctcagcagtgcattctctgctctgcggccatgacacggatcccaggtacgccgaagccacagtcaaagctagggtcgcagagctctacctgcctttattaagcatcgctagggataccttaccacggctgcatgatttcgctgaagggcctggccagcggtcccgcctggcttccatgcttgactccgacacagaaggtgaaggcgacattgctggaaccattaacccttccgttgcgatggccattgccggaggacccctggccccaggctcacgagccagcattagccagggacctccgacggcttctcgtgccggttgcgccttatccgcagagtccagcaggactctcctggcctgcgtgctctgggttttgaaaaacacagaacctgctttactgcagcgatgggccacagatttaaccttgccccagctgggtagacttctggatctgctgtacctgtgtctggccgcttttgagtacaagggtaagaaagcctttgaaagaatcaattccctgacttttaagaagagcctcgacatgaaggcacggctcgaagaagcgatactcggcactattggtgcaagacaggagatggttcgaaggtcaagggaaaggagtccctttgggaatcccgagaacgtgagatggcgcaaatcagtcacacattggaaacagaccagtgaccgcgtagataagacaaaagacgagatggagcatgaggcgctggtcgaggggaacctagctaccgaagcttctcttgtggtcctggacaccctggagatcattgtgcagactgtgatgctgtcggaagccagggagtcagtacttggggctgttctgaaggttgtgttgtactcgctgggctctgcacagtcagcccttttcctacagcatggtctggcaactcagagggctcttgtgagcaagtttcctgagctcctgttcgaagaagataccgagctgtgtgccgatctctgcttacggctgctgcgccactgcggatcgagaatttctactattagaacccacgcctccgctagtctatacctgctgatgagacagaactttgagatcgggcataactttgccagggttaaaatgcaggtgacaatgagtctgagcagcctcgtggggaccactcagaatttcagcgaggaacacctgcgtcgatctttaaaaaccattctcacctatgctgaggaggatatgggcctgagggattcgacattcgctgaacaggtgcaggatctgatgtttaatctccacatgatcctgaccgatacggttaaaatgaaagaacaccaggaggaccccgagatgctgattgacctcatgtatcggattgccagggggtaccagggctccccagatcttaggctgacatggctgcagaatatggccggaaagcatgccgagttgggcaatcacgctgaggcagcacaatgtatggtacacgccgctgccctcgtggccgagtacttagcactcttagaagaccaccggcacctcccagtcgggtgcgtaagcttccagaatatctcttccaacgtgttggaggaaagtgccatcagcgacgacatcttgagtcccgacgaagagggattttgctccgggaaacactttacggaactaggactggtcggcttactcgaacaggccgctggatacttcactatgggtggcctgtatgaagcagtcaatgaggtgtacaaaaatctcatccctatactagaggcgcacagggattacaaaaagctcgccgctgtgcacggcaagctgcaggaagcctttactaagatcatgcaccagagctcgggttgggagagggttttcgggacttacttccgggtgggtttctacggggctcacttcggtgatctggacgaacaggaattcgtttataaggagccctcgatcaccaaacttgccgagatttctcataggttggaagagttttacactgaacgattcggagatgatgtggttgagatcatcaaggacagcaatcccgtggacaagtcaaaactagattctcaaaaggcttacatccagattacttatgtggagccctactttgacacttatgaactgaaagatcgcgtcacctattttgatcggaactatggcctcagaacttttctgttctgtacccctttcacgccagatgggcgtgctcacggagagctgcctgaacaacacaaaaggaaaacactgcttagcaccgaccacgccttcccttacatcaagacccgcatccgggtctgccacagagaagaaactgtgctcacaccagttgaggtggctatcgaggatatgcaaaaaaaaactagggaactggcattcgctacagagcaggatcctcctgacgccaaaatgctacagatggtccttcaaggctcagtgggacctactgttaatcaggggcctctggaggtggcccaggtgtttctggccgaaattccagaagaccctaagttgttccgccaccacaacaagctgaggttgtgctttaaggacttctgcaaaaaatgcgaagatgccctgcgaaaaaataaggctcttattggtcctgatcaaaaggagtaccatagggaactggaacgaaactattgcagactgcgggaggcccttcaacccctgctgacacagaggctgccccagctcatggcaccaacaccccctggtcttcgaaactctctgaacagagcaagctttcggaaggccgatctctac

SEQ ID NO: 220455 - DNA, 4161 bp, synthetic construct
  misc_feature 1..4161: note = Description of Artificial Sequence: Synthetic coding sequence
  source 1..4161: mol_type = other DNA
atgcgctgggttgatgggcacaaaggggtcttttcagttgagctgaccgctgttagctccgtccacccacaagatccatacctagataaattttttacgcttgtgcatgttctggaggagggggcattcccatttcgattgaaggacacagtgttgagcgagggaaatgttgaacaggagctccgagcatcgctagcggcacttcggctcgcaagccccgagcccctcgtggctttcagccaccacgtgttggacaaattagtgagactggttatccggccacctatcatcagcgggcagatagtgaatctgggcaggggggcattcgaagctatggcccacgtcgtgtccctggtccaccgatctctggaggcggctcaggacgctaggggacactgcccgcaactggcggcatatgtgcattatgcctttagactgccagggaccgaaccctccctccccgacggcgcacctcccgttacggtgcaggccgcaaccctggcacgaggaagtgggcgacccgcttcactatacctcgctagaagcaagtcgattagcagctcaaatcccgacttagcagttgcccctggctcagttgatgatgaagtatcgaggatccttgcatccaagggaatagatagaagtcactcctgggtgaatagtgcctacgcccctgggggtagtaaggccgtgctgagaagggcaccaccttattgtggggcagacccaaggcagctccttcatgaggaactcgccctccaatgggtggtcagtagttctgctgtgcgggaagcgattcttcagcatgcatggtttttcttccagctaatggtgaaaagtatggcgctgcacctgctcctggggcaacggctagatactccaagaaagcttcgcttcccagggagattcctggacgacataacagccctggtcgggagtgtcggcctcgaggtgattactagagtccacaaggacgtcgaactcgccgaacatctgaacgcctcactggccttctttctgtcagacctcctgtcgttagtggacagaggctttgtgttctctctggttcgcgctcactataaacaggtggccaccaggctgcagagtagccccaaccccgctgcgctgttaaccctccgtatggagtttaccagaatcctttgcagtcacgagcactacgtcacccttaacctcccatgttgtcctctgtcaccacccgcttctccatcaccttcagtatctagcaccacttcacagtcctcgactttttcgagccaggcccctgatcctaaggtaacttcaatgtttgagctatctggcccttttcgtcagcagcatttcctggctggtctgctgctgaccgagctcgctctggcattagagcccgaagccgaaggggcatttcttcttcataaaaaagcgatttctgccgtgcatagcctgctgtgtgggcacgataccgatcccaggtatgcagaagcaactgtgaaagccagggtagcagagctatacctccctctgctgtccattgctcgagacacattgcccagactgcacgattttgccgagggtcctggccagaggagccggctagccagcatgttagactctgacaccgagggagaaggagatattgcagggacaattaatccatcagtcgccatggcgatagctggcggaccactcgctcctgggtccagggcctccatctcccaggggccacctaccgcctcccgagccggatgcgctctgtccgccgaaagctcccgaaccctgctggcttgtgtgctttgggtcttgaaaaacaccgaacccgctctgttgcaaagatgggctaccgacctgacgctccctcagctaggtcgactgctcgaccttctgtacttatgcctggcggcttttgaatataaggggaagaaagcgttcgagagaattaattcgctgactttcaaaaagtccctcgacatgaaggctcgcctggaggaagctatcctcggcacgatcggggcaagacaggagatggttaggcggagtagagaaagaagccctttcggcaacccagaaaatgtgcggtggcgaaaaagtgtgactcactggaaacaaacatcagacagagtggataagaccaaggacgaaatggaacacgaagctcttgtcgaaggaaatcttgccactgaagcaagcttggtggtccttgacaccctggagatcatcgtccagacagtcatgctgtctgaggctcgcgagagtgtcctgggcgcagtcttgaaggtggttttgtactccctgggaagtgctcaaagtgctctcttcctgcagcacgggctggctacccaacgagcactggtgagcaaatttcctgaacttctgttcgaagaagatactgagctgtgtgcagatctctgcctccgcctcctgcgacactgcggttccagaatctccaccatcagaacccatgcctcggcctctctgtatctcctgatgaggcagaatttcgagatcggtcataactttgccagggttaagatgcaagtcacaatgtctctgtcatcacttgtcggaacaactcagaactttagcgaagagcacttaagacgttcgctgaagacaatcctcacttacgctgaagaggacatgggacttagggattcgacatttgccgagcaagttcaggacctgatgttcaacctccatatgatccttactgacaccgtcaaaatgaaggaacatcaggaggaccctgagatgctgattgacctgatgtataggatagctcgtgggtaccaaggttctcctgatctcagactgacctggctgcagaacatggctgggaaacatgccgagctgggcaaccatgccgaagcagcccagtgtatggtgcacgcagctgccctggtggccgaatacctggctctgttggaggaccacaggcacctccccgtgggctgtgtgtcatttcagaacataagcagcaatgtgctggaagaatcagccatttccgacgatatcttatctcctgatgaggaaggcttctgttctggaaagcatttcacagagttaggcctggtcggcttgcttgaacaggccgcaggatacttcacaatgggcggactctacgaagccgtgaacgaggtgtacaaaaacctgattcctatactcgaggcacatagggattacaaaaagcttgccgcagtgcacggtaagcttcaagaggcttttacgaaaattatgcatcagagtagcggctgggagagagtcttcggaacttatttccgggtagggttttatggagcacatttcggcgacctagacgaacaggaatttgtctataaggagcccagtattactaagttggccgaaatctcccataggttggaagagttctacacagaacggtttggtgacgacgtggtggagatcatcaaagactccaacccggtcgataagagcaaactcgactcccagaaggcctacattcagataacatatgtagagccttacttcgacacctacgagctcaaagaccgagtcacctacttcgatagaaattacggcctccgaacctttctgttctgcaccccttttactcctgacggccgagcccatggggagctgccggagcagcacaagaggaaaacactgctgtcaaccgaccatgctttcccttacatcaagactagaattagagtgtgccaccgcgaagaaacagtgttgaccccagtggaagtcgctatcgaagatatgcagaagaagacccgtgagttggcttttgccactgaacaggaccctcccgatgccaagatgctacagatggtgctccagggatctgtcggcccaactgtgaaccagggacctctggaggtcgcacaggttttcctggctgagatacctgaggatcccaagttgtttcgacatcacaataagttacgactgtgctttaaggacttctgtaaaaaatgtgaagatgccctccgcaagaacaaggcgctcatcggtccagatcagaaagaatatcatcgagagctggaacggaactactgccggctccgcgaggccctgcagccacttctcacccagcggttgccgcaactgatggccccaacaccacctggtctgagaaattctttgaaccgggcttcatttcggaaagccgacttatag

SEQ ID NO: 220456 - DNA, 5973 bp, synthetic construct
  misc_feature 1..5973: note = Description of Artificial Sequence: Synthetic coding sequence
  source 1..5973: mol_type = other DNA
atggctaccctcccatccgccgaaagacgcgcatttgccctgaaaatcaaccgatacagttccgccgagataagaaagcagtttactttgcctccaaacttggggcagtaccatagacagagtatctccacatctggctttccctcactgcagctgcctcagttctacgatcctgtggagccagtggatttcgagggcttgttaatgactcacctgaattctctggacgtgcaattggctcaagagttgggcgactttaccgacgatgacttagacgtcgtattcacccccaaggagtgtcgcacactccagccgtctctgcccgaggaaggggtggaacttgatccccatgtgagggactgtgtacagacatatatacgcgagtggctgatcgtcaaccgcaaaaatcagggctcccccgagatttgtggattcaaaaaaacagggtcaagaaaggatttccataaaacgcttcctaaacagacatttgagtccgagacactggagtgctccgagccagccgcacaggctggcccacgacacctcaacgtgctctgtgatgtctccgggaagggacctgtgacggcatgtgattttgatctccggtccctgcaacctgacaagcgtctcgagaacctcctccagcaggtgagcgccgaagactttgagaaacaaaacgaggaggcacggcgaacaaacaggcaggcggaattgttcgctctgtatccctctgtggacgaagaagacgccgtggagattcgtccggtgcctgagtgcccgaaggaacacctgggcaatcgaatattagtgaaactgctaactctcaagtttgagattgaaatcgaacccctgttcgccagtatagcactgtatgatgtcaaagagcggaagaaaattagtgaaaacttccactgcgacctgaacagcgatcagttcaaaggctttcttcgggctcatactccttctgtcgcggcaagctcccaggctagaagcgctgtgttttctgtcacatacccaagttctgacatatatctggttgttaaaatcgaaaaggtcctgcagcaaggcgagatcggcgactgcgccgagccatatactgtgattaaggaatccgatggcggaaaaagcaaggaaaagatcgagaagctgaaattgcaggccgagagcttttgtcagcggctaggcaagtatcggatgccctttgcctgggcccctattagcctttcatccttcttcaacgtcagcaccttagaacgggaggtaacagacgtggattccgttgtaggtcgatcttctgtgggagagcgtcgcactttggctcagagtcgtcggttatccgagcgtgccctttccttggaggagaatggtgtcggttctaacttcaaaacctccaccctgtcagtcagcagtttttttaagcaggagggagaccggctgagcgatgaggacctcttcaaattcctggccgattataaacgctcctcttcgctgcagaggagggtcaagagcatccccggactcctccggcttgaaattagcacagctccagaaatcatcaattgttgtttaacacctgaaatgctgcccgttaaaccctttcccgagaacaggacacgccctcataaggaaatcctggagttccctacacgagaagtttacgttccccatacagtgtatcgaaatctgctgtatgtttacccgcagcgcctaaatttcgtgaataaactggctagcgccaggaacattactataaagatccagtttatgtgcggcgaggacgcttctaatgctatgccggtcatcttcggcaaatcctctgggccagaatttctgcaggaggtctataccgcggtaacctatcacaataaaagccccgatttttatgaagaagttaagatcaagctgccggctaagctgaccgtgaaccaccacctcctgttcactttttaccatatctcatgtcagcagaagcagggagctagtgtggagacactactgggctactcatggctgccgattctgctgaatgagcggctccagacggggtcctactgtctgcctgttgctctggaaaagcttccaccaaactactctatgcattctgccgaaaaagtgcctttacaaaaccctcccatcaagtgggctgaggggcataaaggagttttcaatattgaggttcaggcggtgtcctctgttcacacccaggacaatcacctggagaagttctttaccctgtgtcacagtttagagtcacaggtcaccttccccattcgagtcctcgatcagaagatcagcgagatggccctggagcatgaactcaaactgagcatcatctgcctgaattcctcgcgccttgaacccttagtgctctttctgcacctggttctggacaagcttttccagctatccgtacagcctatggtcatcgcgggtcaaactgccaattttagtcaattcgcatttgagtccgtggttgccattgctaacagtctgcataatagcaaagacctctcaaaggatcagcatggcaggaattgtctcctagctagttacgtgcactacgttttccgactgcccgaggttcagagagatgtgcctaagtcaggagcacccactgctctgttagacccaagatcctatcatacctatggacggactagtgccgctgccgtgtcgtcgaagctcttacaggcgcgtgtgatgagctcttctaatcccgacttggcagggacccacagcgccgctgacgaggaggtgaagaacatcatgagctcaaagcatttccatgaggagcttgcactccaaatggtagtgagcaccgggatggttcgggagacagtgttcaagtacgcgtggttcttcttcgagctcctggttaaaagcatggcgcagcacgtgcacaacatggacaagcgggactctttccgacggactaggttctcagaccgctttatggacgacataacaactatagttaacgtggttacaagcgagatagccgctctcctggtgaagccacagaaggagaacgaacaagcggagaaaatgaatatcagcctggcattttttctgtacgatttactgtcccttatggataggggctttgtgttcaaccttatacgccactactgctcacagctcagcgctaagctttccaatctgcccacgcttattagcatgcgactggagttcctcagaatactctgtagtcatgaacactaccttaatctgaatctgttcttcatgaacgccgacacagccccaacatctccttgtccaagtatcagttctcagaactcgagtagttgctcttcttttcaagaccagaagatagctagcatgttcgatcttacctcagagtatcggcagcaacacttcttaaccggcttgctgttcaccgagttggcagcggctttagatgctgaaggcgagggaatctcaaaagtgcagagaaaggcggtatccgccattcatagcctgctgagtagccacgatctggatccaaggtgtgtgaagcctgaagtgaaggtgaagatcgccgctctatacctcccactggttgggattatcctagacgcgctgccacagctttgcgatttcacagtagcagacacacgcagatacaggaccagcgggagcgacgaggagcaggagggtgctggcgcaatcaaccagaacgtggctcttgccatcgctggaaataacttcaacctcaagactagcgggatcgtcctctcctccctgccatataaacagtacaacatgcttaatgccgacacgactcgcaacctgatgatctgcttcttatggattatgaaaaacgccgaccagtccctaatcagaaagtggattgcagacctgccaagtacccagctgaacaggattctggacctgctttttatctgtgtgctgtgcttcgagtacaagggcaaacagagctctgataaagtttccacccaggtcctgcagaagtctcgcgacgtgaaagccaggctcgaggaagctttgctacggggagaaggcgcacggggagaaatgatgcgtcgacgtgcacccggaaacgatcggtttcccggtcttaacgagaacctgcgctggaagaaggaacaaacccactggcgccaggccaacgagaagcttgataagacaaaggccgaactcgaccaggaagccctcatttccggcaatttggccaccgaggctcaccttattatcttagacatgcaagagaacattatccaagcatcttcggccctcgactgtaaagactctcttctcggaggtgtactccgcgttctcgtgaactctttgaattgcgatcaaagcactacatacctcactcactgctttgcaactcttcgcgctctcattgcaaaattcggcgatctcctgtttgaggaagaggttgaacagtgctttgacctatgtcaccaggtgttgcaccattgttctagctccatggatgtgacccggtcccaggcctgcgcaaccctgtatctacttatgcgattctccttcggggcaacctcaaatttcgcgcgagtgaaaatgcaggtgaccatgagcctcgccagcctggtgggacgtgccccagatttcaacgaggagcacctgagacgatctcttcggacaattctggcctacagtgaagaggacacagccatgcagatgaccccctttcccacccaggtggaagagctgttgtgcaaccttaatagtattctctatgacacggttaagatgcgggaatttcaggaggaccccgaaatgttaatggatcttatgtacagaatagcaaagtcttaccaggcttcccccgatctgagacttacttggttacaaaacatggccgagaaacatacgaagaagaagtgttacactgaggccgctatgtgtctggtgcatgcagccgctctcgtggctgagtacctgtcgatgctggaggaccattcatatctccccgttggatccgttagtttccagaacatttccagcaacgtcctggaggagtcggtagtgagcgaagataccctgtctcccgacgaggacggggtctgcgctggccagtatttcactgagtcaggattggtgggcctcctggaacaggccgctgagctattctcaacaggtggcctctacgagaccgttaacgaagtctataagctagtcattcctattctagaggcgcaccgagagttccgaaaactgaccctgactcatagcaagctccaacgtgcttttgattctattgttaacaaagaccacaagcgcatgtttggcacttactttcgagttggcttcttcgggtctaaatttggagacttagacgagcaagagttcgtgtataaagaaccagctatcacgaagctgcctgagatttcacaccggctggaggccttttacggacagtgttttggtgctgaattcgttgaggtcattaaagactccactccagttgacaagaccaagctcgaccctaataaagcatacatacaaattactttcgtcgagccttactttgacgagtatgaaatgaaggatagggtgacttattttgaaaagaactttaacttacgacgcttcatgtacaccacgccttttacacttgaaggacgccctcggggagagctccacgaacaatatagaaggaataccgtcctgacaacaatgcacgcattcccctacattaaaacacgaatctccgtaatccagaaagaagaatttgtgctcacccccatcgaggttgcaattgaggacatgaagaagaaaacactgcaattggcagtcgccataaatcaagaaccaccggacgctaagatgctgcagatggtgctgcagggtagcgtgggcgctacagtgaaccagggcccactcgaagtagctcaggtgtttctggcggagattccggctgaccccaagctttatagacaccacaataaactaaggttgtgctttaaggaattcatcatgtag

SEQ ID NO: 220457 - DNA, 6095 bp, synthetic construct
  misc_feature 1..6095: note = Description of Artificial Sequence: Synthetic coding sequence
  source 1..6095: mol_type = other DNA
atgacacaccttaactcactggacgtacaattagctcaggagcttggggatttcacagatgacgatctcgacgtggtgttcacgccaaaggaatgtagaacactgcagccatccttgccggaagagggagtggagctggatccccacgtccgagattgcgtgcaaacgtatatccgggagtggctgattgtgaatcgaaagaatcaaggcagcccagagatctgcggcttcaagaagaccggaagcagaaaggacttccataaaacactccctaagcagacgtttgagtccgaaaccctggaatgcagtgaacctgcagcacaggccggaccccgacacctgaatgttctctgcgacgtatccggtaaagggccagtgaccgcctgcgattttgacctgaggtctcttcagccggacaagcgtctcgaaaatctcttgcagcaggtatcggccgaagattttgagaaacagaatgaagaagccaggcgaacaaataggcaggccgagctattcgcgctgtacccctctgttgacgaggaggacgcggtggaaataaggccggtgcccgagtgtccaaaggaacacctcggtaataggatactggtgaaactgcttacgctaaagtttgagatcgagatcgagcccctgttcgcaagcatagccctctatgacgttaaagagcggaagaaaatctctgaaaattttcattgtgaccttaattccgatcagttcaaaggctttttgagagcccatacaccttctgttgccgcaagctcacaggctagaagcgcggtgtttagcgttacctacccatcatctgatatctatctcgtcgtcaagatagagaaagtgctacagcaaggcgagattggtgattgtgcagagccctatactgttattaaggaatcagatgggggtaaatctaaggaaaaaatagaaaagctgaagctgcaggccgaatctttctgtcagcggctggggaaatataggatgccgtttgcttgggcacctatctctctttcatcattcttcaatgtctccacactggagcgtgaggtgaccgacgttgactcagttgtgggcagaagctccgtgggtgaacgcaggacgttggcacagtcacgcagacttagcgagagagcgctgagccttgaggaaaatggcgtagggagtaactttaagacttctacgcttagcgtgtccagcttcttcaaacaggaaggcgatagactaagcgacgaggacctctttaaattcttagcagactacaagcgcagcagttctttgcagaggcgggttaaatcgattccaggcttgttgaggctagagatatccacagcacccgagatcataaactgctgtttgacccctgaaatgctccctgtcaaaccctttcccgaaaatcggacaagaccccataaagagatcctggagtttccgacaagggaggtctatgttccccacacagtttatcgtaacttactgtacgtgtatccacagagactcaattttgtcaacaagctggcctcagctcggaacatcactatcaagatccagttcatgtgcggagaagatgcgtctaacgcaatgcccgtgatttttggcaagtcttccggcccagaattcctccaagaagtttatacggcggtgacctatcacaacaaatcacctgacttctacgaggaagtgaagatcaaactccccgctaaattaactgttaaccaccatctgctgttcacattctaccatatttcttgccagcagaagcagggagcttcggtggagactctcctcggctactcgtggcttccaatcctgctgaatgagcgccttcagactggaagctactgtctccctgtcgctctggagaaacttccccctaattactcaatgcatagtgctgaaaaggtgccactccagaaccctcctatcaaatgggcagagggccataaaggcgtgttcaacatcgaggtgcaagctgtgagctcagtgcatacccaggacaatcatctggagaagttttttacactttgtcattcattggaaagccaagtcactttccctattagggtgttagatcagaagatttctgagatggctctggagcatgagctgaaacttagcataatttgcttgaatagctcccgtctcgaacctctggtactgttcttacacctcgtactagataagctgttccagctttctgtccagcccatggtgattgccggacagaccgcaaacttctctcagtttgcatttgagtccgtcgtggcaatcgctaactctttacacaattccaaggacctgagcaaggatcagcatggtaggaactgccttttggcgagctacgtgcactatgtcttccgcctgcccgaagtgcagagagatgtaccgaaaagtggcgcaccaaccgcgctgctggacccgagatcatatcatacctacggaaggacttccgccgctgcagtgtccagtaaacttctgcaagcccgagtgatgagcagctcaaaccctgacctggccggaacccattccgcagccgatgaggaggtgaagaatattatgtcaagcaagattgccgacagaaactgtagcagaatgtcctattattgttcaggttcttctgacgccccatcttctcccgctgcccctcggccagcaagcaaaaagcactttcacgaggagcttgctctccaaatggtggtctccactgggatggtaagagaaactgtgtttaaatatgcatggttctttttcgagctcctggtcaagagcatggctcagcacgtgcacaacatggataagcgcgactcctttcggaggacccgcttcagcgataggttcatggacgatattaccactatagtgaacgtcgtgacaagtgagatcgcagcgctccttgtgaagccccagaaggaaaatgagcaggcagagaaaatgaacattagtttggccttttttctatacgatctgctgtcgctgatggatcggggtttcgtgtttaatttgatccgccattactgcagtcaactgtccgcaaaactatctaacttaccaactttgatttctatgagactcgaattcctgaggatcttatgtagccatgagcattaccttaatctgaaccttttttttatgaacgctgataccgcccctacatctccctgccctagcattagtagccagaactccagcagctgttccagtttccaggaccagaaaatcgccagtatgttcgacttaacatctgagtatagacaacagcactttttaacagggctgctgtttaccgagcttgctgctgccttggatgctgagggcgaggggatctccaaagttcagcgcaaagcagtaagcgccatccactccctcctctccagtcacgacctggaccccagatgtgtgaagcctgaagtaaaggtgaaaattgcggcattgtatctccctctggttgggataattctcgatgccctgcctcagctgtgcgattttaccgtcgccgacacccgccgttatcgaacatcaggcagcgatgaagagcaagagggagcaggtgcaattaatcagaacgttgcattggccatcgctggaaacaatttcaatctcaaaacttcaggaattgtgctgtctagcttgccatacaagcaatataatatgctgaacgcagacacaacccgcaatctaatgatttgttttctctggatcatgaaaaacgcagaccagtccctgatcaggaagtggatcgctgacctccctagtacacaactgaacagaatacttgatctgctgtttatctgcgtcttatgcttcgagtataaaggaaaacagagtagcgataaggtgagtacacaggtgctgcaaaagtctcgagatgtgaaggcacgactggaagaggcgctcttaagaggtgagggggcacgtggggagatgatgcgtcggcgtgcacctgggaacgaccgttttcctggcttgaatgaaaatctgcgctggaagaaggaacagactcattggaggcaggcaaacgagaagctggacaagactaaggctgagctcgatcaggaggctctgatatcagggaacctggcaactgaggcacacctcatcatcctggacatgcaggagaacattatccaggcctctagcgccctcgactgtaaagactccctcttgggcggagtgctgagggtcttagttaacagcttaaactgtgatcaaagcaccacttacctcacccattgttttgccactttgcgtgcactgatagccaagttcggagacctgctgttcgaagaggaagtggaacagtgctttgatctgtgccaccaggtgctgcaccactgctcctcgagcatggatgtaacacgtagtcaggcctgcgcaaccctgtatctgctgatgcgattctcttttggtgctacttcaaattttgcccgtgtgaaaatgcaggtcacaatgagcttggcctccctggtggggagggctcctgatttcaacgaggaacatctgaggcgatctcttaggactattctggcgtattccgaagaagacaccgccatgcagatgaccccattccccacacaagtcgaagagctgctctgcaacctcaatagcatactttatgatacagttaagatgcgggagttccaggaagatccagaaatgttgatggatctgatgtacaggattgccaaaagctatcaagctagcccagacctgagactgacttggctccaaaatatggcagaaaagcataccaagaagaagtgttatactgaggccgcaatgtgcctggtgcacgccgcagcgctggtggccgagtatttgagtatgctggaagatcatagttatctgccagtgggtagtgtctcctttcaaaacatctcctctaatgtcttagaagaatctgtagtaagcgaggatactctatcaccagacgaagatggcgtctgcgccggtcagtactttacagagagtggacttgtgggactgctggaacaagctgctgagctatttagtaccggtggactgtacgagaccgtgaacgaagtatataaacttgttatcccaattctggaggctcatcgcgaatttagaaagttgacactcacacatagtaaactgcaacgagccttcgatagcatcgtcaacaaagatcataaacggatgtttggcacatattttcgcgttggtttctttggctccaaattcggggacctcgacgagcaagaatttgtgtacaaggagccggcaatcacaaaattacccgagatttctcacagacttgaagcgttctacggccagtgtttcggtgctgaattcgttgaggttatcaaagactcaactcccgttgataaaactaaactcgacccgaataaagcatacattcagatcacatttgtagagccctacttcgacgagtatgaaatgaaagatagggtgacctactttgagaaaaacttcaacctgaggagatttatgtatactactccgtttacactggaggggcgacccagaggagagctccatgagcagtacagacgcaacacagtgttgaccaccatgcacgcttttccatatattaagacacgtatcagtgtcattcagaaagaggagtttgtacttactccaattgaggtcgccattgaagacatgaaaaaaaagacattgcaattggccgttgctatcaatcaggaacccccagatgctaagatgcttcagatggtcctccagggaagcgtgggggcaacggtcaaccagggccctctcgaggtggcacaggtgttcctggcagagatccccgcagaccctaagctgtatcggcatcacaacaagcttaggttatgtttcaaggagtttatcatgaggtgcggcgaggcagtggagaaaaacaagcgactgatcactgctgatcaaagggagtaccagcaggaattaaagaagaactataacaagctcaaggagaatctccgacccatgattgaacggaaaatcccagagctatacaaacccattttcagggtagagagccaaaaaagggactccttccatcggtcctcatttcggaagtgtgaaacacagttatctcaggggtctta

SEQ ID NO: 220458 - DNA, 6299 bp, synthetic construct
  misc_feature 1..6299: note = Description of Artificial Sequence: Synthetic coding sequence
  source 1..6299: mol_type = other DNA
atggccaccctcccttccgccgaaaggcgggcatttgctttgaagattaatcgctacagcagtgccgaaatcaggaaacaattcaccctaccccctaatttgggacagtaccatagacaaagtatttccacaagcggatttccaagcttgcaactcccacagttttatgaccctgtggaacctgtggactttgaggggcttctgatgacgcacctgaattccctagacgtacagcttgcccaggagctgggcgacttcaccgacgacgacctcgacgtcgttttcacgcccaaagaatgtaggacccttcagcctagcctgcctgaggagggcgtagagctggatccccacgtgagagactgtgtccaaacctatattcgcgaatggctgatagtgaatagaaaaaatcagggatccccggaaatttgcggtttcaagaaaaccggtagccgaaaagatttccacaaaacactgcctaagcaaaccttcgagtcagagacgctggagtgtagcgagcccgcagcacaagccggtcctagacatctcaatgttctgtgcgatgtgtccgggaaagggcctgttacggcttgcgatttcgatctaagaagcttgcaacccgacaagcggttagagaatttactgcagcaggttagcgccgaggacttcgaaaaacagaatgaggaggcccgtcgaactaacagacaagcagagctatttgcactgtatccaagtgtcgacgaggaagacgcggtggaaatccgacccgtacctgagtgcccaaaagagcatttaggcaaccgaatcctggtgaagctcctgaccctgaagtttgagatcgagatcgagccgcttttcgcaagcatagcgctgtatgacgtaaaggagagaaagaagataagcgagaactttcactgtgatttgaatagcgaccagttcaagggttttctgcgagcacatacccccagcgtggctgcttcatcacaggcacgttcagcggttttttccgtgacctatccaagctccgatatctacctggtggttaaaatcgagaaagtgctgcagcagggggaaatcggtgactgcgctgagccctacaccgtgattaaggagagtgatggtgggaagtcaaaggagaaaatcgaaaagttgaagcttcaggccgagtctttttgccaaagactcggcaaatatcgcatgccatttgcctgggctcctatatctctgagctcattctttaatgtctccactttggaaagggaagttacggatgttgacagcgtcgtgggccgaagtagtgtaggagaaaggagaactctcgctcagtcacgtcgcctaagcgaaagagccctcagcctcgaggagaacggagttggcagcaacttcaaaacatctactctaagcgtgtcctctttctttaaacaggaaggagacaggctgagcgacgaggatctgttcaagttcctggcagactacaaaaggtccagttccctgcaaagacgcgtgaagtctatccctgggctactgcgtctggagatttccaccgctcccgagattattaattgctgtctgacccccgagatgctgcccgtaaagccatttcctgaaaatagaacccgcccacacaaggagattctggagttccctacgcgggaagtttacgtccctcatacggtgtaccgcaacctgttatacgtgtatccccagcgcctgaactttgtgaataagctggcctccgcccgtaacataacaattaagatccagtttatgtgtggagaggatgcaagcaatgcaatgcctgtaatctttggtaagtccagcggacctgagtttttacaagaggtttataccgcagtcacataccataataagtccccagacttctatgaggaggtgaagattaagcttccagcgaaactaactgtaaaccaccaccttctgttcaccttttatcacatcagttgtcagcaaaagcagggggcttctgtggagacccttctaggttattcatggttgcctatcctgcttaatgagcgtctacaaaccggtagttactgcctgcccgtcgctctggagaagctgccacctaattacagtatgcactcagccgagaaagtgcccctgcagaatcctcctatcaagtgggctgaaggtcacaagggcgttttcaatatagaggttcaggctgtgtcctccgttcacactcaagacaatcacctggaaaagttcttcacactatgccactctttggaatctcaggtcacattccccatccgggtgctcgaccagaagatttccgagatggctctagaacacgaactcaagctgtctattatttgtcttaactcttcacgtcttgaacctttagtgcttttcctgcacctcgtgctggataaactgttccaactgagcgtgcagccaatggtcatagcgggacagacggcgaacttttctcaatttgcattcgagtctgtagtggcgatcgccaatagcctgcacaattctaaggatttgtccaaggaccagcacggacgtaattgccttctggcctcttacgtccattacgtattccggctgcctgaggtgcagagggatgtgccaaaatcaggggctccgactgccctgctggaccccagatcataccacacctacggcagaacctccgctgctgccgtatcatcaaagcttttacaggcaagagtgatgtcctcaagcaaccctgatcttgcgggtacccactccgctgcagacgaagaagtgaagaatatcatgtcctccaagatagccgatagaaattgctctaggatgagctactactgctctggctcgagtgacgcaccgtcatctcccgctgcccctcggccagcgagtaaaaaacactttcacgaggagctggctctgcaaatggttgtttcaacaggaatggttcgggagactgtgttcaaatacgcatggttttttttcgagctgctggtgaagagtatggcgcaacacgtacacaatatggataagagggactccttccggagaacacggttctcagatcgctttatggatgacatcaccactattgtgaacgtggtgacgagcgagattgccgcattgctggtaaagccacagaaggagaacgaacaggctgagaagatgaatatctctctggctttttttctttatgatctgctaagcctgatggaccggggatttgtttttaatctgattcgacattattgtagtcagcttagcgctaagctcagcaatctgccaacattgatctcgatgcgacttgaatttttaagaattctgtgctcacacgaacactatctcaacttgaacctcttctttatgaacgccgacactgctcccacctccccgtgtccaagcatctcaagccaaaattcttcctcctgcagctccttccaagatcaaaaaattgcctctatgtttgatcttacaagtgaatacagacaacagcactttctgactggtctcttgttcactgagcttgcggcagccctggatgccgaaggcgagggcatttccaaggttcaaagaaaggctgttagtgccatccatagccttttgagcagccacgaccttgacccacgatgtgtgaagccagaagtaaaagtgaaaatcgcagctctctatctgcccctcgtggggattatccttgatgcactcccacagctgtgcgacttcactgtggccgacactcgcaggtacagaacaagtggatccgatgaagagcaggaaggagccggagctataaaccagaatgtggccctggcgattgccggaaacaatttcaacctgaaaacaagcggtatagtgctgagtagcctcccgtacaaacagtacaatatgctgaacgcagacaccacgcgcaatctcatgatatgttttttatggataatgaagaatgctgaccagtctttgattagaaagtggatagccgacctgccgtccacgcagctcaataggatcctggacctgctgttcatctgcgtgctttgctttgagtataagggtaaacagtctagcgataaagtgagcacccaggtactgcagaaaagtagggatgtgaaagccaggcttgaggaggccctgctgcgaggcgagggagctcggggagaaatgatgagaaggcgcgctcccggaaatgatagattcccaggactgaatgaaaacctccggtggaaaaaagaacagacccactggagacaggcaaatgagaaattggataagacaaaagcagagctagatcaagaagcactgatcagtggcaatctcgccaccgaggcccacttgattattctcgatatgcaggaaaacatcatccaggccagttcagccctagattgcaaagatagcctcctgggtggcgtgctgcgcgtcctggtgaattcacttaattgtgatcagagcaccacttacttgactcactgtttcgctaccctacgggctctcatcgccaaatttggagacctgctgtttgaagaagaagtggagcagtgcttcgatctctgccaccaggtgctgcaccactgctcaagtagtatggacgtgactcgatcacaggcctgcgctaccctgtaccttctgatgaggttctcatttggggcaacatcaaacttcgcccgtgtgaagatgcaggttacaatgagtttggcctcccttgttggtcgggctcctgactttaatgaagaacacctgcggaggagcctgagaacaattctagcgtattctgaggaagatacggctatgcagatgactcccttcccaacccaggtggaggaacttctctgcaacttgaactcaatcttgtacgacacggtaaaaatgcgagaatttcaggaggaccccgaaatgctgatggacttgatgtaccgaatcgctaagtcttatcaggccagcccggaccttaggcttacctggctgcagaatatggccgagaagcacaccaagaagaaatgctatacagaagccgctatgtgcctcgtgcacgctgctgccctggtcgctgagtacctgagcatgttagaagatcatagctatctccccgtcgggtctgtgagttttcagaatatctccagcaatgtgttagaggagtccgtagtatccgaagacactctgtcacctgacgaggatggtgtatgtgccggacagtactttacggagtctggtctggtcggtttattggaacaggccgctgagctcttcagcaccggtggcctctacgagacagtgaacgaagtttacaaattggtcataccaatactcgaggcccacagggaatttcggaaactgactctgactcactctaaactgcagcgggcattcgattcaatcgtgaacaaggatcataaacgcatgtttgggacttacttccgggtgggcttctttggctccaaatttggagacttagatgagcaggaatttgtatataaagaacccgcaataactaagctgcctgaaatttcccatcgattggaggccttctatggccagtgtttcggcgcagagttcgtcgaagttattaaagactctacccccgtagacaagacaaaactcgatccaaacaaagcttacatccagatcactttcgttgaaccttactttgacgagtacgaaatgaaggacagggtgacatactttgaaaagaatttcaatcttcgcagatttatgtataccacccctttcaccctcgagggtcgtccacggggtgagctacatgagcagtacaggagaaacacagtccttactaccatgcacgcattcccgtatatcaagacccggataagcgtcattcaaaaggaggagtttgtgctgacacccatcgaagtagccatcgaggacatgaagaaaaagactctgcagctggcagtagccattaaccaagagcctcccgacgctaagatgttacagatggtgctccagggttctgtcggagccaccgtaaaccagggacctttggaggtggcccaggtctttctggcagaaattcctgcagacccaaaactgtatcgccaccacaataagctgaggctgtgctttaaagagttcattatgaggtgtggcgaggcggtcgagaagaataagcgattgatcaccgctgaccagcgtgagtaccagcaagaactgaagaaaaactacaataaactgaaagaaaatctgcggcctatgattgaacggaagatccctgagctgtacaaaccaatctttagagtggagtcccaaaagagggattcattccatcggtctagtttccggaaatgtgagacacagctatcacaggggtcgta

SEQ ID NO: 220459 - DNA, 5999 bp, synthetic construct
  misc_feature 1..5999: note = Description of Artificial Sequence: Synthetic coding sequence
  source 1..5999: mol_type = other DNA
atgacacatctgaatagtctcgatgtccagctcgcacaggagttgggcgacttcacggatgacgacctggatgtggtgtttaccccaaaagaatgccgcactctgcagcctagcctcccagaggagggcgtagaattagacccccatgttcgcgactgcgtccagacatacatccgcgagtggctgattgtgaatcggaaaaaccaggggtccccggaaatttgcggcttcaagaagaccggatcgcggaaggactttcacaagacacttcccaaacagacttttgaatcagagaccctagaatgctccgagcccgctgcacaagctggacctagacacctcaacgtactgtgtgacgtgtcaggcaaggggcctgtcaccgcctgcgatttcgatttgcggagtcttcagccggacaagaggctcgagaaccttttgcagcaggtttccgctgaggatttcgaaaaacagaatgaggaggcccgaagaacaaatagacaggcagagctgtttgctttatatccttcggtggatgaggaagacgcagtggagatcagaccagtgccagaatgccctaaggaacacctggggaatcggatactcgtgaaacttctgaccctcaagtttgaaatcgaaattgaaccactgtttgccagcattgcactgtatgatgttaaagagaggaagaaaatctcagaaaactttcactgcgatctgaacagcgatcagttcaagggttttcttagggctcacaccccctccgttgctgcaagctcccaagcgaggtcagcggtcttttctgtgacttatccttcatcagacatctacctggttgtcaagatagagaaagtgctgcaacaaggggaaattggcgactgtgcggaaccttatactgtgatcaaggagtcagacggcggaaaatccaaagagaagattgagaaactcaagttacaagccgagagcttttgccagcgtctcggcaagtacagaatgcccttcgcttgggccccaataagtttgtcatcttttttcaacgtatctacgctggaaagggaagttacagatgtggattcagttgttggtcgtagttccgtcggcgagcgccgtactcttgcgcaatccagacgactctctgagcgagcattgagcctcgaggaaaacggagttggctctaactttaagacctccacattatcagtcagctcattctttaagcaggagggtgaccgtctttctgacgaggatctgttcaagttcttggccgactacaagcgctcctcctccctccaaaggagggtgaagagcattcctgggcttcttagactcgaaatttcaacagccccagaaattattaattgttgtctaacccccgagatgctgcccgtcaagcccttccctgaaaaccggaccagaccacacaaggagatccttgaattcccgacccgggaagtgtatgttccacataccgtgtacagaaacctgctgtatgtctatccccagcggctgaacttcgtaaacaaactagccagtgctcggaacatcacgattaagatccagtttatgtgcggcgaagacgcgtccaatgctatgccggtgattttcggtaagagctccggcccagaattcctgcaggaagtctacaccgccgtaacatatcacaataagtcaccagatttctatgaggaggtcaaaattaaattgcccgctaaactgactgttaatcatcacctgctgttcaccttttaccatatatcttgccagcagaagcaaggagcatccgtcgagactctgcttggctactcctggttacccatactgcttaatgaaaggctgcagacaggtagctattgcttaccagtggcgctggagaagctccctccaaattattctatgcatagtgcagaaaaagtgccccttcagaatcccccaattaaatgggccgagggtcacaagggggtgttcaatatagaggtccaggctgtctcaagtgttcacacgcaggacaatcacttggagaagttctttactctgtgccactccttggaaagccaagtgaccttccccatcagagtgctcgaccagaagatttcagaaatggccttagagcacgaactgaagctgtctatcatctgcctgaacagttctagacttgagcccctggtccttttccttcatctggtgttggacaagttattccagctgagcgtgcagcctatggtcatagccggtcaaactgcaaatttttctcagtttgcttttgaatctgtcgtagccatagcaaacagcctccataacagcaaagacttgagtaaagatcagcatggcaggaactgtcttttagcaagctatgtgcactacgtattccggttgccggaggtgcagcgagacgtcccaaagagcggtgcaccaacagctttgttggatcccagatcctatcatacctatggaagaactagtgcggcagctgtgtctagcaaattgttacaggcacgagtcatgagtagtagcaaccccgatttggccggtactcactcggccgctgatgaggaagtgaagaatatcatgtcctccaaacacttccatgaagagttggcgctgcaaatggttgtaagcactggcatggtgcgtgagactgtcttcaaatacgcatggttttttttcgagttgctggtcaagtctatggctcaacatgtgcacaatatggataaaagggacagtttccgaagaacccggtttagcgacaggtttatggatgacatcacaacaatcgttaacgtcgttacctccgagattgcagccctacttgtgaaaccacagaaagagaatgagcaggctgagaagatgaacatctctttggccttttttctctatgatctgctctccctgatggaccgtggttttgtcttcaatctcataagacactactgctctcaactctctgcaaagctgtccaacctaccgacccttatttctatgagactggaatttctcagaattctatgttctcacgagcactacctcaatctgaaccttttctttatgaatgctgataccgcaccgaccagtccgtgtccatcgatctccagtcaaaacagtagtagctgctccagcttccaggaccagaaaatagcatctatgtttgacctgaccagcgagtataggcagcagcatttccttaccggtcttctctttactgaattggctgccgcactggatgccgagggcgagggaataagcaaagtccagcggaaagccgtctccgccatccatagcctcttatcttctcacgatttagacccacggtgcgtgaaaccagaggtcaaggttaagattgcagccctctacctgccgctcgtgggaattattctggacgctttgcctcagctctgcgacttcacagtggccgacacgcgaagataccgaacgtccggttcagatgaagagcaggaaggggcaggagctatcaaccaaaatgtggccctagccatcgcaggtaacaacttcaatctcaaaacttccggcatagttctctcatctctgccgtacaaacagtacaatatgctcaatgccgacacaacgcgaaacctgatgatctgtttcttatggataatgaagaacgcagatcagtcactgattaggaagtggatagcagacctccccagtacacagttgaaccgaatcctcgatcttctatttatatgtgtgctgtgctttgagtataaaggaaagcagtcctccgataaagtgtcaacccaggtcctgcaaaaatccagagatgtgaaagccagactcgaggaggccttgctgcggggtgaaggagcccgtggagagatgatgcgacggagggcccctggtaatgacagatttcctggtctcaacgaaaacctgcggtggaagaaggagcaaactcattggcgtcaggccaacgaaaagctggacaagacgaaagccgaactagatcaggaggccctgatatcaggaaatcttgcaaccgaggcccatctgatcattttggatatgcaggaaaatataattcaggcgtcatctgccctagactgcaaagatagcttgctggggggagtccttagggtgttagtgaacagcctgaactgtgatcaaagcacgacatacttgacacactgctttgcaaccctgagggccctcattgctaagttcggtgatttgttgttcgaagaagaagtggagcagtgcttcgacttgtgtcaccaggtcttgcatcactgctctagctccatggatgtgacccggagccaggcctgtgcaacgctgtatctgctgatgcggttcagtttcggagctacttcgaattttgcgcgagtcaaaatgcaggtcaccatgtcccttgcatccctggtcggtagagcacctgatttcaatgaggagcatttacgtcggagcctgcgcaccattctcgcctactcggaagaggataccgccatgcagatgaccccttttcccactcaggttgaagaattattatgcaacctgaattctatcctctatgatactgtgaagatgagggaattccaggaggacccagaaatgctgatggatctgatgtatagaatcgctaagtcataccaggcctcccccgatctgaggctaacatggctccagaacatggctgaaaaacacaccaaaaaaaaatgctacaccgaggctgctatgtgtctcgtacacgcggctgcactggtagcggagtaccttagtatgctcgaggaccattcgtatctgcctgtggggtccgtgagttttcagaacatctctagtaatgtgctggaagagtcagtggtttccgaagacaccctgagccccgacgaagacggagtttgcgccggacagtacttcaccgaaagtggactggtcggtctattggagcaggcggctgagctattttccaccggcggactttatgagaccgtgaatgaggtgtataagctcgtgataccaatcctcgaagcccatcgtgagttccgcaaactaaccctgacccactcaaagttgcagcgggcttttgattccatcgtcaacaaagatcacaaacggatgtttggcacttattttcgtgtggggttttttgggagtaagttcggcgacttagacgagcaggagtttgtctacaaggagcctgccataaccaaactgccagagatttctcaccggctggaggcattttacggacagtgtttcggcgctgagtttgttgaagtcatcaaagactccactccagtggataagaccaaactggatccaaacaaggcctacatccagatcacctttgtggagccctacttcgacgaatacgaaatgaaagaccgtgttacgtattttgaaaagaattttaatctgagaagatttatgtacacaacccccttcaccctggaagggcgtcccaggggagaattgcatgagcagtatagaaggaatacagtgctgaccaccatgcacgccttcccatacattaaaacgcggatctcagtgatccagaaggaggaatttgttcttactcccattgaggtggcaatcgaagacatgaagaagaagactttacagctcgcggtggccatcaaccaagaaccacctgacgctaaaatgctccagatggtcctccagggctccgtcggtgcaactgtgaaccaaggccctttggaagtagcacaggttttcctggcagagattcccgcagaccctaagctctatcgacaccacaataagcttcggctgtgctttaaagagttcattatgcgctgcggagaagctgtcgaaaaaaacaaaagattaataaccgcagaccagcgtgaataccagcaggaactcaagaagaattacaacaaactcaaggagaatctgcgccctatgattgagagaaaaatcccagaattgtacaagccaatttttagagtagaatctcagaaacgggattcctttcatcggagttcctttcggaaatgtgaaactcagctgtctcagggcagtta

SEQ ID NO: 220460 - DNA, 1182 bp, synthetic construct
  misc_feature 1..1182: note = Description of Artificial Sequence: Synthetic coding sequence
  source 1..1182: mol_type = other DNA
atgaaacggacaagagacgaggtcgatgctactttacagatcgccaagctgaatgctgctgagcttctcccagccgtccattgtctgggcttcggccctggtgcatcgggcgctgccgctggggatttttgcctactcgagctcgagcctactttgtgccagcaacttgaggacggtcacagcctggtgatacgtggtgacaaggatgagcaggcagttctctgttccaaagacaaaacttacgatcttaagattgctgatactagtaatatgttattgtttatccctgggtgcaaaacacccgaccagcttaagaaagaagactcacactgcaatattattcacacagagatatttgggttctccaataattactgggagctgagacggagacgaccgaaactgaaaaaactgaagaagctgttgatggagaacccatacgaggggccagatagccagaaggagaaggattctaacagctccaagtacacgactgaagatttactggatcaaatccaagcatccgaggaggagattatgactcagctgcaggtgcttaatgcctgtaaaattggtgggtattggaggatcctcgagttcgattatgagatgaagttgctgaatcacgtaactcagctggtggactccgaatcatggtcttttggtaaggtgcctctcaatacttgtctgcaggagcttggccctctggagcccgaagagatgatcgaacattgcctgaaatgttacggcaaaaaatacgtggacgaaggcgaagtgtactttgagctggatgcggataaaatctgtcgggctgctgccagaatgttattacagaacgccgtcaaattcaacttagctgaatttcaggaggtgtggcagcagagcgtccccgaaggtatggtgacctccctcgatcagttaaagggcctggcgttagtggataggcactcacgccctgagatcatcttcctgctgaaagtagacgatttaccagaggataaccaagagcgctttaactccctctttagcctgagagagaagtggaccgaagaagatatcgctccatatatacaggacttgtgtggcgaaaagcagaccatcggagcgcttcttaccaagtattcccactctagcatgcagaatggtgtcaaggtatacaactctagacggcctatctcctag

SEQ ID NO: 220461 - DNA, 342 bp, synthetic construct
  misc_feature 1..342: note = Description of Artificial Sequence: Synthetic coding sequence
  source 1..342: mol_type = other DNA
atgagcgcctctgtagtgagcgttatcagcaggttcctcgaggagtatctgtcatcgacgccccagagactgaaactgttggacgcctatttgctgtacatactactgacaggagcattgcagttcgggtattgtctcctggtggggactttcccctttaacagttttctgtcaggattcatcagctgcgttggatcattcatactggccgtgtgtctgcgcatccaaatcaatccacagaataaggcagactttcagggtatttcaccagaaagagcattcgccgacttcttattcgcgtcaacaattctccacctggtagtgatgaactttgttggctag

SEQ ID NO: 220462 - DNA, 285 bp, synthetic construct
  misc_feature 1..285: note = Description of Artificial Sequence: Synthetic coding sequence
  source 1..285: mol_type = other DNA
atgaggacactggcaatacttgccgcaatcctgttggtggccctccaggcacaggccgaaccgcttcaggccagggccgatgaagttgcagctgctccagaacagattgcggctgatattccggaagttgtcgtctccctggcgtgggacgagtcactggcccctaagcacccaggaagcagaaagaacatggcttgttactgtagaattccggcatgtatcgccggagaacgtcgttacgggacttgcatttaccaaggtagattgtgggctttttgctgctag

SEQ ID NO: 220463 - DNA, 285 bp, synthetic construct
  misc_feature 1..285: note = Description of Artificial Sequence: Synthetic coding sequence
  source 1..285: mol_type = other DNA
atgcggactctggccattctcgcagccatcttgctggtggctctgcaggcacaggccgaacctcttcaggcacgggctgatgaagtggcagctgcaccagagcagatagctgcggacatccccgaggtggttgtgtcactggcctgggacgagtcacttgctccaaagcatcccggaagtaggaagaacatggcctgctactgtcgaatccctgcatgcattgccggtgagaggagatatggaacttgcatttatcaggggagactctgggccttctgctgttag

SEQ ID NO: 220464 - DNA, 294 bp, synthetic construct
  misc_feature 1..294: note = Description of Artificial Sequence: Synthetic coding sequence
  source 1..294: mol_type = other DNA
atgcgcattatcgccctgctcgccgcaatacttctggttgcattgcaggtgcgcgcaggcccactccaggcgcgtggtgacgaggcccctggacaagaacagagaggaccagaagatcaggatatctcaatatcctttgcatgggacaagagcagcgcccttcaggtctccgggtctactagagggatggtgtgctcctgtagattagtgttctgccggagaacagaactgagggttggtaattgtttgataggtggggtgtcatttacttattgctgcactcgtgtcgactag

SEQ ID NO: 220465 - DNA, 285 bp, synthetic construct
  misc_feature 1..285: note = Description of Artificial Sequence: Synthetic coding sequence
  source 1..285: mol_type = other DNA
atgagaacaatcgcaatattggctgccattctcctggtggcactgcaggcccaggcagaatcgctgcaggagagggctgatgaggcgaccacccagaagcaatctggggaggataatcaggaccttgccatctcttttgccggaaacgggctctcagcactcaggactagtgggagtcaggccagggccacttgctactgtaggactggtaggtgcgcaaccagggagtcactgagtggggtctgtgaaatctcaggtcggttatacagactctgttgcagatag

SEQ ID NO: 220466 - DNA, 303 bp, synthetic construct
  misc_feature 1..303: note = Description of Artificial Sequence: Synthetic coding sequence
  source 1..303: mol_type = other DNA
atgcgaacccttactatactcacggcagtattactggtggctctgcaggccaaagccgagcccctccaggctgaagacgaccctcttcaggccaaggcctacgaggcggacgctcaagagcagaggggtgctaacgaccaggatttcgcagtctcgtttgctgaagatgcctcgagtagcctgagggccctgggtagcacgcgcgcttttacgtgtcactgccggcgtagctgttactccactgagtactcttatggtacctgtacagtcatgggaattaatcaccgtttttgctgcctatag

SEQ ID NO: 220467 - DNA, 207 bp, synthetic construct
  misc_feature 1..207: note = Description of Artificial Sequence: Synthetic coding sequence
  source 1..207: mol_type = other DNA
atgcggacctcgtacctgctgctatttactctctgccttctcctctcagagatggcttctggcggaaatttcctgacagggttaggccatagaagtgatcactataattgtgtctctagcgggggacagtgtctgtactccgcttgtccaatttttaccaagatacagggaacatgctatcgcggaaaggctaagtgctgtaaatag

SEQ ID NO: 220468 - DNA, 372 bp, synthetic construct
  misc_feature 1..372: note = Description of Artificial Sequence: Synthetic coding sequence
  source 1..372: mol_type = other DNA
atgaagttgctgctattagctcttccgatgctggtgctgctgccccaggtaatccctgcctatagcggagagaagaaatgctggaaccggtccggccattgccgtaagcagtgcaaggacggggaggcagtcaaagacacttgtaaaaacctgagagcgtgttgtataccatctaatgaggaccaccggcgtgtccccgctacatcacctacccccctgagtgattctaccccgggaataatagacgacatactgaccgtgcggtttactaccgattacttcgaagtgtccagcaagaaagacatggtggaagagagcgaggctggcagaggaactgagactagtctgcccaacgttcatcactccagctag

SEQ ID NO: 220469 - DNA, 1002 bp, synthetic construct
  misc_feature 1..1002: note = Description of Artificial Sequence: Synthetic coding sequence
  source 1..1002: mol_type = other DNA
atgagttggataaaagaaggggaactgagcctgtgggagaggttttgcgccaacatcatcaaggcaggtcctatgcccaaacacatcgccttcatcatggacggtaaccggaggtatgcaaagaagtgtcaagtggagaggcaggaagggcacagccagggcttcaacaagctcgccgagacactgaggtggtgtctgaatttgggcattctggaggtcacagtgtacgccttcagtatcgagaacttcaagcgctccaagagcgaggttgacggcctgatggacctcgcccgtcaaaagttttctcgcctcatggaagagaaagagaagcttcagaaacatggagtgtgtatccgcgtactgggagacctccatttgttacctctggacctgcaggagttaattgcacaggctgtgcaggctacgaaaaattataacaagtgtttcctgaatgtgtgcttcgcctacactagccgacacgaaatctcaaatgccgtgcgggagatggcatggggagtcgaacagggactgctggacccttctgacatttccgagagcctgctggacaagtgtctgtataccaaccgctccccccatccagacatcctcattaggaccagtggagaggtgaggctgtcggacttcctgctctggcaaaccagtcacagctgcctggtgttccagccggtcctttggccagagtatactttttggaacctattcgaagccatactgcaatttcagatgaatcactccgttctgcagaaggccagggacatgtatgctgaggaacggaaaagacagcagttggagagggatcaagcaaccgtgaccgaacaactgctgagagagggattgcaagcttcaggggatgcccagttgcgtcggacaaggttacacaagctgagcgcccgtagggaagagcgtgtccagggattcttacaggctctggagttgaaacgggcagactggctggcgcgactgggaacagccagcgcttag

SEQ ID NO: 220470 - DNA, 1005 bp, synthetic construct
  misc_feature 1..1005: note = Description of Artificial Sequence: Synthetic coding sequence
  source 1..1005: mol_type = other DNA
atgtcctggatcaaggagggtgagctgagtctatgggaacgcttctgcgctaacattataaaagccggaccaatgcctaaacatatcgcattcataatggacggcaatcgaagatatgctaagaagtgtcaagtggaacgccaggaagggcacagccagggatttaataaactcgcagagaccttaaggtggtgtctgaacctcggtattttggaagtcaccgtgtacgccttctctatcgagaacttcaagcggagcaaatcggaggtcgatggactgatggatcttgccaggcagaaattttccagactaatggaggaaaaggagaaactccagaagcacggcgtgtgtattagggtactgggggacctgcatttattgccactcgacctccaggaactcatagcccaggcagttcaagccaccaagaactataacaagtgcttcttgaatgtatgcttcgcctatacttcaagacacgaaatcagtaacgctgtgagagagatggcctggggcgtagaacagggactgcttgatccgtccgatatcagcgagtccctccttgataagtgcttgtacacgaaccgctcccctcacccagacatcctcatacggacttccggcgaagtcaggcttagcgattttctgctctggcagacttcacattcttgcctggtgtttcagccggtgctgtggcccgagtatacattctggaacttgtttgaggctatattgcagttccagatgaaccacagtgtgctgcaacaaaaggctcgagatatgtacgctgaagagagaaagcgacagcaattggagcgggaccaggcaacagtcactgagcaactgctcagagaaggcctacaggcgtccggagacgcacagctgcggagaacccgcctgcacaagctgagtgctagacgcgaggagcgggtgcagggcttcttacaggctctggagctcaagcgagccgactggctggccaggctggggacggcatccgcctag

SEQ ID NO: 220471 - DNA, 516 bp, synthetic construct
  misc_feature 1..516: note = Description of Artificial Sequence: Synthetic coding sequence
  source 1..516: mol_type = other DNA
atggatctggccaggcagaagttttctcgtcttatggaggaaaaggagaagctgcagaaacacggagtgtgcattcgggttttgggagatctgcacctccttcccctcgacctgcaggagctcatagctcaagccgttcaggccacaaagaattataataatgatattagtgagtcgttgctggacaaatgtctttacaccaaccggtccccccaccccgacattcttattaggacgtccggggaggtaagacttagcgatttcttactgtggcaacagaaggcacgtgacatgtacgcagaggagaggaaacggcaacagttggaaagagaccaggccacagtgacagaacaactgttgcgtgaagggctgcaggcctctggggacgctcagctgagacgaaccaggctgcacaagttgtccgcgagacgcgaggagcgagtgcagggcttcctgcaagcccttgagctgaagcgagctgactggctcgcacggctcggaaccgcctccgcctag

SEQ ID NO: 220472 - DNA, 501 bp, synthetic construct
  misc_feature 1..501: note = Description of Artificial Sequence: Synthetic coding sequence
  source 1..501: mol_type = other DNA
atggacgggaaccggagatatgcaaaaaagtgccaggtggagcggcaggaggggcacagccaaggattcaataaactggccgagactcttaggtggtgtcttaatttaggcattctcgaggtcacagtgtacgctttctcaattgagaattttaaaagatctaaatcagaagtggacggcctgatggatctcgcccgacagaaattttcacgcctgatggaggaaaaggagaaattacagaaacacggggtgtgcattagggtgcttggggatctacacctgctgcctctagacttgcaggagttgattgcccaggcagttcaagcaacaaagaattacaacaagtgcttcctgaacgtctgtttcgcttatacgagcagacacgagattagtaacgcagtgagagagatggcttggggagtcgagcaaggactcttagacccttctagagatcgattccaccacatcggacaagcttctctcgagttactgacctcttag

SEQ ID NO: 220473 - DNA, 546 bp, synthetic construct
  misc_feature 1..546: note = Description of Artificial Sequence: Synthetic coding sequence
  source 1..546: mol_type = other DNA
atggaggagaaggaaaagctccaaaaacacggggtgtgcataagggtcctgggggatctgcacttgcttccccttgacttgcaggagctgattgcccaggcagtgcaagcaactaaaaactataacaaatgcttcctgaacgtttgcttcgcatatacttccaggcacgaaatctcaaatgccgtgagggaaatggcatggggtgtcgagcagggcctccttgacccctccgatatttcggagtccttgcttgacaagtgtctgtacacaaacagaagtcctcacccagacatcctcatcagaaccagcggcgaagtgaggttatccgactttcttctgtggcaaacctctcactcttgtctggtatttcagccagtcctgtggcctgaatatacattttggaacctcttcgaggccatccttcagttccagatgaaccattcagtgctgcaacacccaggtagccttctgacaaaggcctggaaaaagcccttccagcaggatggagagttatatggcaattgctccagccccaaatcatcctag

SEQ ID NO: 220474 - DNA, 669 bp, synthetic construct
  misc_feature 1..669: note = Description of Artificial Sequence: Synthetic coding sequence
  source 1..669: mol_type = other DNA
atgagctggattaaggagggggaattatcattgtgggaaaggttttgtgccaacataatcaaggcaggcccaatgccgaaacatatcgcctttataatggacggaaaccgtcggtatgccaagaaatgtcaggtggaaaggcaggagggtcattcccagggtttcaacaagctggcggagacactccgctggtgtctaaacttgggcatcctggaggttactgtctacgccttttccattgaaaacttcaagcggtccaaatctgaagtcgatggacttatggatctggccagacagaaattctctaggctgatggaggagaaggagaaactgcagaagcatggcgtctgcatacgggttctcggtgaccttcatttattacctttagatctgcaggaactcatcgcacaggcggtccaggctacaaagaattataataagtgttttttaaacgtctgcttcgcatatactagccgacatgagatctcgaacgccgtgagagagatggcctggggggtggaacagggcctgcttgatcctagataccccgatgatatcagcgagtcgctgttagacaaatgcctctatacaaacaggagtcctcaccctgacattctgatccgaacttcaggcgaggttagactatcagacttccttctttggcaatag

SEQ ID NO: 220475 - DNA, 369 bp, synthetic construct
  misc_feature 1..369: note = Description of Artificial Sequence: Synthetic coding sequence
  source 1..369: mol_type = other DNA
atgagttggatcaaggagggagagttgtccctctgggagcgcttctgcgctaacatcatcaaggccggtcctatgcccaagcacatcgccttcataatggatggcaacaggaggtacgccaagaagtgtcaagtagagagacaggaaggtcattctcagggttttaataagctggctgaaactctgcgctggtgtctgaatctgggaatcctcgaggtgacagtgtatgcatttagcattgaaaactttaaacgctctaagagtgaagtggacggcttaatggatttagcccgacagaagttttccaggctcatggaggagaaagagaaactgcaaaagcatggagtttgtatccgcgtgctcggttag

SEQ ID NO: 220476 - DNA, 216 bp, synthetic construct
  misc_feature 1..216: note = Description of Artificial Sequence: Synthetic coding sequence
  source 1..216: mol_type = other DNA
atgtcatggataaaggaaggcgagctgtccctgtgggagcggttctgtgccaatatcatcaaggcgggtcccatgccaaaacacatcgcctttatcatggatggcaataggcggtacgcaaaaaagtgtcaggtagaaagacaggaggggcattcccagggcttcaataagctggctgagactcttaggtggtgcctgaatctcggaatcctctag

SEQ ID NO: 220477 - DNA, 258 bp, synthetic construct
  misc_feature 1..258: note = Description of Artificial Sequence: Synthetic coding sequence
  source 1..258: mol_type = other DNA
atgagctggattaaggaaggagaactgtccctttgggaacggttttgcgcgaacatcattaaggctggccctatgcctaaacatattgccttcataatggacggaaaccggaggtacgccaagaagtgtcaggtggagcggcaggaaggccacagccaggggttcaacaagcttgccgagactctccgatggtgcctgaacctcggtatactggaagttaccgtgtacgcattctctatagaaaatttcaaacgatag

SEQ ID NO: 220478 - DNA, 885 bp, synthetic construct
  misc_feature 1..885: note = Description of Artificial Sequence: Synthetic coding sequence
  source 1..885: mol_type = other DNA
atgtcctggattaaggaaggagagctctccctttgggagaggttttgtgcaaatatcattaaagcaggaccaatgcccaagcacattgcttttattatggatggtaatagacgctatgctaagaaatgccaggtagaaagacaagagggccattctcaaggtttcaataagcttgcggaaactctccgctggtgccttaacctgggcatcctggaggtgacagtgtacgcattctcaatcgagaattttaagaggagcaaaagcgaagtagacggtctgatggacctcgcacgccagaaattttcccgcctgatggaggagaagtgctttctcaacgtgtgcttcgcctacacctctcgtcacgagattagcaatgcggtgcgggaaatggcctggggggtggagcaagggctactggatcccagtgatatatccgagtcgttgcttgataagtgtttatatactaaccggagccctcacccagacattttgattcgcactagcggggaagtgcggctttccgatttcctgctttggcaaacaagtcattcatgcctcgtcttccagcctgtgctctggccagagtacactttctggaacttgttcgaggccatcctacagttccaaatgaaccattccgttctccaaaaagccagagatatgtatgccgaagagcgtaagaggcaacagttggaaagggatcaagccacagtgactgagcaattgctccgagagggcttacaggccagtggcgatgcccagctgcggcgtactcgtcttcacaagctaagtgcccgaagagaagaaagagtgcaggggtttctgcaagctcttgagcttaaaagagcggactggctggcgaggttaggcaccgcttccgcttag

SEQ ID NO: 220479 - DNA, 183 bp, synthetic construct
  misc_feature 1..183: note = Description of Artificial Sequence: Synthetic coding sequence
  source 1..183: mol_type = other DNA
atgagctggatcaaggaaggggagctgagtttatgggaaagattctgtgccaatatcatcaaagctggaccgatgcctaaacacattgccttcatcatggatggcaatcgcaggtatgccaagaaatgccaagtcgaacgtcaggaaggacactctcagggcttcaacaaactggcggaatag

SEQ ID NO: 220480 - DNA, 396 bp, synthetic construct
  misc_feature 1..396: note = Description of Artificial Sequence: Synthetic coding sequence
  source 1..396: mol_type = other DNA
atgtcctggatcaaggaaggagagctcagtctgtgggagagattttgcgctaatattatcaaagctgggccaatgcctaagcatatcgcatttattatggacggcaacagacgctatgcaaagaaatgtcaggttgaacggcaagagggccacagtcaaggcttcaataaattggcagaaacactgcgctggtgcctcaatttaggcatcctggaggtgaccgtttacgctttctccatcgagaatttcaaacgctccaaatctgaagttgatggcttgatggatctggcacgtcagaagtttagcaggttaatggaggaaaaagaaaagctccagaagcatggagtgtgtatccgtgtgctcggagatcttcatctcctgcccctcgacctttag

SEQ ID NO: 220481 - DNA, 501 bp, synthetic construct
  misc_feature 1..501: note = Description of Artificial Sequence: Synthetic coding sequence
  source 1..501: mol_type = other DNA
atgtcatggattaaggagggagaactgtccttatgggagcggttttgcgcgaatatcataaaggctggcccaatgcctaagcacatagccttcattatggatggaaaccggagatatgcgaaaaagtgtcaagttgaaagacaagagggccattcgcaagggttcaacaaattggcagagacactgcgctggtgcttaaaccttggcatcttggaggtgaccgtgtatgctttctcgatcgagaatttcaaacgcagtaagtccgaagttgatggcctgatggatctcgcacggcagaaattttcccgccttatggaagagaaagagaaactgcaaaagcatggagtgtgtattcgagtactgggcgacctgcacttattacccctcgacctgcaagaattaattgctcaggccgtgcaggcgacaaagaattacaataaatgcttcttaaacgtgtgtttcgcttatacctcgagacatgagatatccaatgccgtgtag

SEQ ID NO: 220482 - DNA, 909 bp, synthetic construct
  misc_feature 1..909: note = Description of Artificial Sequence: Synthetic coding sequence
  source 1..909: mol_type = other DNA
atggtgtggaagaggctcggcgcactggtgatgttccctctgcaaatgatttacctggtggtcaaagccgcagtggggctcgtgctcccggctaagcttcgcgacctttctcgggaaaatgtcctcatcacgggaggtggccgtgggatcggtaggcagctggcacgtgagttcgccgaaaggggggctcgaaagatcgttttatgggggaggaccgaaaagtgccttaaagaaacaaccgaggagatcaggcagatgggtactgaatgtcattacttcatctgcgacgtgggcaatcgtgaggaagtgtaccagacagcaaaagccgtgagagagaaagtcggagatataaccattctcgtgaataacgccgcagtggtgcatggcaaatcactgatggattctgacgacgatgctctgctgaagagtcagcatattaataccttaggacaattctggaccaccaaagcctttctacctagaatgttggagctccagaatggccatatcgtgtgtcttaattccgtgcttgccctgtcggcaatcccgggtgccatcgactactgcaccagtaaggcatccgcctttgcatttatggaatctctgacacttggtcttttggattgtccaggcgtatcagcgacgaccgtgctccctttccacacctctacggagatgtttcaaggaatgcgagttcgttttcccaatttgttcccgcctctcaaacccgagaccgtcgcacgccgaacagtggaagccgttcaactcaatcaagctctgctgctgctgccttggacaatgcacgcacttgttatcctgaaatccattctgccacaggctgcccttgaagagatccataagtttagcggcacttacacttgcatgaatacctttaaaggtcgcacatag

SEQ ID NO: 220483 - DNA, 444 bp, synthetic construct
  misc_feature 1..444: note = Description of Artificial Sequence: Synthetic coding sequence
  source 1..444: mol_type = other DNA
atgggaactgaatgccattacttcatttgcgacgtggggaatagggaggaagtatatcagactgcgaaggcggtgcgagagaaggtcggtgacattaccatcttagtgaataacgcagccgtggttcacggaaagtcccttatggattctgacgacgatgccctcctcaaaagtcagcatataaataccctaggtcagttctggaccaccaaagcttttcttcctcgtatgttggagttgcaaaatgggcatatcgtctgcctgaatagcgtgctagccttaagcgctattcctggagccatcgattactgcacatccaaagcatctgccttcgctttcatggagtccctgactctgggcttactggactgtccaggagtgagcgcaacaacggtgttgcctttccacactagcacagagatgttccagggcatgcgggtgtag

SEQ ID NO: 220484 - DNA, 423 bp, synthetic construct
  misc_feature 1..423: note = Description of Artificial Sequence: Synthetic coding sequence
  source 1..423: mol_type = other DNA
atggctagttccggaatgacccgacgggatccactggcaaacaaagtcgccctggtgaccgcgagtaccgacggaataggctttgctattgccagacggctggcccaggacggagcacacgtcgttgtgtcttcacggaaacagcagaatgttgaccaggctgtcgcaaccctccagggagaagggctgagcgtgacgggcaccgtttgtcacgttggaaaagccgaggacagggagcgactggtggcgactctgtggatggacaaagagaaagaggagtctatgaaagagacgttgaggatacggaggctgggtgaacccgaagactgcgcagggattgtctcatttctctgcagcgaggacgctagctatatcactggtgagaccgtggtcgtgggtggaggcactccttccaggctatag

SEQ ID NO: 220485 - DNA, 837 bp, synthetic construct
  misc_feature 1..837: note = Description of Artificial Sequence: Synthetic coding sequence
  source 1..837: mol_type = other DNA
atgcacaaggccggtctactgggcctgtgcgccagagcttggaacagcgttcgcatggcgagcagcggaatgacccggcgtgatcccctggcaaacaaggtagcacttgttacggcatccaccgacgggataggctttgctattgcccgaaggctggcccaggacggggctcatgtggtggtgagcagccgcaagcaacagaacgtggatcaggcagtggccacccttcaaggggagggcctgtccgtcactgggacagtgtgtcatgtgggcaaggctgaagacagggagcgactggtggccactgctgtcaaactccacggaggaattgacatactggtgagcaacgctgcagttaaccctttcttcggttccatcatggacgtgaccgaagaggtctgggacaaaactctagatataaatgtgaaggctccagcactcatgactaaggccgtggttcctgagatggagaaaagaggcggtggctcggtagtaatcgtgagtagcattgccgcttttagtcctagtcccggtttcagtccatataacgtatctaaaacagctctgctcggacttacgaagactcttgcgatcgagctcgcaccgcgaaatattagggtgaattgccttgcacccggactgattaaaacatctttctctcggatgctctggatggacaaagaaaaggaggagagcatgaaggaaacccttcggataaggcggctgggggagcctgaggactgtgcagggatcgtcagtttcctgtgcagcgaggacgcctcatatatcacaggagagacagttgtcgtcggagggggtacaccctccaggctgtag

SEQ ID NO: 220486 - DNA, 513 bp, synthetic construct
  misc_feature 1..513: note = Description of Artificial Sequence: Synthetic coding sequence
  source 1..513: mol_type = other DNA
atggcatcctcagggatgacccgcagggatccgttagctaacaaggttgccctcgtgacagctagtacggacggtatcggctttgctattgccagacgcctggctcaggatggcgcacatgtagtcgtgtcctccaggaagcagcagaacgtggaccaggctgtagctacactgcagggggaagggctgtccgttacagggactgtctgtcatgtgggaaaggcagaggaccgggagcgtctcgtggcaacagctgtcaagctgcacgggggaatcgatatccttgttagtaacgccgcagtgaacccttttttcgggtctataatggatgtgactgaagaggtgtgggacaagcgcaggctttccggagacagggttttccactccagccttcagtcaataagctcgctcgacggccagggaaagcgcggaaaacacgaacggaaccctgccgacaagaaagtgcggagggcccgaggtctgtgctggcatcgcgtgttccctgtactgtag

SEQ ID NO: 220487 - DNA, 546 bp, synthetic construct
  misc_feature 1..546: note = Description of Artificial Sequence: Synthetic coding sequence
  source 1..546: mol_type = other DNA
atggctagtagcggcatgactcggagagaccccctcgcgaataaggtggctctggtcacagcgagtacagacggaatcgggttcgccattgctcgcaggctggctcaggacggtgcccatgtggtggtgagttctagaaagcagcaaaacgttgaccaagccgttgcgaccctgcaaggagaaggccttagcgtcaccggcaccgtatgtcatgtggggaaagccgaggaccgggagagacttgtggcgacaacgttagatatcaatgtgaaggcgcctgccctgatgaccaaggctgtggtccccgagatggagaagaggggaggcggaagtgtcgtaatcgtgtctagtatagcagcatttagcccatcaccactttggatggataaggaaaaagaggagagcatgaaggagactctgcggattcgcaggttgggcgaacccgaggattgtgctggcatcgtgtctttcctttgttctgaggacgcatcctatattactggagagacagtggtggtagggggaggaacccccagtagattgtag

SEQ ID NO: 220488 - DNA, 477 bp, synthetic construct
  misc_feature 1..477: note = Description of Artificial Sequence: Synthetic coding sequence
  source 1..477: mol_type = other DNA
atgcataaagcgggacttctaggtctgtgtgccagagcttggaattccgttcgtatggcatcatccggaatgacgaggagggatccactggcgaacaaggtcgctcttgttacagcctctacagatggcattggtttcgcgattgcaagacgcctcgcccaggacggtgctcacgtcgtcgtgagttccagaaaacaacagaatgtagaccaagccgttgcaacactgcagggagagggactctcagtgaccggtactgtctgccacgtagggaaggcagaagatcgggaaagactggttgcaacattatggatggacaaagagaaggaggagtcgatgaaagagacgctacggatcaggaggctgggcgagcctgaggattgcgcaggaattgtgagctttctgtgctccgaagacgcctcttacatcactggagaaaccgttgtggtcgggggagggaccccgagtaggctttag

SEQ ID NO: 220489 - DNA, 579 bp, synthetic construct
  misc_feature 1..579: note = Description of Artificial Sequence: Synthetic coding sequence
  source 1..579: mol_type = other DNA
atgcataaggcaggcctgcttggcctctgtgctagagcgtggaattctgttcggatggcgtcctccggcatgacgcgaagggaccccctggctaataaagtggccttggttaccgcttcaacagacggtatcgggttcgccatcgctagaaggctggctcaggacggagcacacgtggtcgtttcatccaggaagcagcagaacgtcgatcaggccgttgccacactacagggcgagggactgtcagtgactggcaccgtctgccatgtggggaaagcagaggatcgcgagcggcttgtcgctaccgcggtgaagctgcacggtggcattgatatcctcgtttcaaacgctgcagttaatccatttttcggaagcattatggatgttacagaggaagtatgggataaattgtggatggacaaggagaaagaagagtcgatgaaggagactttgcgaatacgacgcttgggtgagccagaggactgcgccggtattgtctcattcctttgtagcgaggacgcgagctacatcaccggcgaaacagtagtggtaggagggggaacaccaagccgcttgtag

SEQ ID NO: 220490 - DNA, 681 bp, synthetic construct
  misc_feature 1..681: note = Description of Artificial Sequence: Synthetic coding sequence
  source 1..681: mol_type = other DNA
atggcttcttcaggaatgacgcgacgggatccattggcaaacaaagttgcactggttaccgcaagcacagatgggattgggtttgctatcgccagacgcctagcccaggacggagcccacgtggttgtgtcctctcgaaaacagcagaatgttgaccaagctgtggctaccctgcagggagagggactgtccgtaaccggaactgtttgtcacgtaggcaaggctgaggacagagagaggctggtcgcaacaactctcgatattaatgttaaagcccctgctctgatgacgaaggcagtagtccctgaaatggaaaagcgaggcggtgggagtgttgttattgtgagctcgattgccgcattttccccttcccctggattctctccctataatgtgtcaaaaactgctttgttgggcctgactaaaaccctggccattgagttggccccacgaaatattcgagtgaattgtctagctcctgggctgattaaaacgtctttctccaggatgctctggatggataaagaaaaggaggagtccatgaaggaaaccctgcggattcggaggctcggtgagccagaagattgcgccggaatcgtcagttttttgtgctctgaggacgcatcctacattacgggggagacagttgtggtggggggtggcaccccgagccggttatag

SEQ ID NO: 220491 - DNA, 567 bp, synthetic construct
  misc_feature 1..567: note = Description of Artificial Sequence: Synthetic coding sequence
  source 1..567: mol_type = other DNA
atgcataaggcgggacttctgggcctgtgtgcacgggcttggaacagcgtcaggatggcaagttcggggatgacccggagagaccccttggcaaataaagtggcgcttgttacagcgtccaccgatggaatcggcttcgccatcgcacggcgtctcgctcaagacggggctcatgtcgtcgtgtcaagccgtaagcaacagaacgttgatcaggcagtggcaaccctgcaaggggaaggcctgtccgttacgggtaccgtttgtcacgtaggtaaggcggaggaccgcgagagactggtggccaccgccgtcaaacttcacggaggaattgacattctggtttcaaacgctgcagtaaatccgtttttcgggagcattatggatgtcacagaagaggtgtgggacaagaggcggctctccggagacagggtgtttcactcttctctgcagagcatctcctcgcttgacggccagggcaagcgtggaaagcacgagcggaaccccgctgataaaaaggtcaggagggccagagggttatgctggcatagagtatttcctgttctctag

SEQ ID NO: 220492 - DNA, 600 bp, synthetic construct
  misc_feature 1..600: note = Description of Artificial Sequence: Synthetic coding sequence
  source 1..600: mol_type = other DNA
atgcacaaggctggactactgggcctctgtgcaagagcatggaactcagtacgcatggcctcaagcggcatgacccgacgagaccctctggcaaacaaagtggcattggtcacagctagcacagatggtattgggttcgcaattgccagaaggcttgcccaagatggtgctcatgtagtggtctcatctcgaaagcagcagaatgtagaccaggctgtcgccacccttcagggcgagggtctctccgtgacgggtacagtgtgtcatgtaggcaaagccgaggatagggagaggttggttgccaccaccctagatatcaatgtgaaagccccagcactgatgaccaaagcagttgtcccagagatggagaagaggggcggaggttctgtagttatagtcagctcaattgccgcatttagtccatcacccttgtggatggacaaggagaaagaggagagcatgaaagaaacgctgcgcatccgccgattgggggagcccgaagattgcgccggtatagtttctttcctgtgctctgaagatgcttcctatattacaggggagacagttgtcgttggtggcggtactccttctagactatag

SEQ ID NO: 220493 - DNA, 1374 bp, synthetic construct
  misc_feature 1..1374: note = Description of Artificial Sequence: Synthetic coding sequence
  source 1..1374: mol_type = other DNA
atgcgatcagccgctgttctggccctgcttctttgtgcaggtcaggttaccgcccttccagtaaattcccctatgaacaaaggcgacactgaggtcatgaaatgcattgtggaagtcatcagcgacaccctcagcaaaccaagcccgatgcctgttagccaggaatgtttcgaaactctgcggggagacgagcgcatcctgagcattctgcggcaccagaacctgttaaaggagcttcaggatctggctttacagggggcaaaagagcgcgctcaccaacaaaaaaagcacagcggctttgaggatgagctcagcgaagttctcgaaaaccagagctcacaggccgagctcaaagaagccgtggaggagccgagtagtaaggatgtgatggaaaaaagagaagactctaaggaggcggaaaagtctggcgaggctacggacggtgccaggcctcaggccctgcccgagccaatgcaggaatctaaagcagagggtaataaccaggctcctggcgaagaagaggaagaggaagaggaggccaccaacacgcatccccctgccagcctcccaagccagaagtaccctggccctcaggccgaaggcgattcagagggcctttcccagggcctcgtagaccgagagaaagggttgagcgcagagcccggatggcaagccaagagggaagaggaagaggaggaggaagaagaggcggaagctggcgaggaggcagtgcctgaagaggaggggcctacggtcgtcctgaatccacacccctcactcggctacaaggagattcgaaagggagaatcaaggagcgaagccctggcagtggatggagcgggtaaacctggtgccgaagaggctcaggatccagaggggaagggagaacaggaacacagtcagcagaaggaagaggaagaggagatggccgtcgtgccccagggcctgtttcgaggagggaagtctggcgagttggaacaggaggaggagcgactttctaaagagtgggaagactccaagagatggagcaaaatggatcagctagccaaggagcttaccgccgaaaaacggctggaaggtcaggaagaagaagaggacaacagagattccagcatgaagctatctttcagggccagagcatatggatttcggggtcctgggcctcagctcagacggggatggagaccctccagcagggaagacagcctggaggcgggactgcccctccaggttagaggctaccccgaagagaaaaaggaagaggaaggcagtgctaaccgtcggcctgaggaccaggagttggagagtctgagtgccatcgaggcagaattggaaaaggtggcccaccagctccaggctttaagaaggggatag

SEQ ID NO: 220494 - DNA, 1128 bp, synthetic construct
  misc_feature 1..1128: note = Description of Artificial Sequence: Synthetic coding sequence
  source 1..1128: mol_type = other DNA
atgaattgggagcttctgctgtggttactggttctatgcgcgttactcctgcttttggtccagcttctccgtttcctgagagccgatggggacctgacacttctgtgggccgagtggcaaggacgaagacccgagtgggagttgactgatatggtagtttgggtgactggcgcatcgagcggcatcggagaggagcttgcataccagctatcaaagcttggagttagcctagtgctgtccgccagacgtgttcacgaacttgagcgggtcaaacggaggtgtctggagaatggcaatttaaaagaaaaagatatcctcgtgctgcctctggaccttaccgatacaggctcacacgaggccgctaccaaggcagtgctgcaggagtttggcagaatcgacatactcgttaacaatggcggaatgtcacagaggagcttgtgtatggatacatccctggacgtctacaggaagctgattgagctcaactatttggggaccgttagcctcacaaaatgtgtcttaccacacatgatagaacgtaagcaggggaaaattgtcactgtgaattcaatcctcgggattattagtgtccctctgtcaattggatactgtgccagtaagcatgccctgcggggttttttcaacggccttagaacagagcttgctacctatcctgggattatcgttagtaacatctgccctggacctgttcaaagcaatatcgtcgagaatagtcttgcaggagaggtaaccaagaccataggcaataacggagaccagtcccataaaatgactacctccagatgcgtgaggctcatgctgatctcgatggccaacgatctgaaggaggtctggattagtgagcagcctttcctgctggtaacctatctttggcagtacatgccgacttgggcatggtggatcacccgatggggccgaaaaggcttgagaaccctgcgggtggtgtggatgcagaccctgttaatactgaagagtcttaggcagaatatgaccgagaagtccacttgcacctttcaggcaactggcggacggaatggcaagcatgagaactccaatctgctgatgctgctcaacaatcagcgcctgatctgtgatttcaccttttag

SEQ ID NO: 220495 - DNA, 870 bp, synthetic construct
  misc_feature 1..870: note = Description of Artificial Sequence: Synthetic coding sequence
  source 1..870: mol_type = other DNA
atggtcgtgtgggtcacaggcgcttcaagcgggatcggcgaagagcttgcctaccaactgagcaagctgggggtgtctctggtgctaagtgctcgcagagttcatgagttggagcgcgtgaagcggagatgcttagagaatgggaacttaaaggaaaaggacatcctggtgcttcctcttgatctgacggacacgggcagtcatgaagccgcaacaaaggctgtcctgcaggagttcggtcggatcgacatcctggtgaataatggcggaatgtcccagcggtccctgtgcatggataccagtttagatgtttaccggaaacttatcgaactgaactacctgggaacagtgtcactcacaaagtgcgtactgccacacatgatcgaaagaaagcagggtaagatcgtaaccgttaactccatactgggaatcattagcgtacctctttcgattggatactgtgcatcaaaacatgccctgcggggattctttaatgggctgagaacagaattggcaacatatcccggtattattgtttcaaacatctgccccggtccagtgcagtctaatattgtggaaaactccctcgcgggtgaagtgactaagacaattgggaataatggagaccagagtcacaagatgacaaccagccgctgcgtgcggttaatgttaataagcatggccaatgacctgaaagaagtgtggatttctgaacagccttttctgctcgttacttatctgtggcagtacatgccgacatgggcatggtggatcactaacaagatgggtaaaaaaagaatcgaaaatttcaaatccggtgtggatgctgacagctcctacttcaaaattttcaaaacgaagcatgattag

SEQ ID NO: 220496 - DNA, 1020 bp, synthetic construct
  misc_feature 1..1020: note = Description of Artificial Sequence: Synthetic coding sequence
  source 1..1020: mol_type = other DNA
atgaactgggagctgctcttgtggctgctggtgctttgcgctctcctgctgcttctcgttcagctactaaggtttctgcgcgctgacggcgacctgaccctcctgtgggcagaatggcaaggtcgtagacctgagtgggaactcacagacatggtcgtctgggtcaccggagccagcagtgggattggagaagaactggcataccagctgtccaaactgggcgtcagcctcgtcctctcagcaaggcgggtgcacgaactcgaaagagttaagcgaagatgcttagagaacggcaatttgaaggagaaggacatcctggtgctgcccttagatctgacagatactggctcacacgaagccgctactaaggcagtcctgcaggagtttggacggatcgacatcctggttaacaacgggggtatgtcacagagatcactgtgcatggacactagcctcgatgtataccgtaagctcatcgagcttaattatctcgggacggtgtcattaacaaaatgcgtactgccccacatgatagaacggaagcagggcaaaatcgtgaccgttaattcaatactgggtatcattagcgtgcccctgtccatcgggtattgtgcatccaagcatgcactgcgcggattttttaatggactccgcacagagctcgcgacctaccctggcattattgtgagcaacatatgtccgggaccggtgcaatccaacatcgtcgagaactcattagcaggggaggtgaccaagacaatcggaaataacggggaccagtcacacaaaatgaccacaagtaggtgtgttcggctgatgctgattagtatggctaacgacctgaaagaagtgtggatttcagagcagccttttctcttggtgacttatctgtggcagtatatgcctacctgggcctggtggatcaccaataagatgggcaagaaaagaatcgagaacttcaagagtggcgtcgacgctgattcgtcttatttcaagatcttcaagactaagcacgattag

SEQ ID NO: 220497 - DNA, 186 bp, synthetic construct
  misc_feature 1..186: note = Description of Artificial Sequence: Synthetic coding sequence
  source 1..186: mol_type = other DNA
atgaattgggaactgctgctgtggttactggtgctgtgcgccctcctccttcttctggtgcagctgctgcgatttctccgagcagatggcgacctgacgctgctgtgggctgaatggcaagggcgacgccctgagtgggagctgaccgatatggtagtgtgggttactggagcatcctcgggatag

SEQ ID NO: 220498 - DNA, 960 bp, synthetic construct
  misc_feature 1..960: note = Description of Artificial Sequence: Synthetic coding sequence
  source 1..960: mol_type = other DNA
atgttgttttgggtcctgggactgctgatactttgtggctttttatggacccgaaaagggaaactcaagatcgaagatattaccgataagtacattttcataacaggatgcgattctggcttcggtaacctggctgcacggacttttgacaagaagggcttccacgtgatcgccgcatgcttgactgaatctggctcaactgccctcaaggcagagacctctgagcgactaagaacagtccttctggatgtcactgatcctgagaacgttaagcgcacagcccagtgggtgaagaaccaggtaggtgagaagggactctggggcctgatcaataatgccggtgtgccaggcgtccttgcacctaccgactggctgactctggaagattacagagagcccattgaagtgaacctctttggattaatatccgtaacgctgaatatgttacctttagtaaagaaggcccaggggagggtcattaacgtgagcagcgtagggggtcggctggctatcgtgggaggcggatatacgcctagtaaatacgccgtggaggggttcaacgacagtcttagacgagatatgaaagcattcggagtccacgtgtcgtgtattgaaccaggtttgttcaagacgaatctcgcagatcccgtgaaagtgatcgaaaagaagctggcgatttgggagcagttgagtcccgacattaagcagcagtacggtgagggctacatagagaagtctttagataagctgaaaggtaacaagtcatacgtgaatatggaccttagtccagtcgtcgagtgcatggaccatgctctgacaagtctgtttccaaaaacccactacgcagctgggaaggacgccaagattttctggatcccgctgagtcatatgccagcagccttgcaagattttctgctcctcaagcaaaaggcagagctggccaatcccaaggcagtgtag

SEQ ID NO: 220499 - DNA, 960 bp, synthetic construct
  misc_feature 1..960: note = Description of Artificial Sequence: Synthetic coding sequence
  source 1..960: mol_type = other DNA
atgcttttctgggtgctcggattgttaattctgtgcggctttttatggaccaggaagggaaaactgaaaattgaagatataactgacaaatacatattcattaccgggtgcgattcaggctttggcaacttagcagcaagaacctttgacaagaagggcttccacgtgatagctgcatgccttacggaatctggctctactgcccttaaagccgaaacaagcgaaaggctcaggaccgtgttgcttgacgtgacagaccccgagaatgtgaagaggaccgcgcagtgggttaagaaccaggtgggagaaaaggggctgtgggggctcatcaacaatgccggagtccctggagtactggcaccaactgattggctgaccttagaagattaccgtgagccgatcgaagttaacctgttcggattgatctctgtgaccctgaatatgctgcctctcgtaaagaaggcccaggggagggttattaatgtttctagcgtgggaggccgactggcgatcgtgggcggagggtatacgccaagcaaatatgctgtcgagggtttcaacgattcactgaggcgtgacatgaaggctttcggcgtacatgtgagctgtatagaacccggtctgttcaagaccaacctcgctgacccggttaaggtgattgaaaaaaagctggctatttgggaacagttgtccccagatatcaaacagcagtatggcgaaggctatatcgaaaagtccctggacaagctgaagggcaataagagttacgttaatatggacctgagtcctgtggttgaatgcatggatcacgccctaacttctcttttccctaagacgcactacgctgcaggtaaggatgcaaaaatcttctggatacccttgagtcatatgcccgctgcacttcaggactttctgctccttaaacagaaggctgagcttgccaacccaaaggccgtctag

SEQ ID NO: 220500 - DNA, 960 bp, synthetic construct
  misc_feature 1..960: note = Description of Artificial Sequence: Synthetic coding sequence
  source 1..960: mol_type = other DNA
atgctgttttgggtcctgggcctgctcattctgtgcgggttcttgtggactcgtaagggcaaactgaagatagaagacattaccgacaagtacatcttcatcaccggctgtgattccggttttggaaaccttgctgcccgaacatttgataagaagggttttcatgtgatcgcagcttgtctgactgagtctgggagcacagcactcaaggccgagacctcggaacggttgcgcactgtgctccttgatgtgacagatcctgagaacgtaaaacgtacagcgcaatgggtgaaaaatcaagtcggcgagaaggggctgtggggactcatcaataatgctggcgtgcctggcgtgttggctccgacggactggcttacactggaagattaccgcgaaccgatcgaagttaacttgtttggactgatttccgtgactcttaatatgctgccactggtgaaaaaagcccagggacgtgtcataaatgtgtcatcagtcgggggacgactggctatcgtcggaggcggatacacgccctccaagtacgctgtggaagggttcaatgatagcctccggagggatatgaaagccttcggggtgcacgttagctgtatcgagccaggtcttttcaaaactaatttggctgaccctgtgaaagttattgagaaaaagctcgctatttgggagcaactttccccagatatcaagcagcagtatggggagggatacattgaaaaatccctggacaagctaaaagggaataaaagttacgtgaacatggatctctctcctgtggtggagtgcatggaccacgccttaacctccctgttccctaaaacacactatgcggctggaaaagacgcgaagatcttctggatccccctctcacacatgcccgctgctctccaggactttctgcttctgaagcagaaggccgaacttgccaatccaaaagccgtctag

SEQ ID NO: 220501 - DNA, 519 bp, synthetic construct
  misc_feature 1..519: note = Description of Artificial Sequence: Synthetic coding sequence
  source 1..519: mol_type = other DNA
atgcttccactcgtcaagaaggcccagggaagggtcatcaatgtgtcttccgtaggagggcgactcgcaatcgtggggggaggttataccccaagtaagtatgccgtagaaggattcaacgactccctgcggcgagacatgaaagcgtttggtgtacacgtgtcatgtatcgaacctggtttatttaagaccaatttggcggaccctgtcaaggtgatcgaaaagaagctcgctatctgggaacagcttagccccgatatcaaacagcagtatggagaggggtatatcgagaagagtctcgacaagctcaagggcaacaaatcctacgttaacatggacctaagccctgtcgtcgagtgtatggaccacgcacttacctcgctgttccctaagactcactacgcggcaggcaaggatgcaaaaatcttctggatccctctgtcacacatgccggctgccctgcaggactttctccttttgaagcaaaaggctgagctcgccaaccctaaagcagtgtag

SEQ ID NO: 220502 - DNA, 960 bp, synthetic construct
  misc_feature 1..960: note = Description of Artificial Sequence: Synthetic coding sequence
  source 1..960: mol_type = other DNA
atgctcttctgggtcttagggctgctgatcctctgtggtttcctctggacccgaaagggaaaactgaaaatcgaggatattactgataaatacatatttatcacaggatgcgatagcgggttcggaaatttggctgcgaggactttcgataaaaaagggtttcacgtgatcgcggcttgcctgacggagtcaggtagcaccgccctaaaagcagagacctctgaacgactgcggacggtactcttggacgtgacggaccctgagaacgtcaagcgcaccgcgcagtgggtgaagaaccaagtgggcgaaaagggcctgtggggcctgatcaataatgctggagtgcccggtgttctcgcccctaccgattggttgacgctggaagactacagagagcctattgaggttaatctcttcggcctgatttctgtgactctgaacatgctgcccttggtgaaaaaagcacaagggagggtcatcaatgtgagcagtgtcggtggacgcctcgctattgtgggtggtggatacacgccatccaaatatgccgtggaaggtttcaatgacagcctacggcgtgatatgaaggccttcggggtccatgtgagctgtatcgagccaggcctttttaagaccaatctggcagatccagtcaaggtgattgaaaagaagctcgccatttgggaacagctctcacctgacattaaacaacagtatggggaaggttacatcgaaaagagtctggataagttgaagggtaataaaagctatgtcaacatggacttgagtccagtcgtggagtgtatggatcacgcccttacttctctgtttccaaagacccactacgctgccggaaaggatgcaaaaatcttttggatacccctctcacacatgcccgcagcacttcaggattttctccttcttaagcagaaagctgagctggctaatccgaaagccgtgtag

SEQ ID NO: 220503 - DNA, 1140 bp, synthetic construct
  misc_feature 1..1140: note = Description of Artificial Sequence: Synthetic coding sequence
  source 1..1140: mol_type = other DNA
atgccagagggaaggtcacattgcgcatgctccattacttctctcacacttctcgtctctcttaccagggtgaccctggacatccttcagaaactcgaccctcctcaaccggctcactggcgacatcacctactggtgctgtataagaagggagtgtatctaagccacactggagggaagatgctgttttgggttctgggcctgctgatcctatgcggattcctatggactcgtaaaggcaaattgaagattgaggatatcacagataaatatatatttatcactggatgcgatagcggatttggaaacctggcagccagaacgtttgataagaaggggttccacgtaatagcagcatgtctcactgagagtggctctacagccctaaaggcagagacatccgagcggctgagaaccgtgctgttagatgtgaccgatccagaaaacgttaagcgcactgctcagtgggtgaagaaccaggtaggagagaaagggctttggggactaattaataacgcaggcgtcccaggggtactggcccctactgactggttaactctagaagattatagagaaccaatcgaggtaaacctgtttgggttaatcagtgtcacgctgaacatgctgcctttagtgaagaaggctcagggaagggtgattaatgtgagttccgtgggcggacgactggcgatcgtaggtggtggttatacacccagtaagtatgctgtcgaaggattcaacgactcgctccggcgagatatgaaggcttttggcgtgcatgtaagctgtattgagccaggcctttttaagaccaatttggctgaccctgtcaaggttattgaaaagaaactcgccatttgggagcagctctcacctgatatcaagcagcagtatggggagggatacatcgagaaatctttggacaaattaaaaggaaataaaagctatgtcaatatggatctgagtccggtcgtggagtgcatggaccatgcactgactagtctgtttcctaaaacccactacgccgctggtaaggatgccaagatcttctggatcccgctgtctcacatgccagcagccctgcaagactttctgctattgaagcagaaagctgagctggctaaccctaaggccgtctag

SEQ ID NO: 220504 - DNA, 960 bp, synthetic construct
  misc_feature 1..960: note = Description of Artificial Sequence: Synthetic coding sequence
  source 1..960: mol_type = other DNA
atgttgttttgggtgctgggacttctgatactgtgtggttttctgtggaccagaaagggcaagctgaaaatagaggacatcacagacaaatatatatttatcaccgggtgcgatagcggcttcggcaacttagcagctcgcacctttgataagaaggggtttcacgttatcgccgcttgtctgaccgaatcggggagcaccgccctcaaggccgaaacatccgagcgactcaggacagtgctcctggacgttacggatcctgagaatgtcaagcgtacagcacagtgggtgaagaatcaagtcggcgaaaaagggctttggggcctgattaacaacgctggggtgccaggtgtcctggcccctaccgattggctgaccctcgaggattatagggaacccatcgaagtgaatctgttcggtctgattagtgttaccttgaacatgctgccactggttaaaaaggctcagggcagagttattaatgtttcctccgtgggcggtcgactcgccatcgttgggggagggtacacacccagcaagtacgccgttgaaggattcaatgactctctgcgccgagatatgaaagcctttggggttcatgtctcttgtatagaacccggtttgtttaagactaacctggccgatccagtaaaggtcatcgaaaagaagttggctatctgggagcagctgtcaccagatatcaagcaacaatatggagaggggtatattgagaagagtctcgacaaactcaagggaaataaaagctatgtgaacatggacctcagtccggtggtcgagtgcatggaccatgcactgaccagcctatttccaaagacccattatgctgctggcaaggacgccaagatcttctggatccccctctctcacatgccggcagccctgcaagacttcttgctgttgaaacagaaagccgaacttgccaaccccaaagcagtatag

SEQ ID NO: 220505 - DNA, 201 bp, synthetic construct
  misc_feature 1..201: note = Description of Artificial Sequence: Synthetic coding sequence
  source 1..201: mol_type = other DNA
atgcttttctgggttctagggctcttgatactgtgcgggtttctttggacccgtaagggcaagcttaagatcgaggatatcaccgataaatacatttttatcacaggttgtgatagtggctttgggaatctggcagctcgcacttttgacaagaaggggttccacgtgatcgctgcttgcttgacagagtcaggatcttag

SEQ ID NO: 220506 - DNA, 486 bp, synthetic construct
  misc_feature 1..486: note = Description of Artificial Sequence: Synthetic coding sequence
  source 1..486: mol_type = other DNA
  misc_feature 1..375: note = DNA
  misc_feature 376: note = RNA
  misc_feature 377..486: note = DNA
atgggactcccacagcctgggctctggctcaagcgactgtgggtgcttctggaggttgccgtgcatgtagtcgtcggtaaggtgcttttgatactgttcccagaccgggtgaaacgtaacattctcgctatgggcgaaaaaactggcatgacacggaacccacacttcagccacgataattggatcccgactttcttctcaactcagtatttttggttcgtgttgaaggttcgatggcagcggctggaggacaccaccgaattgggagggctggcccctaactgtcccgtggtgaggctgtccggacagcgctgtaacatttgggagttcatgcagggaaatagacctctcgtgctgaactttgggtcttgtacttgacccagtttcatgttcaagttcgaccagtttaaacgcttgatagaggacttctcctctatcgctgatttcttagtgatttatattgaagaagctcacgcttccgggtag

SEQ ID NO: 220507 - DNA, 750 bp, synthetic construct
  misc_feature 1..750: note = Description of Artificial Sequence: Synthetic coding sequence
  source 1..750: mol_type = other DNA
  misc_feature 1..375: note = DNA
  misc_feature 376: note = RNA
  misc_feature 377..750: note = DNA
atgggactccctcagcctggcctgtggcttaaacgcctgtgggtgcttctggaagtcgccgtccacgtcgtcgtaggcaaagtgctgttaattttgtttcctgacagagtgaaacggaatattctggccatgggcgaaaaaactggcatgactcgtaaccctcacttttcacacgacaattggatacccactttttttagcactcagtacttctggttcgttctgaaggttcgctggcagagattagaggatactacggagctcggtggtctggccccaaattgcccagtggtaagactgagcggccagcggtgtaatatatgggaatttatgcaaggcaatagaccactcgttctgaattttgggagttgtacctgaccttcattcatgttcaaatttgaccagttcaaaaggctgatcgaagattttagcagcattgcagacttcttggtcatctatatcgaggaagctcacgcaagcgatggctgggcctttaaaaacaacatggacattcggaaccaccaaaatctccaggatagactgcaagcagctcatcttcttttagcccgttccccccagtgtccagtcgttgtagacacaatgcaaaaccaaagctcacagctttacgcggcactaccggaacgcctctatattattcaagaaggcaggatcctgtacaaggggaagtctgggccttggaactataacccggaggaggtgcgcgcagtcctcgaaaagcttcattcctag

SEQ ID NO: 220508 - DNA, 606 bp, synthetic construct
  misc_feature 1..606: note = Description of Artificial Sequence: Synthetic coding sequence
  source 1..606: mol_type = other DNA
atggggctgccacagcccggtctctggttgaaaagattgtgggtcctgctggaagtggctgtccatgtggtagtcggcaaagtcctattgattctgtttcctgacagggtaaaaaggaatatactcgctatgggagaaaaaacaggcatgacccgtaacccacatttcagccacgataattggatcccaactttcttttctacacagtacttttggtttgttctgaaggttaggtggcagcgcctcgaggatacgaccgagcttgggggtctggcaccgaactgtccagttgtgaggctctcgggacagagatgtaacatatgggagttcatgcaagacggctgggcctttaagaacaacatggacattagaaaccatcaaaatctacaggaccgtctgcaggccgctcatctgttactggccagatccccacaatgccccgtggtcgtggatactatgcagaaccagtcatctcagctttatgcagcattgcctgaaagactgtacataattcaagaaggccgtatactgtataagggtaagtcaggaccttggaactacaaccctgaggaagttcgcgctgtcctggagaaactgcacagctag

SEQ ID NO: 220509 - DNA, 363 bp, synthetic construct
  misc_feature 1..363: note = Description of Artificial Sequence: Synthetic coding sequence
  source 1..363: mol_type = other DNA
atgttcaaatttgaccagtttaaacgtctgatagaagacttcagctccatcgcagacttcctggttatctacattgaggaggcgcatgcctccgacgggtgggcattcaagaataatatggacatcaggaatcatcaaaatctgcaagacagactacaggccgctcatttgttgcttgcacggagtcctcaatgccccgtggtcgtggacactatgcagaatcagtcatcccagctatacgccgcacttcccgaacgattgtacatcatccaggaggggaggatcttgtacaaagggaaaagcggaccatggaattacaacccagaggaggtccgcgctgtgctcgagaaactgcacagttag

SEQ ID NO: 220510 - DNA, 558 bp, synthetic construct
  misc_feature 1..558: note = Description of Artificial Sequence: Synthetic coding sequence
  source 1..558: mol_type = other DNA
  misc_feature 1..183: note = DNA
  misc_feature 184: note = RNA
  misc_feature 185..558: note = DNA
atgggcctaccacaaccgggactgtggcttaaacgactctgggttctgcttgaggtggctgtgcacgtggtggtggggaaggtcctgttgatcctctttcccgatagggtgaagcgcaacatcctggccatgggcgaaaagactggtaaccgccctttggtacttaacttcggatcatgcacatgaccctcatttatgttcaaattcgaccagttcaagcgcttgatcgaagatttctcatcaattgctgatttcctggtcatttatattgaagaggcgcacgcttccgatgggtgggccttcaagaacaatatggacatccggaaccatcaaaacttacaagatcgcctgcaggctgcccacctgttactcgctcgctctccccagtgccctgttgtggtggatactatgcaaaaccagagcagtcagttgtatgcggcactaccggaacggctgtacatcattcaggaaggcagaattctctacaaggggaagagcggtccttggaattacaatcccgaggaggtgcgggcagtgttggaaaaactccatagttag

SEQ ID NO: 220511 - DNA, 342 bp, synthetic construct
  misc_feature 1..342: note = Description of Artificial Sequence: Synthetic coding sequence
  source 1..342: mol_type = other DNA
atggggttgccccagcccggtctatggctgaaacggctgtgggtactcctggaagtggccgttcatgtggtggtgggcaaggtgctgctcatcctgtttcccgatcgcgttaaacgcaacattctggcgatgggcgaaaagacaggtatgacacggaacccacatttctcacatgacaattggattcccacattcttttccacccagtatttttggtttgtccttaaggtgcggtggcaacggcttgaggacaccacagagctcggtggtctggcgcctaactgtccagtggtacgtctaagcggacagcgatgtaatatttgggaatttatgcaaggctag

SEQ ID NO: 220512 - DNA, 270 bp, synthetic construct
  misc_feature 1..270: note = Description of Artificial Sequence: Synthetic coding sequence
  source 1..270: mol_type = other DNA
atgggaatcctgtctgtggatctcctcattaccctccagatactcccagtgttcttctctaattgcctgtttctggcattgtacgatagtgtcatcttattaaagcacgtggttctactcctatcccgctcaaagtccacccgcggagagtggaggcgaatgttaaccagcgaaggtcttcgctgcgtttggaagagttttttgctggacgcgtacaaacagttgaattgtcctccgagtggttttagcaaggacgggcatatactgtag

SEQ ID NO: 220513 - DNA, 399 bp, synthetic construct
  misc_feature 1..399: note = Description of Artificial Sequence: Synthetic coding sequence
  source 1..399: mol_type = other DNA
atgggcatcctgagcgtcgatttactgatcactctgcagattctgccagtgttttttagcaactgtctgttcctggccctgtatgacagtgttatcctcctgaagcacgtcgtgttgctgctatccaggagcaagtccacacggggagaatggcgtagaatgctgacgtcggagggcctgaggtgcgtctggaaatccttcttgcttgatgcatataagcaagtaaaactgggcgaagatgcacccaactcttccgtggttcatgtctcatcaactgaaggcggtgacaactctgggaatggcactcaagagaaaatcgcggagggcgctacctgccacctgctggacttcgcctcccccgagcgacctttagtggttaacttcggatcagctacttag

SEQ ID NO: 220514 - DNA, 822 bp, synthetic construct
  misc_feature 1..822: note = Description of Artificial Sequence: Synthetic coding sequence
  source 1..822: mol_type = other DNA
  misc_feature 1..396: note = DNA
  misc_feature 397: note = RNA
  misc_feature 398..795: note = DNA
  misc_feature 796: note = RNA
  misc_feature 797..822: note = DNA
atggggatactgtctgtggatctcctgattactttgcaaatacttccggtgttttttagcaattgcctgttccttgccctttatgatagcgtgatcctcctgaagcacgtggttttgcttctctcaaggagcaagagcacacggggtgagtggagacgcatgctcacgagcgaagggctgaggtgcgtgtggaaatctttcttactcgatgcttataagcaggtgaagctcggagaggatgcccctaattcctcggtcgtgcacgtatccagcaccgagggcggagacaactcaggaaatggtacacaggaaaaaatcgcagaaggggctacatgtcacctgcttgacttcgcaagtcctgagagacccttggtcgtcaatttcggatctgctacttgacccccattcacttctcagctgcccgctttcaggaaactggtggaagaattctcatctgttgctgatttcctgctggtctatatcgacgaagcgcacccaagcgatggatgggcaatacctggcgattcttccctctccttcgaggttaagaagcatcagaaccaagaggatcggtgtgccgctgcccagcagctgctggagaggtttagcctccccccacagtgtagggttgtcgccgaccggatggataacaatgccaatattgcctatggggtggcgtttgaacgggtatgcatcgtgcagcggcagaagatcgcatacttgggcggtaaaggtcctttcagctataatttgcaggaagtaaggcactggctggaaaagaacttcagcaaaaggtgaaagaagacacgcttggccggatag

SEQ ID NO: 220515 - DNA, 21 bp, synthetic construct
  misc_feature 1..21: note = Description of Artificial Sequence: Synthetic coding sequence
  source 1..21: mol_type = other DNA
atggggatcctgtctgtctag

SEQ ID NO: 220516 - DNA, 21 bp, synthetic construct
  misc_feature 1..21: note = Description of Artificial Sequence: Synthetic coding sequence
  source 1..21: mol_type = other DNA
atgggcatattatccgtgtag

SEQ ID NO: 220517 - DNA, 168 bp, synthetic construct
  misc_feature 1..168: note = Description of Artificial Sequence: Synthetic coding sequence
  source 1..168: mol_type = other DNA
atgggcatcctcagtgttgaccttctgatcaccctgcagatactgcctgtattctttagcaattgcctatttttagccttatacgactcagtgattcttcttaaacacgttgttctgctcttgagtaggtcaaaatctacccgtggcgagtggcgtaggatgctgtag

SEQ ID NO: 220518 - DNA, 930 bp, synthetic construct
  misc_feature 1..930: note = Description of Artificial Sequence: Synthetic coding sequence
  source 1..930: mol_type = other DNA
  misc_feature 1..267: note = DNA
  misc_feature 268: note = RNA
  misc_feature 269..504: note = DNA
  misc_feature 505: note = RNA
  misc_feature 506..903: note = DNA
  misc_feature 904: note = RNA
  misc_feature 905..930: note = DNA
atgggtattctttccgtggacttattgatcacattgcaaattctgccagtgtttttttccaattgcctctttctcgccctttatgacagcgtgatacttctcaagcacgttgtattactgctctcgaggtctaaatccaccaggggcgagtggcggagaatgctgacctctgaagggctccgctgcgtttggaaatctttcctcctggatgcatataaacagctcaactgtcctccatcagggttttcgaaggacggccacatcttgtgactggtgtacgaagcctacaagtctcggttgctcgtgtactctcatctggatctgtggatggtgaaattgggagaggacgcacctaatagtagcgttgtgcacgtctctagcacagagggaggagataattccggcaacggcacccaggaaaagattgctgagggggcaacctgccacttgttagatttcgcaagccccgaacgacctttggtggttaacttcggatctgcaacctgacctccttttacaagtcagttgccagcattcagaaaattagtcgaggaattttcctctgtggcggacttcctgctggtgtatattgacgaggcacatccttccgacggctgggccatccccggtgacagtagcctgtcatttgaggtaaaaaaacatcagaaccaggaagatcgatgcgccgctgcccagcagttgctcgagagattttcattaccacctcaatgtagggtggtcgcagacagaatggataataacgcaaatatagcttatggagtcgcttttgaaagagtgtgcatcgtgcagaggcagaagatagcttatctgggaggcaagggcccttttagctacaacctccaagaggtgcggcattggctggaaaaaaatttttctaagagatgaaaaaaaacgcggcttgccggatag

SEQ ID NO: 220519 - DNA, 822 bp, synthetic construct
  misc_feature 1..822: note = Description of Artificial Sequence: Synthetic coding sequence
  source 1..822: mol_type = other DNA
  misc_feature 1..396: note = DNA
  misc_feature 397: note = RNA
  misc_feature 398..795: note = DNA
  misc_feature 796: note = RNA
  misc_feature 797..822: note = DNA
atgggaatattaagcgtcgatctgctgatcaccctccagattctgccagttttcttttcaaactgtcttttccttgccctgtacgacagcgtcattctgttgaagcacgttgtgctcctactttccagatcaaagagcacgcgaggagaatggaggagaatgctcacgtccgagggtctgagatgtgtctggaagtcattcctcttggatgcctataaacaggttaaattaggcgaggacgcacccaactcttcagtggtgcatgtatctagcaccgaaggcggagataattcaggtaacgggacccaggaaaagattgctgaaggcgcaacatgccacctccttgacttcgcatcccctgaaaggccgctggttgttaacttcgggagcgcaacctgaccaccatttacatcacagctaccagcattccgcaagctggtggaagaattctcttccgtcgcagattttttgctggtgtatatagacgaggcccacccttcagatgggtgggccataccgggagactcttccctttctttcgaggtcaagaagcatcaaaaccaggaggatcgatgcgcagctgcacaacaactgctggaacgattctccctgcccccacagtgccgagttgtggctgatcgaatggataataatgccaatatagcttatggtgtcgcctttgaaagagtgtgtatcgtgcaacggcaaaagatcgcgtatctcgggggaaagggacctttctcttacaacctgcaagaagtgcggcattggctcgagaagaacttctctaagcgatgaaaaaagacacggcttgcgggttag

SEQ ID NO: 220520 - DNA, 915 bp, synthetic construct
  misc_feature 1..915: note = Description of Artificial Sequence: Synthetic coding sequence
  source 1..915: mol_type = other DNA
  misc_feature 1..507: note = DNA
  misc_feature 508: note = RNA
  misc_feature 509..915: note = DNA
atgcctagacaggccactagtaggctcgtcgtgggtgagggcgagggctctcagggagcaagcggaccagcagcaaccatgctgcgttctctgctgcttcactcgctgcggctttgtgctcaaacagcatcgtgcctggttctatttcctcggttcctggggactgcattcatgctgtggctgctggacttcctctgtatcaggaaacactttcttgggaggagaaggaggggccagcccgagccagaagtcgagctgaactctgagggcgaggaggtcccgcctgacgatccgccaatctgcgtctccgatgataacagattatgtactcttgcctcgctgaaagcggtatggcatggacagaagctcgacttttttaaacaggcccacgaaggcggacccgctcccaatagtgaggtggtgctgcccgatggtttccaaagccagcatatcctggattatgcccagggcaaccgcccactggtcttaaatttcgggagttgtacatgaccacctttcatggcaaggatgtccgcctttcagcgcctcgtgaccaaataccagcgggatgtggatttcctcattatctacattgaggaagcacacccttctgacggatgggtcacaactgactcaccgtacattattccccagcacagatcactggaggaccgggtttccgccgctcgggtcctgcagcagggcgcacctggctgcgcgctggtcttagacaccatggctaactcctcttcttccgcctatggcgcatattttgaaagactatacgttattcagagcggcaccattatgtatcagggcggaagaggcccagacggttaccaggtgagtgaattgaggacctggctagagcgttacgacgagcagctacatggtgcacgacccaggcgcgtttag

SEQ ID NO: 220521 - DNA, 1026 bp, synthetic construct
  misc_feature 1..1026: note = Description of Artificial Sequence: Synthetic coding sequence
  source 1..1026: mol_type = other DNA
atgagtgctagtgcacctgccgcagaaggagaaggcacccctacacaaccagcgagcgagaaagagcccgagatgcccggtcctcgtgaggaatcggaagaggaagaagatgaggacgacgaggaagaggaagaggaggagaaggggaagggacaaaagttgtgtgagatcgagaggatccacttctttctgagtaaaaagaaaacagatgaactccgaaacctacacaagttgctttataatagacctgggacagtctcgtctttgaagaaaaacgtcggacagttttctgggttccctttcgagaaggggtctgtgcaatacaagaaaaaggaggagatgctcaagaagttcaggaacgcaatgttaaagagcatctgtgaggttctggacctggagagatccggggtcaatagcgaactggtcaaacgtattctcaacttcctgatgcatccgaaaccaagcggcaaacccttgccgaaatccaagaagacatgctcaaagggaagcaaaaaggagaggaacagctcggggatggcaagaaaagccaaacgcacgaaatgtcctgagatcctgagcgatgagagctctagcgatgaagatgagaagaagaataaggaggagagcagcgatgacgaagacaaggagtccgaagaagaaccacccaagaagactgccaaacgggaaaagccaaagcagaaagcaacttcaaagtcaaagaagtcagttaaatccgctaacgttaaaaaggctgattccagtacaaccaagaaaaatcagaattcaagtaagaaggagagcgagagtgaagatagctccgacgacgaaccactgatcaagaaacttaaaaagcctccaactgacgaggagctgaaagagactataaagaaactgcttgcaagcgctaatttggaggaagtgacaatgaagcaaatctgcaagaaggtttatgaaaattatccaacctacgatctgacggagcgcaaggacttcatcaagaccacggtcaaggagttgatttcttag

SEQ ID NO: 220522 - DNA, 1128 bp, synthetic construct
  misc_feature 1..1128: note = Description of Artificial Sequence: Synthetic coding sequence
  source 1..1128: mol_type = other DNA
atgagcgcttccgcgccagccgcagagggcgagggcacacccacacagcccgcatctgagaaggagcccgagatgccaggcccaagagaagagagcgaggaagaggaggatgaggatgatgaagaggaagaggaggaagaaaaagaaaaatcactcatcgtggagggcaagcgagagaagaagaaggtggagaggctaaccatgcaagtttctagtctacagcgggaaccctttaccattgctcagggaaagggccagaagttgtgcgagattgagagaatccattttttcctgagtaagaaaaaaacagacgagctgaggaacctgcataagctcctgtacaaccgtcctgggacagttagctcgttaaaaaagaacgttggccagttctccggctttcctttcgagaaagggagcgtgcagtataaaaagaaagaagaaatgcttaaaaaatttcggaatgctatgcttaaatccatttgtgaagtgttagatctcgaacgatcaggcgtgaactcagagctggtcaaaagaatcctgaatttcttgatgcacccaaaaccctcaggaaaacccctgcccaaaagcaaaaagacctgctccaaagggagcaaaaaagagcgcaattcttctggtatggcacgaaaggcaaagcggacaaaatgtcctgaaattttgtcggacgaaagttcatcagacgaagacgaaaagaagaacaaggaagagtcttcagacgatgaagataaggagagtgaggaggagccccctaagaaaactgccaagcgtgagaagcccaagcaaaaggctacttctaagagcaagaaatctgtgaaatccgctaatgtgaagaaggctgactccagtacaaccaaaaagaaccagaattcctccaaaaaggagtccgaatccgaggactcttcagatgacgagcccctgataaagaaattaaaaaagccccctacagacgaggagttgaaagagactatcaaaaagctgttggcttctgccaatctagaagaggtgacgatgaagcagatctgtaaaaaggtatacgaaaattaccccacttatgaccttacagaacggaaggatttcattaaaactacagtcaaggagcttatttcctag

SEQ ID NO: 220523 - DNA, 1101 bp, synthetic construct
  misc_feature 1..1101: note = Description of Artificial Sequence: Synthetic coding sequence
  source 1..1101: mol_type = other DNA
atgagcgcagccaacccagaaacacctaacagtactatctcaagagaggcctctactcagtccagcagcgcagccgcaagtcagggctgggtgctacctgagggcaagatcgtacctaataccgtcttcgtaggcggaatagatgccaggatggacgagaccgagatcggctcctgttttggtagatacggtagcgtcaaagaggtcaaaatcataacaaaccggaccggcgttagtaaaggctacggatttgtgtcattcgtgaacgacgtggatgtacagaaaatcgtgggatctcagatccacttccacggcaagaaactaaagctggggccagcaataaggaaacaaaaactgtgtgcaaggcacgtgcagccccgacctttagttgtcaacccaccgcctcccccacagtttcaaaacgtgtggcggaaccccaatactgaaacttacctgcagcctcagattacccccaatccggtgacacagcatgtgcaggcatacagcgcgtatccgcacagccctggacaggtcattaccgggtgccagctgctggtttacaattaccaggaatatcctacgtatcccgactctgccttccaggtgactacaggatatcagcttcccgtttacaactaccaaccctttcctgcatatccaagcagccccttccaggtgaccgccggttaccaattgcctgtctacaattaccaggcctttccagcttaccccagttcacccttccaggtgacaactggatatcagctgcctgtgtataattatcaggcattccctgcctacccaagttcgccatttcaggttacaaccggataccaactacccgtctacaattatcaggccttccccgcataccccagttcaccctttcaggttacgacagggtaccaacttccagtgtacaattaccaagcatttcccgcataccccaacagcgccgttcaggttactacaggataccagttccatgtctataactatcaaatgccccctcagtgccctgtgggggagcaacgccgaaatctgtggactgaggcctacaagtggtggtatctggtgtgtctgattcagaggagggattag

SEQ ID NO: 220524 - DNA, 1605 bp, synthetic construct
  misc_feature 1..1605: note = Description of Artificial Sequence: Synthetic coding sequence
  source 1..1605: mol_type = other DNA
atgtctgccgcaaaccccgagacaccaaacagcacaatttcccgggaggcaagcacgcaatcatcttccgcagcggctagccaaggatgggttctgcctgagggcaaaatagttcccaacaccgtttttgtcggaggtatcgatgcaagaatggatgagacagagatcggtagttgctttggtaggtacgggtccgtcaaagaggtcaagataataacaaatagaacaggcgtgtccaaaggctacggttttgttagttttgtaaacgacgtcgatgtgcagaagatcgtcggttctcaaatccactttcatgggaaaaaactgaagctgggaccggctattcgtaagcagaaactatgtgctcgccacgtgcagccacgtcctctggttgtgaacccccctccacctccacagtttcaaaacgtgtggaggaatccaaacacagaaacctatctgcagcctcagatcactcctaaccccgtgacgcagcacgtgcaggcctattcggcatacccgcattcccctggacaggttatcaccggttgccagctcttggtgtataattatcaggagtaccctacctaccccgattcagcctttcaggtgaccacaggatatcagctgcctgtttacaactaccagccattccccgcttacccacgatcgccctttcaagtgactgcaggctaccagcttccggtatataactaccaggcttttcctgcatatcccaactctcctttccaggttgccaccggttatcagtttcctgtctacaactaccagccattccccgcttatccaagttccccgttccaggtaacggctggctaccaactccccgtgtataattaccaggcatttcctgcttaccctaatagtccttttcaggtggccacaggttatcagtttcctgtttataattaccaagcatttccggcatacccaaactctccagtgcaggtaactaccgggtatcagctgcctgtgtacaactatcaggcatttccagcctacccctcttctcccttccaggtcaccaccggctatcagctccctgtctacaattatcaagcgttccctgcataccccagcagcccatttcaggttaccacaggatatcaactgccagtttataattaccaagcattcccagcttatccgtcttccccgttccaggtcactaccggctaccaactacctgtctataactaccaggcctttcccgcatacccctcatcacctttccaggtcaccacaggataccagctgcctgtgtacaattaccaagcctttccggcatatcccagttcccctttccaagttacaactggttatcaactacccgtctacaactatcaggcattccctgcttaccctagcagtcccttccaagtgaccactggataccaacttcccgtatataactaccaggcatttcctgcttaccctaactcagctgtgcaggtgaccactgggtatcagttccacgtctataactatcagatgcccccacaatgccctgtgggagaacagcgcagaaacctgtggactgaggcttacaaatggtggtatctggtatgtctcattcagcggagggattag

SEQ ID NO: 220525 - DNA, 1821 bp, synthetic construct
  misc_feature 1..1821: note = Description of Artificial Sequence: Synthetic coding sequence
  source 1..1821: mol_type = other DNA
atgtccgccgcaaaccccgagacccctaacagtaccatcagccgcgaagcctctactcagagtagctctgctgctgcttctcagggttgggtgctcccagaagggaaaattgtgccaaatacagtatttgtgggagggattgatgccagaatggatgaaacggagataggctcttgtttcggtaggtacggatctgtgaaggaggttaaaatcataactaacaggaccggtgtctcgaaaggctacggattcgtttccttcgtcaacgatgtagacgtgcagaagatcgtgggctcccagattcattttcacggaaagaagctcaagctaggccctgctatcagaaagcagaaactgtgtgctcgccacgtccaaccccgtcctctcgttgtgaatcctccccctcctccccagtttcagaacgtgtggagaaatccaaacactgagacctacctgcagcctcagataacacccaaccccgttacccaacatgtccaggcatactcagcgtatcctcacagtcccggtcaggttatcaccggttgccagcttctggtgtataattaccaagaatacccaacctatccagactccgccttccaggtaacaaccggttatcagttgcctgtgtacaactatcagccctttcccgcttatcccagatctccctttcaggtgaccgcaggatatcagctcccggtgtacaattaccaggcgttccctgcttatcccaactctccctttcaggtggcaacagggtaccaatttcccgtgtataattaccaacctttccctgcttatccgtctagccccttccaggtcacagccggataccaactgcccgtctacaactaccaggctttcccagcctatcccaattcccccttccaggttgctacgggttatcagtttccggtttacaactaccagccgtttcctgcctacccttcttccccatttcaggtgactgctggataccagctgcctgtgtataactatcaggccttccctgcctaccctaattcgcctttccaggttgcgacaggttaccaattcccagtctacaactatcaagcattcccagcctatcctaacagccctgtccaagtgactactggatatcagctccctgtctacaactatcaggcatttcccgcttaccccaattctccagtgcaggtgactaccggatatcagttgcctgtgtataattatcaggcctttccagcttatccatcctcgccctttcaagtaacaacaggataccagcttccagtgtacaattaccaggccttcccagcctaccccagcagccctttccaggttaccactgggtatcagctgcctgtttataattaccaggcctttccagcatacccctcatctccttttcaggtaacaacaggctaccagttgcccgtttacaactaccaggcgtttccggcataccctagctccccatttcaagtcaccacaggctatcaactcccggtttataactatcaggcctttcccgcataccccagtagtcctttccaagtgacaactggttatcagctgccagtgtacaactaccaggcttttccggcatacccatcttccccctttcaggtcaccacggggtaccagttaccggtgtataattaccaggcctttcccgcttaccctaacagcgccgttcaggtgacaacaggataccaattccacgtctataattatcaaatgccaccacagtgtcctgtgggtgaacagcggaggaacttatggactgaggcttataaatggtggtatctggtgtgcttaatccagcgaagggattag

SEQ ID NO: 220526 - DNA, 1461 bp, synthetic construct
  misc_feature 1..1461: note = Description of Artificial Sequence: Synthetic coding sequence
  source 1..1461: mol_type = other DNA
atgagtgccgctaatcccgaaacccctaatagtactatctctagagaagctagcacacaatcctccagcgcagcggcttcccagggctgggttctgccagagggaaagattgtgcccaataccgtatttgtggggggaatagatgccagaatggatgaaaccgagataggctcttgttttggcaggtatggctccgtcaaagaagtgaaaatcattacaaaccgtaccggcgtgagcaaggggtacgggttcgtcagctttgtcaacgacgtggacgtccagaaaatcgttggctctcagatccatttccacggaaagaagctgaagctcggacccgctatccgcaagcagaaactgtgcgccaggcacgtgcagccacgcccactcgtggtgaaccctcctcctcctccccagttccagaacgtgtggcgcaaccccaacacagagacctatttgcaaccccaaatcactccaaacccagtgacgcaacacgttcaggcgtactcggcatacccgcattctccaggtcaggtgatcactggctgtcagctactggtgtataactaccaagagtaccccacataccctgattctgctttccaggttaccaccggatatcagctgcccgtttataattaccagccgttccccgcatatccccgttctccattccaagtcaccgccggataccaactgcccgtttacaactatcaagcttttcccgcatatccaaatagcccctttcaggtggccaccggttaccagttccccgtgtacaactaccagcccttccctgcctacccctccagtccctttcaggtcactgctggctaccagctgccagtttacaattatcaggcttttcctgcgtatcctaactctccctttcaagtggcaactggatatcagtttcccgtatataactaccagcctttcccagcttacccgtcgagtccatttcaagttaccgcaggctaccaactgccggtctataattaccaggctttcccagcgtatcccaatagtcccttccaggtcgccacgggataccaattcccagtctacaactatcaagcgtttccagcttaccctaactcaccagtccaggtgacaacaggctatcagctcccagtgtacaactaccaagctttccctgcttacccgaactctccctttcaggttgctaccggctatcagttcccagtgtacaattaccaggcatttcccgcatacccgaactccccagtgcaagtcactaccggttaccaactgcccgtttacaactatcaggcctttcctgcctacccaaatagcgccgtccaggtgaccactggctaccagttccacgtttacaactatcagatgccaccacagtgccctgtcggcgaacagagacgaaatctttggactgaagcctataaatggtggtacctagtctgccttatccagagaagggactag

SEQ ID NO: 220527 - DNA, 1677 bp, synthetic construct
  misc_feature 1..1677: note = Description of Artificial Sequence: Synthetic coding sequence
  source 1..1677: mol_type = other DNA
atgagtgcagcaaaccccgaaaccccgaacagcaccatatctagggaggcaagtacccagagcagctcagcggctgcatcgcaaggatgggtgctgcccgaaggaaaaatagtgcccaatactgtgtttgtcggagggatagacgccagaatggacgagactgagatcggctcctgctttgggcgttacggcagcgtcaaggaagtaaaaattatcactaatcgcactggagtaagcaaaggctatgggttcgtgtcgtttgtgaatgacgtcgacgtgcagaagattgtgggctcacagattcatttccacggtaagaaactcaagctgggtcccgctatcagaaaacagaagctttgcgcgcgtcacgtgcagccacgaccacttgtggtgaatccaccaccaccacctcaattccaaaacgtctggcggaatccaaacacagagacctatctacagcctcagattactcctaacccggttacccagcacgtgcaggcatacagcgcctaccctcattctccaggacaggttatcacaggctgtcagctgttagtgtacaactaccaggagtatcctacttatcccgactccgcattccaggtcacaacgggctatcagctgcccgtgtacaattatcagcctttccccgcttaccccagatcccctttccaggtgacggctggttatcaattgcccgtctataactatcaagcatttcctgcctatcctaactctccatttcaggtggcgactggatatcagttccctgtatacaactatcagccctttcctgcttacccttccagccccttccaggtcacagctgggtatcaactgccagtgtataattatcaagcttttccggcatatcccaactctcctttccaggtggccactggataccagttccccgtctacaactaccaagcttttccggcttaccccaatagtcccgtccaggtaacgactgggtaccagttgccagtgtacaattatcaggctttccctgcataccccaattccccagtccaggtgacaacaggttaccaactgcccgtctacaactaccaggcttttccagcctatccatccagtcccttccaggtgactaccgggtatcagcttccagtgtacaattaccaggcattcccagcttacccatcctcacctttccaagttacaactggttaccaactgccggtgtataattaccaagcgttccccgcatacccaagttcgccttttcaggttacaacaggctatcagttgcccgtctacaactaccaggcctttcctgcataccctagctcccccttccaagtgactaccggctaccagttacccgtatataattatcaggcctttcccgcatatcctagcagcccgtttcaggtgactaccggctaccagctcccagtttataactaccaagcgtttcccgcatatccgtcctctcctttccaagtcactacagggtatcaactgcctgtctacaattaccaggcattccctgcatatcctaactctgccgtccaggtgacaacgggataccagttccatgtgtataattatcagatgcctccacaatgtcccgttggtgagcaaaggcggaatctgtggaccgaggcttacaaatggtggtacctcgtatgcctcatccagcgccgtgattag

SEQ ID NO: 220528 - DNA, 1086 bp, synthetic construct
  misc_feature 1..1086: note = Description of Artificial Sequence: Synthetic coding sequence
  source 1..1086: mol_type = other DNA
atgagcgcagcgaatcccgagaccccaaattccacaatctctcgcgaagcgagcactcagtcatcatccgccgcagcctcccagggatgggtgctgcccgagggcaaaatcgttccgaatacggtgtttgtcgggggaattgacgctcggatggatgagacagagatcggcagctgctttggaagatacgggtcggttaaagaggtgaagatcattacaaaccgaacaggcgtgagcaaaggttatggatttgtgtccttcgtgaacgacgtggacgttcagaagattgtcggttctcagattcacttccatgggaaaaaattgaaactgggaccagcgattaggaagcagaaactgtgtgccagacatgtgcaaccacggcctttagtggttaatcccccaccaccaccgcagttccagaacgtctggcggaacccgaatactgagacatatctgcagcctcagattacccccaatcctgtgacgcaacacgttcaggcttactcagcctaccctcactcccccggacaggtgataacagggtgccagctccttgtctacaactaccaagagtacccaacataccctgattccgcctttcaggttaccactgggtatcagctgccagtctataactaccaacctttcccggcatatcctaggtctccgtttcaggttacagcaggttaccagctgcctgtatacaattaccaggccttcccagcgtatccgaacagccccttccaggtcgcaactgggtatcagttccccgtttataattatcaaccgttccctgcatacccctcctcaccgtttcaggtcaccgcagggtatcagctccctgtatataattaccaggcatttcccgcttatccaaacagccccttccaggtggctacgggttaccagttccctgtgtataattaccaggcctttcctgcttaccctaatagcccgttccaggtggccacgggctatcagttcccagtttacaactatcaagccttccccgcataccccaattctcctgtgcaagtcacgaccgggtaccagctgccagtgtataactaccagatgcccccatag

SEQ ID NO: 220529 - DNA, 1965 bp, synthetic construct
  misc_feature 1..1965: note = Description of Artificial Sequence: Synthetic coding sequence
  source 1..1965: mol_type = other DNA
atgagtgcagccaaccccgagacaccaaattccacgattagtagggaggctagtacgcagtcctctagtgcagctgcaagccagggctgggtgctccccgaagggaagattgtcccaaatactgtgtttgttgggggaatcgatgccagaatggatgagactgagatagggagctgttttggtcggtatgggagtgtgaaggaggtgaagatcattacgaataggaccggcgtgagtaaaggctatggcttcgtaagtttcgttaacgatgtagacgtccagaagatagttggttctcagatccactttcacggaaaaaaactgaaattaggcccagccatcagaaaacagaagctttgtgctcgccacgtgcaaccgcgaccattggtggtaaatccgccacccccaccgcagttccaaaacgtctggaggaacccaaatacagaaacatatctacaaccgcagatcaccccaaacccagtgacccaacatgtacaggcctatagtgcctacccccattcaccaggccaggtgatcacgggatgtcagctgctggtctataactatcaagagtatcccacctaccccgattcggcttttcaggtgactaccgggtatcaactgccagtgtacaattaccagccctttcctgcctatccaaggtctcccttccaggtaactgccggttaccagctgcccgtatataactaccaggcatttcctgcctatcccaactctccatttcaagtggccacgggctaccagttccccgtctataactatcagccttttcccgcttatccatccagccctttccaggtgaccgccggatatcagctccctgtgtataattatcaggcctttcctgcttacccaaatagtccctttcaggttgcgacgggataccagttcccagtatataactaccaaccttttccggcttacccttccagtccgtttcaggttactgctggctaccagctgcccgtgtataattaccaagctttccccgcttacccgaacagccccttccaagtagcaaccggctatcaattcccggtgtataattaccaggccttccctgcctaccctaactcacccgtccaggtcacaaccggataccagttaccggtctataactaccaaccattccctgcttacccacgatccccttttcaggttactgcaggctatcagctgcctgtgtacaactaccaggcgtttcccgcttaccccaacagtccatttcaagtggccaccgggtaccagtttcctgtctataactaccaggcgtttccagcttaccctaattccccggtacaggtgacaacaggttaccagctgcccgtgtacaactaccaggccttccccgcatacccaagttcaccattccaggtgacaaccgggtaccagctgccagtatacaactaccaggccttccctgcctatccttcaagcccctttcaggtcaccacaggctaccagctccctgtgtataattaccaagcctttcccgcataccccagcagtccattccaggtgactaccggataccagctgcctgtttacaattatcaggcgtttccagcctatccatcgagtcccttccaagtgactacaggataccagctaccggtgtacaactatcaagcttttcccgcatacccaagctcaccatttcaggttaccaccggctatcagctccccgtgtataactatcaggcctttccagcatatccatctagcccctttcaggtcaccactggataccagctgcctgtctataattatcaggcatttcctgcctacccaaactcggctgtccaggtcaccaccgggtatcagttccacgtctataactaccagatgccgccacagtgtccagtaggggaacagcgcaggaatctgtggactgaggcttacaagtggtggtaccttgtctgcttaatccaacgccgagattag

SEQ ID NO: 220530 - DNA, 1605 bp, synthetic construct
  misc_feature 1..1605: note = Description of Artificial Sequence: Synthetic coding sequence
  source 1..1605: mol_type = other DNA
atgtcagcagcgaatcctgagacacctaactcaacaatcagcagagaagccagtactcagagctcttcagctgccgcatcccagggatgggttctccctgaagggaagatcgtcccgaataccgtctttgtaggaggaattgacgctcgtatggatgagaccgagatcggttcgtgctttggacgctacggtagcgtgaaagaggtaaagatcataaccaatcgcaccggagtgtcaaagggctatggattcgtgagtttcgtcaatgacgttgatgtgcagaagatcgtagggagccagatccattttcacgggaaaaagctcaaacttggccctgctattagaaaacagaagctgtgtgccagacacgtgcaaccgaggccgctggtggtcaacccccctcccccaccccaattccagaacgtgtggcggaatcccaataccgagacctaccttcagcctcagatcactccaaatccagtcacccaacatgtgcaagcctactcagcatatcctcactcgccgggacaggtaatcaccggttgtcaactgctcgtctataactaccaagagtacccaacatacccggacagcgcgtttcaggttaccaccgggtaccagctcccagtttataactatcagccctttcctgcatatccacgctccccctttcaggtgactgctggttaccagcttccagtctataattaccaagcgttcccagcttaccctaactccccctttcaggtagctactgggtatcagttcccagtctataattatcagcctttccctgcctacccctccagcccatttcaggtgactgcaggctatcaattacccgtgtacaattaccaggcatttccagcgtaccccaactcacccttccaagtcgccaccggctaccagtttccggtctataattatcaggccttcccggcataccccaatagtccagtgcaggtgaccacaggctaccaactgcccgtctacaattaccaagctttccctgcttacccctcaagtcctttccaagtgaccactggataccaactgcccgtgtataattaccaggccttcccggcatatccgagcagccccttccaagtaaccactggttatcagcttccagtttataattaccaggcctttccggcttatcccagctccccttttcaagtgactaccggctaccagttgcccgtttataactaccaggccttccctgcctacccatcctccccgttccaggttacaaccggctaccagctacctgtgtacaattatcaagccttcccagcttacccttcaagcccttttcaagtaaccaccggctaccagctacctgtatacaattaccaagcctttccagcctacccctcttcaccgtttcaggtgacaacaggctaccagttaccggtgtacaactaccaggctttccccgcttatcctaactctgcagtccaggtgaccactggctaccaattccatgtgtataattaccagatgccaccccaatgccccgttggcgaacaacggagaaatctatggacagaagcttacaaatggtggtatcttgtgtgtctaatccaaagaagggactag

SEQ ID NO: 220531 - DNA, 1317 bp, synthetic construct
  misc_feature 1..1317: note = Description of Artificial Sequence: Synthetic coding sequence
  source 1..1317: mol_type = other DNA
atgagtgcggctaatccagaaacaccgaacagcaccatttcccgggaggcaagcacacagtcttccagtgcagctgcctcacagggctgggtactgccagaaggaaaaatcgtgccaaacaccgtgtttgtagggggaattgacgcaaggatggatgaaaccgagatcggttcatgttttggccgatacggatcagtcaaagaggtcaagataatcaccaaccggaccggtgtttccaaagggtacggattcgtatcattcgtgaacgacgtggacgtccagaagattgttggaagccaaatccacttccatgggaagaaactaaaacttggccctgcaatccgtaagcagaaactgtgcgctcgccacgttcagcctagaccacttgtggtgaatccaccacccccaccccagtttcagaacgtttggaggaatccgaacacagaaacttatttgcagccacaaatcactcctaatcccgtgactcagcatgtgcaagcttactcagcatatccacattctccgggacaagtgatcacaggctgccagctgcttgtgtacaattaccaggaatatcccacataccccgatagcgcctttcaggtgactacagggtaccagctccccgtgtataattatcagcccttccccgcttatcctagatccccgttccaggtgacagctggataccagttacccgtttacaactaccaagcttttcccgcttatccgaattccccctttcaggtcgcaaccggctaccagtttcctgtctacaactatcaggccttcccagcctatcctaatagccctttccaggtggccaccggataccagttcccagtgtataactatcaggcgttccccgcataccctaatagccccttccaggtcgccaccggctatcagttcccagtctacaactaccaagctttccccgcttatcctaactcaccggtgcaagtaacgacaggataccagcttcccgtctataattaccaagctttccctgcctatcctaattcccccttccaagttgccaccgggtatcagttccctgtctacaattaccaggcctttcctgcatatcccaactcacctgtgcaggtaacgaccggctaccagctcccagtctataattatcaagcattcccagcttaccctaattctgctgtccaggttaccacaggttatcagtttcatgtctacaactaccagatgccaccccagtgtcctgtgggtgaacagcggagaaatctgtggaccgaagcttataagtggtggtacctggtgtgcttgatccagcgaagagactag

SEQ ID NO: 220532 - DNA, 1173 bp, synthetic construct
  misc_feature 1..1173: note = Description of Artificial Sequence: Synthetic coding sequence
  source 1..1173: mol_type = other DNA
atgtctgcggctaacccagaaactccaaactcaacaatctcccgagaggccagcacccaatcgtcctcggctgctgcttcacagggctgggttctccctgaaggcaaaatagtgccaaacacagtgtttgtgggcggtatagatgctcgaatggatgagacagagattgggtcatgtttcggccgttatggaagcgtgaaagaggtcaaaataattacaaaccgcaccggcgtgtctaaaggatatggatttgtgtctttcgtgaacgatgtggacgtacagaaaattgtgggtagccaaattcatttccacgggaaaaagctgaagctaggccctgcaatacgaaagcagaagttgtgtgctaggcacgtgcagcctaggccccttgtggtcaatccaccccctccgccacagttccagaatgtttggcgaaatccaaacaccgagacttatttacagccccaaatcacccccaatcccgtcacacaacacgtacaagcctattcagcttaccctcactcccccggtcaagtgattacgggatgccagcttctcgtttataattatcaggaataccctacctaccccgacagtgcattccaggtgaccaccgggtatcagctgccagtctacaactaccagcccttcccagcctaccccagaagccctttccaagtcacagctgggtatcaactgcccgtttacaactaccaggctttcccagcataccccaacagtccttttcaggtcgctaccggttaccagtttccagtgtataattatcagccattccccgcatacccttcctcccctttccaggtgaccgcgggttaccagctgcctgtgtacaactatcaggcctttcccgcttaccccaattccccttttcaggtcgctactggctaccagttcccagtgtataattatcaggcttttccggcatatcccaattctccagttcaggtcacgacgggctaccagctccccgtttacaattatcaggcctttcccgcatacccaaatagtgcagttcaagtaacgaccggatatcaattccacgtgtacaactaccagatgcctcctcagtgcccggtcggcgaacagcgacgcaacctctggacggaagcctacaaatggtggtatctcgtctgcctgattcaacgcagagattag

SEQ ID NO: 220533 - DNA, 1746 bp, synthetic construct
  misc_feature 1..1746: note = Description of Artificial Sequence: Synthetic coding sequence
  source 1..1746: mol_type = other DNA
atgatggacgagacagagatcgggtcctgcttcggacggtatggctctgtcaaagaggtgaagattattaccaatcgcactggagtgagcaaaggttatggattcgttagctttgtgaatgacgtcgatgtccagaaaatcgtaggttcccagatacactttcacgggaagaaactaaagctcggacctgccattcgcaagcagaagctttgcgctagacatgtgcagcccaggccactggtggtaaaccctccccctccaccccagtttcaaaacgtttggcggaatcctaatacagagacttatctccagccacagatcacacctaatcccgtgacccagcacgtccaggcttacagcgcctacccccactccccagggcaggtcatcaccgggtgccaactgctcgtttataactatcaggagtatcctacctaccccgattcagcgtttcaagttacaaccgggtaccaactgcccgtctacaattaccaacctttccctgcttaccctagatcccctttccaagttacagccggatatcaactgccagtatataactaccaggcattcccagcttacccaaactccccgtttcaggtggcgactggctaccagtttcccgtgtacaattaccagccgtttccggcatacccatccagtccctttcaggttaccgcgggatatcaactgcctgtgtataattaccaggcattccctgcttacccgaatagtccatttcaagtagcgaccgggtaccagttccctgtttacaactatcaggcattcccagcataccccaactccccattccaagttgccaccgggtaccagtttcctgtttataactatcaggcatttccagcctaccccaactccccagtgcaagtgacgactggttaccagctgccggtctacaattatcagcccttccctgcctatccacggtcaccattccaggtcacagccggataccagctacctgtctataattaccaggcctttcccgcatatcctaactctcccttccaggtggctaccggttatcaattccccgtgtataattaccaggcatttccggcatatccgaatagtcccgtgcaggtaacaactggataccagctccctgtctataactatcaggcctttcccgcttatccgagtagcccatttcaagtcacaaccggatatcagctgccggtgtacaattaccaagcttttccagcctacccctcttctccctttcaggttaccaccgggtatcagctgcctgtgtataactatcaggcctttcccgcttatccctctagccctttccaggtgacgacgggctatcagctccccgtgtataattaccaggcctttccagcatatcccagctccccattccaagtgacaactggctatcaattgcctgtatacaattaccaggcttttccagcctatccgtctagtccattccaggtgactacaggttatcagctacctgtgtataactatcaggcgtttcctgcatacccctcaagtcctttccaggttaccactggatatcagcttccggtctacaactatcaggctttcccagcctatccgaatagcgcagtgcaagtgaccacaggttatcagtttcacgtctataattatcagatgcccccacagtgcccagtcggtgagcaacggagaaatctgtggactgaggcatataagtggtggtatctcgtgtgtttgattcagcgaagagactag

SEQ ID NO: 220534 - DNA, 1014 bp, synthetic construct
  misc_feature 1..1014: note = Description of Artificial Sequence: Synthetic coding sequence
  source 1..1014: mol_type = other DNA
atgtccgcagcgaaccccgagacacctaacagtactataagcagggaggcatccacccagtcctcaagcgccgcagcctctcaggggtgggtcctgcctgagggcaaaattgttcccaacaccgtcttcgtcggaggcatcgatgccagaatggatgagaccgaaatcgggtcctgctttggcagatacggaagcgtgaaggaggtcaagatcataaccaataggacaggggtttcaaaaggatacggattcgtgtcgtttgttaacgacgtggatgtgcagaaaatcgtgggctcccagattcacttccacggtaagaagttgaagctgggaccggctattcgcaagcagaagctctgcgccagacatgtccaaccaagacctttggtggtgaatccaccaccacctccacagttccagaacgtttggcgtaacccgaatacagaaacttacctgcaacctcagattacccccaaccccgtgacgcagcacgttcaggcctacagtgcttatcctcacagccccggtcaggtgatcaccgggtgtcagctgttggtctacaactatcaggagtaccctacatatcctgacagtgcgttccaggtgacgaccggttaccagctaccagtgtataattatcaaccattccctgcgtaccccagatctcccttccaagtgacagccggttatcagctgccagtctataactaccaagcgtttccagcatatcctaacagtccctttcaggtagccactgggtatcaattcccagtctataactaccaggctttccccgcatacccaaactccccagtgcaagttacaaccgggtatcagctacccgtctataattatcaggcttttccagcatacccgaattcgcctttccaggtagcgactggctaccagttccctgtgtacaactaccaggcatttcctgcctatccaaacagcccagtgcaagttaccaccggctaccagctgcccgtctacaattatcagatgccgccatag

SEQ ID NO: 220535 - DNA, 1101 bp, synthetic construct
  misc_feature 1..1101: note = Description of Artificial Sequence: Synthetic coding sequence
  source 1..1101: mol_type = other DNA
atgagtgccgctaatccagaaacaccgaactccacaatctcaagggaagcgtccactcagagctctagcgccgcagcttctcagggatgggtcctgcctgaggggaagatcgtgcccaatacagtattcgtcggaggtattgatgcgaggatggatgaaactgaaataggctcatgctttggtagatacggctccgtcaaggaagtcaagattatcactaaccgaaccggcgtgtcaaagggatatggctttgtgtcttttgtgaacgatgtcgacgtgcagaagattgtgggtagtcagattcactttcacggcaagaagctcaaacttggacccgctatccggaagcagaagttatgcgctaggcacgttcagccgcgacccctggttgtgaatcctccccctccaccacagtttcaaaacgtatggcgaaatccaaatacagaaacgtacctccagccccagattacaccaaaccccgtgacacagcacgtacaggcctatagcgcctacccacatagcccaggccaggtgattaccggatgccagctcctggtttataattatcaggagtacccaacatatcctgattctgcattccaggtgactacgggatatcaattgcccgtctataactatcagccttttcccgcatatccgagaagcccctttcaggtgaccgcaggttatcagctacccgtgtataattatcaagccttcccggcttatcccaactcccctgtgcaggtgaccacggggtaccaattgcctgtttataattaccaggcatttcctgcttaccctaactcccccgtgcaggtgacaaccggctatcagctgccggtctacaactaccaagctttccccgcttaccctaactctcctgtgcaagtgaccacgggctatcagctcccagtgtataattatcaggcatttccagcctacccgaactccgcagttcaggtaaccacaggttatcagtttcacgtttacaactatcagatgccaccccaatgtccggtgggggagcaaaggcggaacctgtggactgaggcatataagtggtggtacctggtgtgcctgatacagcggcgtgactag

SEQ ID NO: 220536 - DNA, 1317 bp, synthetic construct
  misc_feature 1..1317: note = Description of Artificial Sequence: Synthetic coding sequence
  source 1..1317: mol_type = other DNA
atgtcagctgcaaatcctgaaaccccaaacagcacaatatcgagagaggctagcactcaaagttcttctgccgctgcttctcagggctgggtgctgccagaagggaagatcgtccctaacacagtctttgtgggcggtatagacgccagaatggatgaaaccgaaatcggcagctgtttcggaagatatggatcagtcaaagaagtaaagatcatcaccaaccgcactggcgtgagtaaagggtacggatttgtctccttcgtcaatgacgtcgatgtgcagaagatagttggcagccaaatccatttccacggaaagaaactgaagctgggtcctgctattcgcaaacagaaactgtgcgctaggcacgtccagccgaggccactggtggttaatcctcccccacctccacagtttcagaacgtttggcggaaccccaacaccgaaacctatctgcagccccaaatcacccctaatcctgtgacacagcatgtgcaagcctactcagcttacccacattcgccgggacaggtcataacggggtgtcagctgctggtgtataattaccaggaataccctacctaccccgattccgccttccaggttacgaccggttaccagctgccagtgtacaactaccaaccatttccggcatacccaagatctccctttcaggttacagccggataccagctgcccgtgtataactatcaggctttccctgcctatccaaacagcccctttcaggtcgctaccggatatcagtttcctgtgtacaattatcaggccttcccagcatatccaaatagcccggtgcaggtgaccaccgggtaccaactgccagtctacaactaccaggcctttcctgcataccctaatagcccgtttcaagttgccacgggttatcagtttcctgtatataattatcaggctttccccgcataccccaattccccagtgcaagtgaccacaggataccagctgcctgtgtataactatcaagcttttccagcttacccaaatagtcccttccaggtggccacaggatatcagtttcctgtgtacaattaccaggcctttccagcctaccccaattcccccgtgcaggtcacaacaggctatcagttgcccgtctacaattaccaggccttccccgcttatcctaactctgccgtgcaggtgactactggctatcagtttcatgtttataactaccagatgcctccacagtgtcccgttggggaacaaaggcgcaatctgtggactgaggcttataagtggtggtacctggtatgtctcatccaacgcagggattag

SEQ ID NO: 220537 - DNA, 1086 bp, synthetic construct
  misc_feature 1..1086: note = Description of Artificial Sequence: Synthetic coding sequence
  source 1..1086: mol_type = other DNA
atgtcggctgcaaacccagagacgcctaatagcaccataagccgggaagccagcacccagagcagctccgctgccgcatcacagggttgggtactgcctgaaggcaaaattgtccccaatacggtgtttgttggcggtatcgatgcacggatggacgagacggagatagggagttgcttcggtagatatggctccgtgaaggaagtcaaaatcattaccaataggacaggagtctccaagggatatggcttcgtttcattcgtcaacgacgtggacgtccagaaaattgtgggcagtcagattcattttcatggcaaaaaattgaaattgggaccagctattcgaaaacagaagctctgcgccagacacgtgcagccccgaccccttgtggtgaacccacctcccccaccacagttccagaacgtttggcggaatcctaacacagaaacgtatctccagcctcaaatcactcccaacccggtcacccagcatgtccaggcctattctgcttatccacatagtcccggacaggtgatcacgggctgccagctgttagtttataattaccaggagtatccaacttatccagattccgctttccaagtgacaaccgggtatcagctgccagtgtacaattaccagccattccccgcttaccccagaagcccattccaagttacggcaggataccaacttcccgtttacaactaccaagctttccctgcatacccgaattccccgttccaggtggcaacagggtaccagttccccgtttataactatcaagcatttcctgcttaccccaacagtcccgtacaagtgaccacgggataccagctgccggtctacaactatcaagcattccctgcgtatccaaacagcccattccaggttgccaccggctaccagttcccagtatataattatcaggccttccctgcctaccccaattcaccggtccaagtgacaacaggataccaactgcccgtgtacaattaccaagccttccccgcttacccaaattcccccgtgcaggtcacaaccgggtatcaactgcctgtgtacaactaccagatgcccccttag

SEQ ID NO: 220538 - DNA, 1173 bp, synthetic construct
  misc_feature 1..1173: note = Description of Artificial Sequence: Synthetic coding sequence
  source 1..1173: mol_type = other DNA
atgtcggctgccaaccccgagacaccaaatagtaccatatccagagaagccagcacccagtccagttccgccgcagcttctcagggttgggtgctgccagaaggcaagattgtccccaacacggttttcgtcgggggaatagacgctcgtatggacgagacagagattggttcatgcttcggaaggtatggttctgttaaggaagtgaagatcattactaatcgcactggagtcagcaagggttatggcttcgtctccttcgtgaatgacgtagatgttcagaagattgtgggctctcagatacacttccacgggaagaaactgaagctcggtccagctatcaggaagcagaagctgtgcgcacggcacgtgcagcctagacctttagtggtcaacccccctccaccaccgcagtttcaaaatgtgtggagaaatcccaataccgagacgtatctacaaccccagattacccccaatcccgtcacccagcacgtccaggcgtactcagcctacccccattctccgggacaggttattacaggctgccagctgctggtctacaactaccaggaatatccaacatatcccgactcggcgtttcaggtgacaaccggatatcagctgcccgtatataactaccaaccatttccggcttacccgaggagtccgttccaggtaaccgccggatatcaactccctgtatacaattaccaagcctttcctgcctatcccaacagccccttccaagtggctaccggctatcagttccctgtgtacaactaccaggcatttccggcttacccaaacagtccagtacaggtgaccactggatatcagctgcccgtatataactaccaggccttcccggcttaccccaacagccctttccaggtcgccaccggataccagtttcctgtgtacaactaccaggcgtttcccgcatacccaaattctccggttcaggtgacgaccggttatcagctcccagtgtataactaccaggccttccctgcatacccaaacagcgctgtgcaagtgacaaccggttaccagttccatgtatataactaccagatgccaccacagtgcccagtaggtgagcagagacgcaacctgtggactgaggcgtataagtggtggtacctagtttgtttgattcaacgacgcgattag

SEQ ID NO: 220539 - DNA, 948 bp, synthetic construct
  misc_feature 1..948: note = Description of Artificial Sequence: Synthetic coding sequence
  source 1..948: mol_type = other DNA
atggcagcaccctcctgtgggggtgatagaaaggccaggctgacaccttccctcccccacgagtcgactgctaatcccgagacacccaatagcacgatttctagggaggcaagcactcagtcttcctcagctgccacaagtcagggttacattctgcccgaggggaaaattatgccgaatactgttttcgttggtggcattgacgtgcgaatggacgaaacagagatccgttcttttttcgcccgatacggatcagtcaaggaggtgaaaatcatcaccgatagaacaggagtgagtaaaggctacggatttgtgtctttcttcaatgatgttgatgtccagaagattgtagagagccaaatcaactttcatggcaaaaaactaaagctgggtcccgctattcgcaagcagaacctgtgcgcctatcatgtccaaccgaggccattagtgttcaatcaccccccacctccccagttccagaacgtgtggacgaatcctaacactgagacctacatgcagcccactacaaccatgaatcccattactcagtatgttcaggcataccctacttatcctaactccccagttcaggtcatcaccgggtatcagctaccagtgtataactaccagatgccgccacaatggcccgtgggagaacagaggtcttatgtcgtgcctccagcgtacagcgctgtcaactatcattgcaatgaagtggacccgggtgctgaagtggtgcccaacgagtgctcagtgcacgaggctacccctccatccgggaacggaccacagaaaaagtcagttgataggtctattcagaccgtcgtctcctgcttgtttaaccccgaaaacaggctgcggaactctgtcgtgactcaggatgattattttaaagacaagcgcgtgcaccacttccgaagaagccgagctatgctgaaatccgtgtag

SEQ ID NO: 220540 - DNA, 888 bp, synthetic construct
  misc_feature 1..888: note = Description of Artificial Sequence: Synthetic coding sequence
  source 1..888: mol_type = other DNA
atgagtacagcaaatccagagactcctaactctactatctcccgagaggcctcaacccagagcagcagcgccgcaacgtctcaaggttacattctgccagaaggtaaaatcatgcctaatacagtgtttgtcgggggaattgacgttagaatggacgagacggaaattaggagcttttttgcacgctacggctctgttaaggaagtgaaaatcattaccgatcgtactggagtctctaagggctatggttttgtctcttttttcaacgatgtggatgtgcagaaaattgtagaatcacagattaattttcatggtaagaaacttaaattaggaccggcaatcagaaaacagaacttatgtgcctatcacgtgcagccccgaccccttgttttcaaccacccaccgccaccacagttccaaaatgtttggaccaaccctaacaccgaaacttacatgcagcccaccaccaccatgaatccaattactcaatacgttcaggcttatcccacgtaccctaatagtccagtccaggtgatcacaggttaccagctgcctgtgtataattatcagatgccgccacagtggcccgtgggagagcagcgttcctacgtcgtgccgcctgcctatagtgctgtcaattaccattgtaatgaggtagatcccggagcggaagtagtacctaatgaatgcagtgtccatgaagcgaccccgcctagcggtaatggtccccagaagaaaagcgtggaccgcagcattcagacagttgttagctgcttgtttaatccggaaaacagacttaggaattcagtggtaacccaagatgattactttaaggataaaagagtccaccactttcgccgttcccgcgcaatgttgaagtccgtgtag

SEQ ID NO: 220541 - DNA, 2286 bp, synthetic construct
  misc_feature 1..2286: note = Description of Artificial Sequence: Synthetic coding sequence
  source 1..2286: mol_type = other DNA
atgaattggcgctttgtggagctcttatatttcctgttcatttggggacgtatctctgtccagccaagtcaccaggaacctgctggaactgaccagcacgtttccaaagagttcgactggttaatctctgatagaggcccttttcaccacagtcggagctacctgtcattcgttgagaggcacagacagggttttaccacacgctataaaatttatagagagttcgcccgttggaaggtgagaaatacggccatcgagagaagggacctggtgcgccacccagtcccgctgatgcccgaatttcagcgaagcatccgcttattggggagacgcccaacaacccagcagttcatcgacaccattatcaaaaaatatggaacccatctgctgatctctgccaccctggggggagaagaagccttaaccatgtatatggataaatctcgactcgataggaagagtggaaacgcaacacagtctgtggaggctttacatcaactcgcctccagttactttgtggacagagatgggaccatgaggagattacacgaaattcaaatctcaactggtgccattaaggtgacagagacgcggacaggcccactggggtgcaactcctatgacaacttagacagtgtgagctcagtactcctgcagtccacggaaagcaagctgcacctccagggcctacagatcatctttcctcagtatctgcaagaaaagttcgtgcaatccgcactgtcctacattatgtgtaacggggagggggagtatttgtgtcagaattctcaatgtcgttgccagtgcgcagaggagttcccccaatgcaactgccctatcaccgacatccaaattatggaatatacgttggccaatatggcaaaaagctgggctgaagcttacaaggacctggaaaatagcgatgagtttaaatcgtttatgaaacgactcccctctaatcatttcctgacaataggatccatccatcagcactggggaaatgactgggatctgcagaaccgctacaaactcctgcaaagcgcaactgaagcacaacgacagaaaatacagcgcaccgccaggaagctctttggcctcagcgtacgatgccgccacaatcccaatcaccagttgccaagagagaggacaatccagcaatggctcgcaagggtacagtcacttctgtactgcaacgagaacggattctggggcactttcttggagagccagcgatcctgtgtgtgccacggcagtacaacactgtgtcagcgtcccattccttgcgtaattgggggaaacaattcatgcgctatgtgctctttggcgaatatctctctgtgtggttcctgcaacaaaggatacaagctctacaggggaagatgtgaaccacagaacgtggatagcgagaggtcggagcagtttatcagttttgagactgatctggactttcaagacctcgaacttaagtacctgctacaaaagatggactctcggttgtacgtgcatacaacttttattagcaatgaaattagactggacacctttttcgacccacgctggcgcaaacgtatgtccctgacccttaagtctaataagaacagaatggacttcatccacatggtcatcggtatgtcaatgagaatctgccagatgaggaattccagcctggatccaatgtttttcgtgtacgtcaacccttttagtggtagccatagcgaaggttggaacatgccctttggggaattcggctaccctcggtgggaaaagattaggctccagaattcccagtgttacaactggactctgctattgggcaaccgctggaaaacctttttcgaaaccgtccacatctacctgcggagccgcacccgcctgccaacgttacttcggaatgaaacaggacaaggacccgtggatctgtctgatcctagtaagaggcaattctacattaagattagcgatgttcaggtcttcggatatagtctgagattcaacgccgacttgcttcgcagcgcggttcagcaagtcaaccagtcttacactcagggtggtcagttttatagtagctcctctgtgatgcttttactgctggacatccgggatcgaattaaccggttagccccaccagtggcacctggaaagcctcagctggaccttttctcctgcatgttgaaacataggctgaaactgaccaactccgagataattagggtaaaccatgcactcgatctgtataacaccgagatcctaaagcagtcagaccaaatgacagcaaagctatgctag

SEQ ID NO: 220542 - DNA, 963 bp, synthetic construct
  misc_feature 1..963: note = Description of Artificial Sequence: Synthetic coding sequence
  source 1..963: mol_type = other DNA
atgaattggaggtttgtcgagctactgtacttcctatttatttggggtcgcatcagtgtgcagccctcccatcaggagccagccggtaccgaccagcacgtcagtaaggaattcgactggcttatctccgataggggccctttccaccacagtcgatcttacctcagtttcgtggaacgccaccgccagggatttaccactcgatacaagatctatagggagttcgcaaggtggaaggtgaggaatacagctatcgaacggcgagacttggtaaggcatcccgtccccctgatgccagagttccagcgctcaattaggcttctgggcaggagaccaacgacacagcaatttatcgataccataataaaaaagtatggcacacatctactgatatctgccacactgggtggcgaggaagccctgactatgtacatggataaaagtaggctggaccgaaagagtggtaacgccacccagtccgtcgaagcactgcaccagctcgcgtcttcctactttgtcgatagagacggcactatgcgcaggcttcacgagatacagatatccacaggggctatcaaggtaacagaaacgcggacaggcccactcggctgcaacagttacgacaaccttgacagcgttagctccgtgctgttgcaaagcactgagtctaagctgcacctgcaaggcctccaaattattttcccacaatatcttcaagagaagttcgtgcagagcgccctgagttatatcatgtgcaacggcgagggtgagtacctttgccaaaactcacagtgtaggtgtcagtgcgccgaagagtttcctcagtgtaactgtccaattactgatatccagattatggagtacactctggccaacatggcaaaatcctgggcagaggcctataaagacctcgagaactccggtagagagtcccattcagttcctctccacgagtggccatag

SEQ ID NO: 220543 - DNA, 2286 bp, synthetic construct
  misc_feature 1..2286: note = Description of Artificial Sequence: Synthetic coding sequence
  source 1..2286: mol_type = other DNA
atgaattggagattcgtggagctgctttatttcctgttcatatggggaagaatcagtgtccagccttcccaccaagaacctgccggaacagatcaacatgtgtctaaagagtttgattggctcatttccgaccgcggacccttccatcactctcggagctatctctccttcgtggaacgccatagacagggctttaccactcggtataagatctatagggaattcgccagatggaaagtacgcaatacagcaatagagaggcgggatttggtacggcaccctgtccctctgatgcctgaattccagagatcaattcggttattgggcagacgacccaccacccagcagttcatcgacaccattatcaaaaagtacggaacgcacctgctgattagcgctacccttggcggtgaagaggctctgacgatgtatatggacaaaagccggctagataggaaatctgggaatgccactcagagcgtggaagctctgcaccagctggcttcgtcttatttcgtagaccgggacggtaccatgaggcggttacatgagatccagatctcgacgggagccataaaggttactgagaccagaacaggaccacttggctgtaactcctatgataatctcgactccgtgtcctccgtgttgctccagtcaaccgaaagcaaactccacctgcaggggttgcagattatttttccccaatatttgcaggagaagttcgttcaaagcgccttatcctacattatgtgcaacggcgagggagaatacctctgccaaaactcccagtgccggtgccagtgtgcggaagaattccctcaatgcaactgccccattaccgatattcagatcatggagtacactctcgccaacatggctaaatcttgggccgaagcttacaaggatctggagaatagcgacgaattcaagagctttatgaagcgcttgccaagcaatcatttcttaactatcggctcaatccaccagcattggggcaatgattgggatctccagaatcggtataagctgttacagagcgccactgaggcccagcgccaaaagattcagcgaaccgccaggaagctcttcggactatcagtccggtgccgccataacccaaatcaccagctccccagggagcggacaatccagcagtggctcgcccgagttcagagcctgctttactgcaatgagaacgggttctggggcaccttccttgaatctcagcgaagctgtgtgtgtcatggatctaccacgctgtgccagagaccgataccatgtgtgatcggcggtaacaacagttgtgcaatgtgttccctggccaatatctccctctgtggatcctgtaataaagggtacaaactgtatcggggtcgttgtgaaccgcagaacgtggacagtgaaaggagtgaacagtttatatctttcgagaccgatttggattttcaggatcttgaactgaagtatctccttcaaaaaatggattcccgactgtatgtccatactactttcattagtaacgaaatccgacttgacaccttttttgatcccagatggcgtaaaaggatgagtctgaccctgaaatctaacaaaaaccgaatggatttcatccatatggttattggcatgagtatgcggatctgccagatgcgtaactcttccctcgacccaatgttcttcgtgtatgtgaaccctttcagcggcagtcattccgagggttggaatatgccattcggtgagtttggctacccccgatgggagaaaatccgccttcagaatagccaatgctacaactggactctgcttctgggcaataggtggaagacattttttgagaccgtccacatttacttaagaagccgcacccgcttaccaaccctcttgcgcaatgaaacaggccagggccctgttgacctgtctgatcccagcaaaagacagttctatataaagatctccgacgtacaagtgttcggatatagtctgcggttcaacgccgacttgttgagatcagccgtgcaacaagttaatcagtcctatactcagggtggacagttctatagcagcagcagcgtgatgcttttactcctggacatccgtgaccggatcaataggctggcccctcctgtggccccaggtaagccacagctggatctgttctcttgtatgctgaaacatcgcctaaaactgaccaattctgagattatcagggtgaaccacgcgcttgatctgtacaacacagaaattctgaagcaaagcgaccaaatgacagccaagctttgctag

SEQ ID NO: 220544 - DNA, 1404 bp, synthetic construct
  misc_feature 1..1404: note = Description of Artificial Sequence: Synthetic coding sequence
  source 1..1404: mol_type = other DNA
atgaaacgtatcaaagtcccagattacaaagacagaagtgtgtttggagttccccttacggtcaacgtgcagcggactggacagcctttgccccaatccattcaacaagcaatgagataccttcgaaaccactgcctggaccaggtcggcctgttccgcaagagcggggtgaaatcacggatacaggctttgaggcagatgaacgagggcgctatagactgcgtgaactatgagggccaatctgcctatgatgtggccgatatgctgaagcaatactttagggacctcccagaacctttgatgaccaataaactctcagaaacatttctgcagatctatcagtatgtcccgaaggaccaacgcctacaagctatcaaagccgctataatgcttctccccgacgagaacagggaagtgctccagaccctcctatacttcctgtcagacgttactgccgctgtcaaagagaatcaaatgacccctactaacttggcggtgtgcctggcaccttcactattccatttgaacaccttgaaaagagagaactcaagcccacgggtgatgcaaaggaagcaatccctggggaagccagatcagaaggatcttaatgaaaacttggcggcaacccaaggcctggcacatatgatagcagagtgtaaaaagctgttccaggttccagaggaaatgtccagatgcaggaattcctacacagaacaggaacttaaacctttaactctggaagctttgggtcacctgggcaatgatgatagtgctgattaccaacactttctacaggactgcgttgacggcctgtttaaggaagtgaaagagaaattcaaagggtgggtgtcatacagcacctctgaacaggccgaattgtcgtataagaaggtgtccgaggggccacccctgagattgtggagatctgtcatcgaagtacccgctgtgcccgaagagattctgaagaggctgctcaaggagcaacatctgtgggacgtggatttgctggatagtaaggtgatcgagattctcgattctcagaccgaaatttaccagtacgtgcagaacagcatggcaccacaccctgccagggactatgtggtattaagaacctggcgaactaacttaccaaagggagcttgtgctttgctgctgacctccgtggatcacgaccgtgctcctgtcgtgggcgtgagggtgaacgtgcttctgtcgcgctaccttattgaaccatgcggccctggcaagagcaaattaacttacatgtgtcgggttgatctaaggggacatatgcctgaatggtacaccaagagttttggacacctgtgcgccgcagaagtggtgaaaatacgggacagcttcagtaaccagaatacggagacaaaagataccaagagccggtag

SEQ ID NO: 220545 - DNA, 3378 bp, synthetic construct
  misc_feature 1..3378: note = Description of Artificial Sequence: Synthetic coding sequence
  source 1..3378: mol_type = other DNA
atgggggacccaaaggcgcatgtgatggcccgtcctctgagagcacctctccgcagaagttttagcgaccatatccgggatagtaccgcacgggcactcgacgtgatttggaaaaatacacgggacaggagactggccgagatagaggcaaaggaggcgtgtgactggctccgagccaccggatttccacaatacgcccagctgtacgaagattttctgttccccatcgacatttccctggtcaaaagagagcacgactttctggatcgcgacgccattgaggcactgtgccgcagattaaatacccttaataagtgtgccgtgatgaagctcgagatttctccacataggaaacgctcagatgattccgatgaggatgagccttgtgccatctccggtaagtggacttttcagcgggattcgaagcgttggtctcgactggaggaatttgacgtgttctcacccaagcaggacctagtccccggtagtcccgatgactcccacccaaaagatggacccagtccaggtggtactctaatggatctgtcagagcgtcaggaagtttccagcgtccgttctctaagttctactgggtcccttcctagccacgcccctcccagcgaagatgccgctactcccaggactaactcagtgatcagcgtctgcagctccagtaacctggccggaaacgatgatagctttggctctctgccctcgcccaaggaactgtcctcattctcctttagcatgaaagggcacgaaaagaccgccaagtctaagacccgttcacttctaaaacggatggaaagtctgaaactcaagagcagccaccattcaaaacataaggcacctagtaagcttggcctcatcatcagtgggccaatcctccaggaaggaatggatgaagaaaagctcaagcagctcaactgcgtggagattagcgcacttaatgggaacagaatcaatgtacctatggttaggaaacgcagtgtgtctaattccacgcagaccagcagcagctcctctcagtccgagacttcctccgccgttagcacaccatcacctgtcacgcgcactcgctctcttagcgcatgtaacaagagggtcggtatgtatctggagggattcgatccatttaatcagtctacctttaacaatgtggtcgaacagaacttcaagaacagagagtcttaccccgaggacaccgtcttttacatacctgaggatcacaaacccggtacttttcctaaagccttaacaaacggatcctttagccctagcggtaataacggcagtgtcaactggagaacagggagctttcatggtcctggtcacataagcttgcgccgtgaaaatagttctgacagcccaaaagaattaaaacggcgaaattccagtagctccatgagctcacgtctgtcgatttatgataacgtgcccggaagcatcttgtattcgagcagcggagacctcgctgatcttgagaatgaagatatctttcctgagctggacgacattctgtaccacgtgaagggaatgcaacgtatcgttaatcaatggagcgagaaattctcagacgaaggagacagcgactccgctttagactcagtcagtccatgccctagctcccctaagcagatccacctggacgtcgacaacgatagaactacacctagcgatttggactcaactggaaatagcctgaacgagccggaggaaccatccgagattccggagcgcagagactctggggtaggcgcatctctcactcggtcgaatcggcaccggctccggtggcattctttccagagttctcatagacctagtctgaatagtgtttcactccaaataaactgccagagcgtggctcaaatgaatctcttgcagaagtactccctattgaaactgacggctctgttagagaagtatacgccttctaacaaacacggcttcagttgggccgtgcccaagttcatgaagcggattaaggtcccggactacaaggataggtctgtgtttggggtcccactaacagtaaacgtccagcggacaggccaacctctgccgcaatccattcaacaggcgatgaggtacctgcgaaatcactgcttggaccaagtgggactgtttcggaagagtggagtcaagtcgaggatccaggctcttcgacaaatgaatgaaggcgctatcgactgcgtgaattatgaggggcagagtgcatatgacgtcgcggacatgctgaaacaatattttagggatctgcccgagccactgatgacaaacaagctttccgaaacttttctccaaatctaccaatatgtgccaaaggaccaacgtcttcaggccattaaggctgccatcatgctcctccctgacgagaacagagaagtcctgcagactctgttgtacttcttgtcagatgtgaccgctgcggtgaaagagaatcaaatgactccgactaacctagccgtgtgtttggccccttctctgttccatctgaatactctgaagagagagaatagctctcccagggttatgcagaggaagcagtcacttgggaagcccgaccaaaaggatctgaacgaaaacctggcagccacccaagggctggcacatatgatagcagagtgcaagaaactctttcaggtgcctgaggaaatgtcacgatgcagaaactcctataccgaacaggagctgaaacctctgactctggaggcccttggccacctcggtaacgacgactcggcagactaccaacatttcttacaggactgcgtcgatggactgttcaaagaggtgaaggaaaaatttaagggctgggtctcttattctaccagcgaacaagctgaactgagctacaaaaaagtctctgaagggccaccactgaggctgtggcggtctgtgattgaggtgccagcagtccctgaagaaattctaaaacggttgctgaaagaacagcatctttgggatgttgacctccttgactctaaggtaatcgagatcctggacagccaaactgaaatctatcagtatgttcagaattccatggcccctcatccagcgcgagactatgtggtgctcagaacctggcggacaaacctgcccaaaggcgcttgcgccttacttcttacatccgttgatcatgatcgcgcaccagtggtgggagtacgcgtgaatgtcctgctgagccgatacttgatcgaaccttgtggtcctggcaaatcaaaattaacttacatgtgtagggtggaccttcggggacatatgccagagtggtacactaagtcattcggacacctatgcgcagccgaggtcgtcaagatacgtgattcctttagcaatcaaaatacggagaccaaagatactaagtctcgatag

SEQ ID NO: 220546 - DNA, 3054 bp, synthetic construct
  misc_feature 1..3054: note = Description of Artificial Sequence: Synthetic coding sequence
  source 1..3054: mol_type = other DNA
atgaaattagaaataagtcctcatagaaaaagaagcgatgactccgacgaggatgaaccgtgtgccataagcgggaaatggacctttcagcgggatagtaaacgctggtctcgcttggaggaatttgatgtgtttagcccaaagcaggacctggtgccgggtagtcccgatgatagccaccctaaggatggcccatcccccggagggaccttgatggacttgagcgagcggcaggaggtatcctcagtgcgttctttgagctctacaggatccctcccttctcacgccccaccatctgaggacgcggcaacccccaggactaactctgtgatctctgtttgcagcagcagtaatcttgctggcaatgatgacagtttcggttcactcccatccccaaaggagttgagctcattctctttttcgatgaagggtcatgagaaaaccgctaaatcaaagaccaggtctctgttgaagaggatggagtctctcaagctcaaatcctctcaccacagcaaacataaggcaccgtcaaagctgggcctgatcattagtggacccattctgcaggagggaatggacgaggagaaactgaagcagctcaactgcgtagagatatccgcactgaatggtaataggattaatgtgcctatggtcaggaaaaggtcagtgtccaactctacacagacatctagttcgagttcacaaagcgaaacaagtagtgctgtgtccaccccctctccggtgacccggacgcggtcgctgagcgcctgcaacaagcgcgtgggaatgtatctagagggcttcgaccctttcaaccagagtacttttaataatgtggtggaacagaactttaaaaaccgtgagtcttacccggaggacactgtgttttacatccctgaagatcacaagccaggaactttcccgaaagctcttactaacggaagcttcagcccgagcggcaataacgggagtgttaattggaggaccggatcgttccacggacctggacatatcagtttgcggagagaaaatagctcagactcccctaaggagctgaagcgcagaaactcctccagttctatgtctagccggttatctatctatgacaatgtgcctggatctatcctgtattcgtcatccggcgacctggccgatctggagaacgaagatatcttccccgagcttgacgatatcctgtaccatgtcaagggcatgcagcgtatcgttaaccagtggtcagaaaaattttccgacgaaggagatagcgactctgcactggacagcgtgagtccttgtccgtcctctcctaaacagattcatctggacgtcgataacgaccggacaacaccctctgaccttgattcaaccggaaactcattgaatgaaccagaagagccatcagaaatcccggagcgcagggattcgggggtgggagcttccttaactcgcagcaaccggcatcgcctccgctggcatagcttccagagttcacatagaccttctcttaacagtgtgtccctgcagatcaactgccaaagcgtcgcacaaatgaatctgctgcagaaatatagtctgttgaagctcacagccctgctggagaagtacacacccagtaataaacacggcttttcatgggctgtacccaaatttatgaaacggattaaggtgccggactacaaagaccgttcagtatttggtgttcccctgacggtcaacgtgcagcggacaggacagcctctgccccaatctattcagcaagccatgcgttacctgcgcaatcactgtcttgaccaggtgggcttgtttagaaagtccggcgtgaaaagtcgaattcaggccctgcgtcaaatgaacgaaggagcgatagattgtgttaactatgagggccagtcagcgtatgatgtagccgatatgctcaagcagtacttcagagatctgcccgagcctttaatgacaaacaagctatccgaaacgtttctgcagatctatcagtacgttccaaaagaccagcgactgcaggcgatcaaagcggcaatcatgctcctgccagacgaaaaccgggaggttttgcagacactcctttatttcctctccgacgtcaccgctgcggttaaggaaaaccagatgacaccaactaacctggccgtgtgccttgccccatccctgttccacttgaacactctgaaaagagagaattcctctccccgagtaatgcaaagaaaacagtcccttggaaagccggaccagaaggatctcaacgaaaacttggccgctacgcaaggtctcgctcatatgatcgctgagtgtaagaaactttttcaggttcctgaggagatgagccgatgtagaaacagctatacagagcaagaactgaagcctctcactctcgaggccttaggccatctcggtaatgacgacagtgctgactaccagcactttttgcaggactgcgtagacgggttgtttaaggaagtaaaggagaagtttaagggttgggtgagttactccacatctgagcaggccgaactgagttacaaaaaagtttccgaaggaccaccactgcggctgtggcgcagcgtgattgaagtgcctgctgtcccagaggaaattctgaaacgcctgctgaaggagcagcacctgtgggatgtagacctgctggattccaaagttatcgagattctggattctcagacggagatatatcaatacgtccagaactcaatggcgcctcatcccgctcgggattacgtcgtgttaagaacctggaggaccaacctgcccaaaggcgcttgcgccctgcttctgacgagcgtcgatcacgatagagcccctgttgtaggtgtgcgggtaaacgtcctcctaagtcggtacctcatcgaaccctgcgggccaggtaagtcaaaattgacctacatgtgtcgggtggacctgagaggacacatgccggaatggtacacaaagagtttcgggcacttgtgcgctgctgaagtcgtaaaaattagggacagtttcagcaatcagaacactgagacaaaagataccaagtccagatag

SEQ ID NO: 220547 - DNA, 972 bp, synthetic construct
  misc_feature 1..972: note = Description of Artificial Sequence: Synthetic coding sequence
  source 1..972: mol_type = other DNA
atgggcaactccgctagccggagtgattttgagtgggtctacaccgaccagccccacacccagagacgcaaagagatcttggccaaatacccagctataaaagccttgatgcgtccagacccacgtctaaaatgggcggtgctcgtgttagtgttggtgcaaatgctagcatgctggctcgtgcggggtctagcctggcgctggctgctgttttgggcgtatgcctttgggggttgcgtgaaccactctcttacattagcaatacacgacattagccataatgcagcatttgggactgggcgagcggctcggaaccggtggctggctgtgtttgcaaacctgccagttggcgtgccctatgctgctagctttaagaaatatcatgtggaccaccatcggtatctgggcggagatggtctcgatgtggatgtgcccacccgcctcgaagggtggttcttttgtaccccagccaggaagcttttgtggctagtgctacagccctttttctactctttgcgcccactgtgtgtgcacccaaaagcagttacaagaatggaagtgctgaacacactggtccagttagccgcagacctggctatattcgccctgtgggggctgaaacctgtggtgtatctcttagcttcatcatttcttggcctgggcctccatcccatttccggccatttcgtcgccgagcattatatgttccttaaggggcatgaaacttattcgtattacgggcctttgaattggattaccttcaatgtcgggtaccacgtagagcaccatgatttcccaagcatccctggctataatctgccgctggttcgcaaaatcgcccctgagtattacgaccatctgccacagcaccatagctgggtgaaggttctatgggactttgtgtttgaagacagccttggcccatatgctagagttaagcgcgtctacagattagcaaaagatggcctgtag

SEQ ID NO: 220548 - DNA, 2214 bp, synthetic construct
  misc_feature 1..2214: note = Description of Artificial Sequence: Synthetic coding sequence
  source 1..2214: mol_type = other DNA
atgcagccgagacgggcacaagctcccggagcccagctgctacccgcactggctctcctgctgctgttactgggggcagggcctagagggtcttcacttgcaaaccctgtgccagcggcaccactgtctgcccctgggccttgcgcagctcagccctgcaggaacggcggtgtgtgcaccagccggccagagcctgatccgcagcaccccgctccggctggggaacctgggtactcatgtacatgtcccgctggaattagcggggctaactgtcaactcgttgccgatccatgcgcctctaacccatgccaccacggtaactgtagctccagcagttcttccagctcagacggatatctttgtatttgtaatgaagggtacgagggccctaactgcgagcaggcgctcccaagtttgccagcaactgggtggacggagagcatggccccaaggcaattgcagcctgtcccagcaacccaagaaccagacaaaatactgcccaggagtcaggccacagtcaccctgcctacatggcagccgaaaaccggtcagaaggttgtagaaatgaaatgggatcaggttgaagtgattcctgatatcgcctgcggaaacgcctccagcaattcctccgcgggagggaggctggtgtcttttgaggtgccccagaatacgtccgtgaaaattaggcaagatgccacggctagtctgattttgctatggaaggtgacagccactgggttccagcagtgctcattaattgacggcagatccgtgacacccctccaagcgagtggagggctggtgctcttggaggaaatgctggccctaggtaataaccacttcatcggattcgtgaacgactccgttaccaagtctatcgtggctctgcgtctgactctcgtggtgaaagtttctacatgcgtgccaggggagagccacgcgaacgatctagaatgtagtggtaaagggaagtgcacgacaaagccctccgaggctaccttttcctgtacatgcgaagagcagtacgtggggacattctgcgaggaatacgatgcatgtcaaaggaaaccctgccagaataatgccagctgtattgacgcgaacgagaagcaagacggctcaaacttcacatgtgtttgtctgcccggttatacaggagaactctgtcagtccaagattgactactgcatcctagatccatgcagaaacggcgcaacctgcattagttcattatccggatttacctgtcaatgccccgagggctattttggctccgcatgcgaggagaaagttgatccgtgcgccagtagcccctgccagaataatggaacttgctacgtggatggggtccatttcacttgtaactgttctcctggattcacagggcctacttgcgcccaactgatcgacttctgcgccctgtccccctgtgcccatggcacctgcagaagcgttggaacttcatacaaatgcctctgcgatccaggataccacggcctgtactgcgaggaagagtacaatgaatgtctttcagccccatgcctgaacgcagcaacctgccgagatctggtgaatggatacgagtgcgtatgcttggcagaatacaagggcacacactgcgagctgtacaaagatccttgcgctaacgtgtcttgcctcaatggtgcaacctgcgactcagacggccttaacggaacctgtatctgcgcccctggctttacgggagaagagtgcgacatcgatatcaatgagtgcgacagcaacccttgtcaccacggagggagctgtctggaccaaccgaatggctataactgccattgcccccacggctgggtgggtgctaattgcgagatacacttgcaatggaaaagcgggcacatggctgagtccctcacaaacatgcctcgccactccctgtatattattatcggcgctttgtgcgtggcattcatcctgatgctgataatcctcatcgtggggatttgcaggatatccaggattgagtaccaaggttccagtcggcctgcctatgaggagttctataactgcaggtcgattgactctgagttttctaatgctatcgcttcaatccgtcatgccagatttggtaagaagtctcgtcctgcaatgtacgatgtgagcccaatcgcctacgaggattactcccctgacgacaagccattggtgacactgattaagactaaagatttatag

SEQ ID NO: 220549 - DNA, 1368 bp, synthetic construct
  misc_feature 1..1368: note = Description of Artificial Sequence: Synthetic coding sequence
  source 1..1368: mol_type = other DNA
atgcttgctctgggcaacaaccacttcatcgggttcgtgaacgactcagtgactaagtctatagtcgcactgaggctgacgctcgtggtaaaagtcagcacctgcgttccaggagaatcccacgccaatgacttagagtgcagcgggaagggaaagtgcaccacaaagccaagtgaagctactttcagctgcacttgcgaagagcagtacgttggtaccttctgcgaggaatacgatgcgtgccaacgtaagccatgtcagaataacgcctcatgtattgacgccaacgaaaaacaggatgggtccaattttacttgcgtgtgcctacccggatatacaggagaattatgccagagcaaaattgactattgtatcttggacccctgtagaaacggcgcaacttgtatcagctccctgtccggtttcacttgtcagtgtcccgagggctacttcgggtccgcgtgcgaagagaaggtggatccatgcgcaagttcgccgtgccaaaacaatggaacctgttgctcgcctggctttactggtccaacctgcgcacagcttatagatttctgtgccctgagcccatgtgcccacggcacctgcaggtctgtcggcacaagctataaatgcctgtgtgacccaggctatcacgggctttactgcgaggaggaatacaacgaatgcctttctgcaccctgtctcaacgctgcaacttgcagagacctggtcaacggatacgagtgcgtttgtttggccgagtacaagggcacccattgcgaattatataaggatccttgtgccaacgtctcttgcctcaacggggctacatgcgactctgatgggttgaacggaacgtgcatctgtgcacctggtttcaccggggaagagtgcgacattgacattaacgagtgtgatagcaatccttgtcatcacggtggctcgtgtctagaccaaccgaatggatataattgccattgcccgcatggttgggtgggggcaaattgtgaaatccacctgcaatggaagtcagggcacatggcagaaagcttgactaatatgccccgtcactccctgtatattattatcggagctctttgcgtggccttcatcctgatgctgataattctgattgtcggaatatgtagaatctctagaattgagtatcaaggatcctctcggcctgcctacgaagagttctacaattgtcgctcaattgatagcgagtttagcaacgcaatcgcctccattcgccatgcacggttcgggaagaagagcagaccggctatgtacgacgtgtcacctattgcgtatgaggactattctccggacgataagccactcgtgacacttattaagacaaaagacctgtag

SEQ ID NO: 220550 - DNA, 933 bp, synthetic construct
  misc_feature 1..933: note = Description of Artificial Sequence: Synthetic coding sequence
  source 1..933: mol_type = other DNA
atgacagctacagaggctttgctgagagtgcttctgctgttgctggccttcggacattctacctacggcgctgagtgtttcccggcttgcaatccacagaatgggttttgtgaggacgacaatgtctgtcgatgtcaaccaggatggcaaggtccactttgcgatcaatgtgtgacctctcctgggtgtcttcacggcctgtgcggcgagccaggtcagtgtatttgcacagatggctgggacggggagctgtgtgatcgtgatgtccgtgcgtgctctagtgcaccatgcgctaataacagaacatgcgtcagccttgatgatggtctctacgaatgttcctgtgcacctggctacagcggaaaggactgtcagaagaaggacgggccttgtgtgataaacggatccccctgtcagcacggcggaacatgtgtcgacgatgaggggagagcctctcacgcttcctgtttatgtcccccaggctttagcggtaatttctgtgagattgtcgccaatagctgtacgcccaatccttgcgagaacgatggggtatgtactgacattgggggagattttagatgtcgatgccccgcaggattcatcgacaagacatgcagcaggccagtcaccaactgcgcctcatctccctgtcagaacgggggaacatgcctccagcacacccagggccaggcaatttgctttacgatcctcggagttcttactagcctcgtggtcctggggactgtgggtattgtcttcttgaataagtgtgaaacttgggtgtctaatctccgttataaccacatgctacggaagaagaagaacctgctcctgcagtacaattccggcgaggacctggctgtaaacattatcttccccgaaaaaatcgacatgaccaccttcagcaaggaagcaggagacgaggagatatag

SEQ ID NO: 220551 - DNA, 1152 bp, synthetic construct
  misc_feature 1..1152: note = Description of Artificial Sequence: Synthetic coding sequence
  source 1..1152: mol_type = other DNA
atgactgcgaccgaagccctgttacgcgtgctgttgcttctgctggcctttgggcattctacatatggtgccgaatgttttcccgcatgcaacccccaaaatggattttgtgaggacgacaacgtttgtcggtgtcagcccggttggcagggacccctctgtgaccagtgtgtaactagtcccggttgcctgcatggattatgcggcgagcccggacagtgtatttgcactgacggatgggacggcgagctctgtgacagggacgtgagagcttgtagctctgcgccttgtgcgaataatcgaacctgcgtgtctctagatgatggtctgtacgagtgcagctgcgcccctgggtattctggaaaagattgccagaaaaaagacggaccttgcgtaattaacggatccccatgccagcacggtgggacttgcgtggacgacgagggtagggctagccatgcctcttgcctctgcccgccaggtttcagcggtaatttttgtgagatcgtggccaatagctgtactcctaacccttgcgagaacgatggtgtgtgcaccgatatcggcggagactttcggtgcagatgccccgcaggatttattgacaagacttgctctaggcccgtgactaattgcgctagctctccatgccagaacgggggtacgtgcctgcagcatacccaggtgtcgtacgagtgtctatgcaagccggagttcacagggcttacgtgcgttaagaagagagccctttccccccagcaagtgacaagactgccgtcgggctatggattagcctaccggttgacgcctggtgtgcacgagcttcctgttcagcaaccagagcaccgaatactgaaagtctccatgaaagaacttaacaaaaaaacgccactgctgactgagggtcaggccatatgcttcacaatcttgggtgttcttacctctctggtggtactggggactgtgggcatcgtattcctaaacaagtgtgagacgtgggtgagtaacctgagatacaaccacatgttgagaaagaaaaaaaacctgttgttgcaatacaatagtggagaagatctcgcagtaaacatcatctttcccgagaagatcgacatgacaaccttttccaaagaagctggggatgaggagatctag

SEQ ID NO: 220552 - DNA, 294 bp, synthetic construct
  misc_feature 1..294: note = Description of Artificial Sequence: Synthetic coding sequence
  source 1..294: mol_type = other DNA
atgaccgccaccgaggcactcttgagggtgctgctccttctcctggcattcggccattccacttacggggctgaatgtttccctgcctgtaaccctcagaatggtttctgtgaggatgacaacgtgtgccggtgccaaccaggctggcaaggcccattgtgcgaccagtgtgtcacttctcctggctgtttgcatggtctgtgcggagaacctggacaatgcatctgcactgatggctgggatggtgaactatgcgatagagacgtacgagcctgttcgtcagctccatgttag

SEQ ID NO: 220553 - DNA, 3612 bp, synthetic construct
  misc_feature 1..3612: note = Description of Artificial Sequence: Synthetic coding sequence
  source 1..3612: mol_type = other DNA
atggcagcgtgcggacgggtccgaagaatgttcaggctgtccgccgctctccacttgctgttgctgtttgctgccggtgccgagaaactgcctggacaaggggtgcactctcaagggcaggggccaggcgctaattttgtctcattcgtcggccaggccggtgggggtgggcctgctggacagcaacttccacaattgccccaatcttctcagctgcagcagcagcagcagcagcagcagcagcagcaacagcctcagcctccacagcctcccttccctgcaggtggcccacccgcacgcaggggcggagcaggcgctggcggaggctggaagctggccgaagaggagtcttgcagggaggacgtgactcgcgtttgccctaagcatacttggagcaacaacctggccgtgctggagtgcctgcaggacgtaagggagcctgagaacgaaatctcttcagattgcaatcacctgctctggaactataagcttaatctgacaacggatccaaagttcgagtccgttgccagggaagtgtgcaaatctacgataactgaaataaaggagtgcgcagatgaaccagttggcaaggggtacatggtctcatgtctcgtcgatcatagaggcaatatcaccgaatatcagtgtcatcagtatatcacaaaaatgactgcaattatcttttcggattatcgattgatctgcggtttcatggacgactgtaagaatgacatcaacattttgaagtgtggaagcatacgattaggagagaaagatgctcattctcagggggaggtggtatcatgcctagagaaggggctagtaaaggaagcggaagaaagagagcctaagattcaggtaagtgaactgtgcaaaaaggctattcttcgggtggctgagcttagctcagacgatttccatctagaccggcatctttactttgcttgcagagacgatagggaaaggttctgcgagaatacccaagccggtgagggtcgagtttataagtgcctattcaaccataaatttgaagagtctatgagcgagaaatgcagagaagctctgacaactcgtcagaaactgatagcccaggactataaagtgtcctattccctggcaaaatcgtgtaaaagcgatttgaagaagtaccggtgtaacgttgaaaatctgccaaggtcccgggaagcgagacttagttacttgttaatgtgtttagagtccgccgtgcaccgtggacgtcaggtcagctcagaatgccaaggcgaaatgctggactacagaagaatgctcatggaagacttcagcctgagccctgagatcatactgtcctgcagaggggagatcgagcaccactgcagcggactccaccggaaaggacgaactctgcactgcttaatgaaggtagttcggggtgagaaaggcaaccttggaatgaattgccagcaggccctccagaccttaattcaggagaccgacccaggtgcagattacagaatcgatcgggctctgaacgaggcatgcgagagcgtcattcagacagcctgcaagcacattcgatcgggcgacccaatgatactgtcatgcttgatggagcacttatacactgagaaaatggtggaggattgcgagcacaggctgttagagttgcagtattttatcagtcgcgattggaagctcgatccggttttgtataggaagtgtcagggggatgcaagcaggctgtgtcacactcacgggtggaacgagacctcggaattcatgccccagggagcagtgttcagctgcctctatagacatgcataccgtactgaggagcaagggagaagactgtcaagggagtgccgcgcagaagttcaacggattctacaccaaagagcaatggatgtgaaactggaccctgccctgcaagacaagtgtctgattgacctggggaagtggtgttccgagaaaactgagaccgggcaagaactggaatgcctacaagatcatctggatgacttggtggtggagtgccgagatattgtgggtaaccttacagaactcgagtcagaagacattcaaatcgaggctctgctaatgcgtgcttgtgagccgatcattcagaacttttgtcacgatgtagccgataaccagatcgacagtggggacctgatggagtgtctgattcagaacaaacaccagaaggacatgaacgaaaagtgtgctatcggagtgacccacttccagttagtgcagatgaaggattttcgcttttcctacaaattcaaaatggcctgcaaagaagatgtgctgaaactctgtcccaatataaagaagaaggttgatgttgtcatatgtctgtccaccacagtccggaatgacactctgcaggaagccaaggagcatagggtcagccttaaatgtaggcgacagctgcgcgtcgaagagctggagatgaccgaagatatccgtctagaacccgacctctacgaagcctgtaagtcagatatcaaaaacttctgctcagccgtgcagtatggaaatgcccagataatcgagtgcctcaaagaaaacaagaaacaactgtcaacacgatgccatcagaaggtatttaagctgcaggaaacagagatgatggacccagagcttgactatacactaatgagagtgtgcaagcagatgatcaaacggttctgtccggaggccgactccaaaactatgttgcaatgcttgaaacaaaataaaaactcagaattgatggatccaaagtgcaaacagatgatcacgaagcgccagatcacgcagaataccgattataggcttaaccccatgctccgaaaggcttgcaaggccgacattcctaagttttgccacggtatactcacaaaggccaaagacgatagtgagctggagggccaggttattagctgcctaaagctccggtatgccgaccagaggctatcatcagattgtgaggatcagatcaggattattattcaagaaagtgccctggactacagactggatccacagctgcagctccattgttccgacgaaatttcctctctgtgtgctgaggaagctgctgctcaagagcagactggccaggtagaagagtgcctgaaggtgaacctattaaaaattaagacagaactctgcaaaaaggaggtacttaacatgctcaaggaatccaaggcagacatttttgttgatccggtgctccacacagcatgcgccctggacataaagcatcattgtgcagccataacgccaggtcgcggtcgccagatgagttgtctcatggaagccctggaagataaacgcgtacggctacaaccggaatgtaaaaagcggttgaacgaccgtatcgaaatgtggtcttacgccgcaaaggtggcaccagccgatggtttttctgatttggcaatgcaagtgatgacctccccttctaagaactacattctgagcgtgatatctggaagtatctgtatccttttcctgattggactcatgtgcggtcgtatcactaaaagggttacccgcgagttgaaagatcgattgcaatacaggagcgaaactatggcttacaaagggcttgtgtggagccaagatgtgacaggttcccctgcttag

SEQ ID NO: 220554 - DNA, 1764 bp, synthetic construct
  misc_feature 1..1764: note = Description of Artificial Sequence: Synthetic coding sequence
  source 1..1764: mol_type = other DNA
atggtctccccacggatgagcggactgttatcccagacagtgattctcgcacttatctttcttccccagacgcgccctgctggggtgttcgagctgcaaatacactctttcggccctgggcctggccctggtgcacctcgctctccgtgttccgctagactcccttgcaggctcttcttccgagtttgcttgaaacccggactgagcgaagaggctgcagagagcccatgtgcccttggtgcggctctgtccgcaaggggcccagtctatactgaacagcccggagcacctgcccctgatctcccactcccagacgggctgctgcaagtgccattccgtgatgcctggcctggcactttctcgttcatcatcgagacgtggagagaggaactgggagaccaaattggcggtcctgcatggtctctactggctcgggtcgctggaagacggcgtttggcagctgggggaccatgggcgcgtgacatccagagagccggagcctgggaactacgattctcataccgtgcccgatgcgaaccgcctgccgttggaaccgcttgtacgagactctgcagaccaagatcagctccttccagatgcggtccgggactgcgcccatgtgctccgctggaggacgagtgtgaagcccctctcgtctgccgggcaggttgcagcccggaacacgggttctgtgagcagccaggtgaatgtcgatgtctggagggctggaccggccctctgtgcaccgtgcccgttagcactagtagttgccttagcccacgagggccaagttctgctacaacaggatgtctggtacccggtcctgggccatgtgacgggaacccgtgcgccaacgggggaagttgcagtgagactccgcgatccttcgaatgcacttgtcctcggggattctacggtctgagatgcgaagtgtcgggcgtcacttgtgccgacggaccatgtttcaacggcggactatgtgtcggtggcgcagacccagactctgcctacatttgtcattgtccccctggttttcagggaagcaactgtgagaagcgagttgaccgatgctcactgcagccttgccgcaatggcggattgtgtttggaccttggacacgccctccgatgtaggtgccgcgctggctttgccggaccacgatgtgaacatgatctggacgattgtgctgggagagcctgcgcaaacggaggaacatgcgtggaaggaggcggagcccacagatgctcatgtgctttggggtttgggggacgagactgcagagagagggccgacccttgtgcagcacgcccatgtgcgcatggcggtcgctgttatgcacatttctcaggtctcgtgtgtgcctgcgcccctggctacatgggagcgaggtgtgagttccccgttcaccctgacggagcaagcgcactgcctgcagcccctcccggattaaggcctggagacccgcagcggtatctgctacccccagcactgggcctgttggtggctgcgggagtggctggtgcagcgctgctgttggtgcatgtgcgacggcgtggacactctcaggatgcgggatcccgtttgctggccggtacccctgaaccttctgtgcacgcgctgccagacgcccttaacaacctgcgaacccaagaaggctctggagatggaccttccagctcggtagactggaatcgtcccgaagacgtggacccacaaggaatatatgtgattagcgcccctagcatctatgctagagaagcttag

SEQ ID NO: 220555 - DNA, 2058 bp, synthetic construct
  misc_feature 1..2058: note = Description of Artificial Sequence: Synthetic coding sequence
  source 1..2058: mol_type = other DNA
atggcggctgctagcagaagcgctagtgggtgggctctgcttctgctagttgccctgtggcaacagcgcgcagccggaagtggcgtgtttcagttacagctgcaagagttcataaatgagcgcggtgtattggcctctggtagaccttgcgaacccggttgccgcacattcttcagagtgtgcctgaagcattttcaggctgtggtctcccccggtccatgtacattcggaactgtttcaaccccagtgctggggactaattcttttgctgtgagagacgattcctccgggggtggtcgcaatcccctgcagttaccttttaacttcacgtggcctggaactttttcgctgatcattgaggcctggcatgctcctggcgacgatcttcgtcccgaagcgttgccaccagacgcactgatcagtaaaattgcaattcagggcagcctcgctgtcggccagaactggctactggacgagcaaacaagtacactgacacgtttacggtactcatatcgtgtgatctgtagtgataactactatggagacaactgcagccgcctttgtaaaaagaggaacgatcattttggccactacgtgtgtcagcctgacggtaatttgtcttgtctacccggttggactggggagtactgtcaacagccaatctgtcttagcgggtgtcatgagcagaacggctactgcagcaagcccgctgaatgcctgtgtcgcccaggctggcagggtagactgtgcaatgaatgcatcccacataacggctgtaggcatgggacttgttcgactccatggcaatgcacatgtgacgaaggatggggcggacttttctgcgaccaggaccttaattattgcacgcatcacagcccttgtaaaaacggagctacctgtagcaatagcggtcagcggtcctatacatgcacttgcaggcctggatacacgggagtagattgtgagctggaactgtctgagtgcgactcaaacccatgccgcaacggaggctcttgtaaggatcaagaagatgggtatcattgtttgtgccctccaggctattatggcctgcattgtgagcactccacccttagttgtgccgactcaccctgcttcaatggaggctcgtgtcgcgaacgcaaccagggcgctaactacgcctgtgagtgccctcctaatttcactggttcaaattgtgaaaagaaggttgacaggtgcacatctaatccgtgtgcgaatggagggcaatgtcttaacaggggcccatctcggatgtgtcgatgccgccctggattcactggaacatactgtgaactacacgtgtccgattgcgcccgaaacccttgcgctcatggtggaacctgccatgatctggagaatggtctgatgtgcacctgtcccgctggcttcagtggacggcgatgcgaggtcaggacttctattgacgcttgcgccagctccccctgcttcaatagagctacatgttataccgacctgagtaccgatacattcgtgtgtaattgcccatatggtttcgtgggatccagatgtgaattcccagtcggactaccccctagctttccatgggtggccgttagccttggggtcggccttgcggtgctgctggtgcttctgggcatggtggcagttgccgtgcgccagctgcgcttgcgcaggcccgatgacggtagccgtgaggccatgaataacttgagtgactttcagaaggacaatcttattccagctgcccaacttaaaaatacgaaccaaaagaaagagctcgaggtcgactgtggcttagacaagtctaattgcgggaagcagcagaatcacaccttagattacaacctggccccaggcccactgggacgcggtaccatgcccggtaaatttccccactccgataagtcattgggtgaaaaagctccactgagacttcactcggaaaaaccagaatgcagaattagcgctatttgttcccccagagatagcatgtaccaaagcgtttgcctgatcagcgaggaaaggaatgaatgtgtgatagccactgaggtttag

SEQ ID NO: 220556 - DNA, 2223 bp, synthetic construct
  misc_feature 1..2223: note = Description of Artificial Sequence: Synthetic coding sequence
  source 1..2223: mol_type = other DNA
atggcctctcatctgaggccgccatcgccgctgctggttagagtctataaaagtggtccacgcgttcgcagaaagctggagagctatttccaatctagcaagagttccggaggaggcgaatgtactgtctccactcaggaacacgaggcacccggtacctttagagtggagttctcggaaagggctgccaaggagagagtcctcaaaaagggcgaacatcaaatcctcgtcgatgagaagcctgtgccaatttttctggtgcccactgagaattcaatcaagaagaatacacgccctcaaatttccagcctaacacagagtcaagccgagaccccctcaggggacatgcaccaacatgaggggcacatccccaatgccgtcgattcatgcctccagaagattttccttaccgtcacagcagatctgaactgtaatcttttctctaaggaacagagggcctatattacaaccctgtgtccctctatccggaagatggagggccacgacggtatcgaaaaagtgtgtggagacttccaggatatcgagcgaattcatcagttcttgtcagagcagtttcttgaatccgaacagaaacagcaattcagtcctagcatgacagagcgcaaacctctttcccagcaggagcgagatagttgtatctcacctagcgagcctgagaccaaagctgagcagaagagcaattatttcgaagtaccccttccttattttgagtatttcaaatatatttgccccgataaaattaactcgattgagaaacgatttggggtgaatatcgaaatacaggaatcaagtccaaatatggtctgtcttgactttacatctagtaggtcaggcgacttggaggcagccagagaatccttcgcgagcgaattccagaagaataccgagccccttaagcaggaatgcgtcagcctcgcagattccaagcaggcaaataagttcaagcaggaacttaatcaccaattcaccaagcttctcatcaaggagaaggggggtgagctgactctactgggaacgcaagacgacatcagtgcggcaaaacaaaaaatttcagaagctttcgttaagattcccgtgaaactgtttgccgctaattacatgatgaatgtgattgaagtggactcggcccactataaactgctggagacagaactcctgcaggaaatctccgagattgaaaaaaggtacgatatctgctctaaagtcagtgagaagggccagaagacatgtattctgtttgagagcaaggatcgccaggtggatctgagcgtgcatgcctatgcttcttttatcgacgcttttcagcatgctagttgtcagttgatgcgggaagtgctcctattgaagagcctggggaaagaacgcaaacatctgcaccagaccaaatttgcagacgatttcaggaagaggcaccccaacgttcacttcgtgctcaatcaagaaagtatgaccctcactgggcttcctaaccacctagcgaaagccaagcaatacgtgctgaaggggggaggcatgagcagtttagcagggaagaaactgaaggagggacacgagacacctatggacattgactctgatgacagcaaggcggcatcaccgccactcaaggggagcgtcagctcagaagcttctgagttggacaaaaaagaaaaaggcatctgtgtgatttgtatggacactataagcaacaaaaaggttcttccgaagtgtaaacacgaattctgtgcgccttgtatcaacaaggctatgagctacaagcccatctgtcccacctgccaaactagctacggcattcagaagggaaatcagcccgaggggtccatggtattcactgtcagtcgggactcattgcccggttacgagagttttggcaccatcgttatcacctacagcatgaaggccggaatccaaactgaagagcatccaaatccaggtaagcgatatcccggtatccagaggacagcctacttacccgataataaagagggacggaaagtcctgaagctactctatcgggctttcgatcagaaacttatatttacagtcgggtactctcgcgtcctaggggtgtcggacgtcatcacgtggaacgacattcatcataagacttctagattcggcggacccgagatgtacggttatcctgacccgtcatacctgaagcgggttaaggaagagcttaaggctaagggaattgagtag

SEQ ID NO: 220557 - DNA, 1863 bp, synthetic construct
  misc_feature 1..1863: note = Description of Artificial Sequence: Synthetic coding sequence
  source 1..1863: mol_type = other DNA
atgtcacgccctgggcacggaggcctgatgcctgtcaacggcctgggatttccccctcagaacgtggctagggtcgtggtgtgggaatggctgaatgagcatagccgatggagaccatataccgccaccgtttgccatcatatcgaaaacgtgctcaaagaagacgctagggggtctgttgtcctgggccaagtcgacgcgcagctagtgccatatattatcgatctccagagcatgcaccagtttcggcaggacactggtaccatgcgccctgttcgtagaaacttctacgacccgagcagtgctccaggcaaaggcattgtctgggaatgggagaatgacgggggtgcgtggaccgcctatgatatggatatctgtatcacaatccagaacgcatatgagaagcagcatccctggctagatctcagctccttggggttctgctaccttatttatttcaatagtatgagccagatgaatagacagaccaggaggaggcgacggttaagaaggcgcttagacctagcttatccccttaccgtcgggagcatccccaagagccaatcttggcccgtgggcgctagctcaggccagccctgttcttgccaacagtgcctcttggtcaattctaccagggccgcttcaaacgcaatcttagccagccaaagaagaaaggcccctccagccccaccccttcctccccctcctccgcctggcggaccaccgggagctctggctgtcaggccctccgccacctttacaggcgcagccctgtgggctgccccagcagcagggccagccgagccagcccctcccccaggcgctccaccaaggtctccaggagcccctggaggggcacgaacaccaggccagaataacttgaatcggccaggtccccagagaacaacttcagtgtccgcgcgagcctctatccctcctggggtgcccgcacttcctgtaaagaacctaaacggaacgggcccagtccaccctgccttggcaggaatgaccgggatcctgctctgcgcagcagggctcccagtctgtctgacaagggccccaaaacctatcctgcaccctccacccgtctctaagagtgatgttaagcctgtccctggtgtaccgggagtttgtagaaagacgaagaaaaaacacctgaaaaaatctaaaaacccagaagacgtggttcgcaggtacatgcagaaggtcaagaatccacccgatgaagactgcacgatttgcatggaaaggctggtgactgcctccggttatgagggtgtgttgcgtcataagggggtgcggccagaattggtgggtcggctcgggagatgcgggcacatgtaccatcttctgtgcctggtagcgatgtattctaacggaaacaaagatgggtctctgcagtgtcctacttgtaaggcaatttatggcgaaaaaacaggcacccagccccctgggaaaatggaattccaccttattcctcacagcctgcccggttttcctgatacccagactatcaggatcgtttacgacattcctacaggcatccaaggacccgaacacccgaaccccggaaaaaaattcaccgccagaggctttcctcgtcactgctacctgccaaataatgagaagggaagaaaagtactccgcttgctgatcacagcctgggagcggagacttatttttaccatcggaaccagtaatactacaggagagtcagatacagtggtgtggaacgaaattcaccacaaaaccgaatttggctctaacctgaccgggcacggataccctgacgcgtcatacctagataatgtacttgccgaactcacggcacagggcgtgtcggaagctgctgccaaagcttag

SEQ ID NO: 220558 - DNA, 1044 bp, synthetic construct
  misc_feature 1..1044: note = Description of Artificial Sequence: Synthetic coding sequence
  source 1..1044: mol_type = other DNA
atgtccttcgttttgtctagaatggctgcttgcgggggaacctgcaaaaacaaagtgactgtgagcaaaccggtgtgggattttctatcaaaggaaacccccgcaagactggcaaggctgcgcgaagaacaccgggtgagtattctgatcgacggggaaacctctgacatctatgtcctgcagcttagtccacaagggccaccgcctgccccacccaatggactgtatctggccaggaaggctctgaagggcctgttaaaagaggcagaaaaggaactaaagaaagcccaaaggcagggagagcttatgggttgcctggctttgggtgggggaggcgagcaccccgaaatgcatagagcgggacctcctcccctgagggccgctccactgttacctcctggtgctcggggactgccccctccaccacctcccttgcctcctccattgcctccaagactgagagaggaggccgaggagcaggagtccacatgccccatatgtttaggtgaaattcagaatgcaaaaactctggaaaaatgcagacactccttttgcgaggggtgtattactcgggcactccaggtcaagaaggcttgtccaatgtgcggtcgcttctatggccagttggtcggaaaccaaccacagaacgggaggatgctcgtgagtaaggacgccactttgctgttgccctcgtatgaaaagtacggcactatcgtcatccaatacgtattcccacccggagtacaaggggctgagcatcccaatccaggggtccgctatcctggcaccacgcgcgtagcctacctccccgactgtcccgagggtaataaggtcctcacactgtttcgtaaagcctttgaccaaaggttgacattcactattggtacatctatgacaactggacggcctaacgtgatcacgtggaacgacatccaccacaagacatcatgcaccggaggcccacagctcttcggatatcccgatccgacctacctgaccagagtccaggaggagctgcgggcaaaagggattaccgatgattag

SEQ ID NO: 220559 - DNA, 1044 bp, synthetic construct
  misc_feature 1..1044: note = Description of Artificial Sequence: Synthetic coding sequence
  source 1..1044: mol_type = other DNA
atgtcttttgttttgtcacggatggcagcctgtggaggtacatgcaaaaataaggtgactgtctctaagcccgtttgggacttcctgagcaaggagactcccgctagattggcaagattgagagaggagcaccgcgtaagcattttaattgacggcgaaacctccgacatctacgtcctccaactgtcccctcaaggcccaccgcctgcaccccctaatggtctgtacctagctaggaaggctcttaagggactcctaaaagaggcagagaaggagttgaaaaaggcccagcggcagggtgagctgatgggctgcttggctctgggaggcggtggcgaacatcctgagatgcaccgggcaggcccacccccactgcgagcagctcctctgctcccccctggagccagaggtctcccaccgcctccccctcctttgccgccacccctgccacctagactccgggaggaggcagaagagcaggagtcgacgtgccccatatgtctgggtgaaatacagaacgccaagacactggaaaagtgtcggcacagtttttgcgagggctgcattacacgcgctcttcaggtcaagaaggcatgccccatgtgtggacggttctatggccagctggtcggaaaccagccccagaacggcagaatgctggtgtccaaggacgccactctgttactcccttcttatgaaaagtatggaaccattgtgatccagtacgtatttcctccaggcgttcagggcgcagaacaccctaaccctggggtgcgctaccctggcacaacgcgcgtggcttacctgcccgattgcccggagggcaacaaagtgttaaccctgttccgcaaggccttcgaccagaggctgacctttacaatcgggacctcaatgacaaccggccgacctaacgtgatcacttggaatgatattcatcacaagactagctgtacagggggaccccaacttttcgggtatcctgaccccacgtatctgaccagagtccaggaagagttgcgagccaagggcataacggacgattag

SEQ ID NO: 220560 - DNA, 1044 bp, synthetic construct
  misc_feature 1..1044: note = Description of Artificial Sequence: Synthetic coding sequence
  source 1..1044: mol_type = other DNA
atgtcattcgtgctctctaggatggcagcatgcggcggaacatgcaaaaataaggtaacagtgagtaagcctgtgtgggatttcctgagtaaagaaactcctgcccgtctggcgcgactccgggaagagcatcgtgtaagtatcctgatcgacggagaaaccagtgacatttatgtcttacagctcagcccccagggccctccaccggcaccgcctaatggcctctatctagcacgcaaggctcttaaaggccttctgaaagaggccgagaaagagttgaagaaggctcaaagacagggagaactcatgggttgcctggctcttgggggtggcggtgaacatcccgagatgcaccgggctgggcctccacctctaagggcagcgcctctgttaccccctggcgcaaggggccttccgccacccccaccaccgttgcccccacctcttcctccaaggcttcgcgaagaagcagaagagcaggaaagcacatgccctatctgcctgggagagatccagaatgctaagactcttgagaaatgtcgtcactctttctgcgaaggctgcatcacccgagcactccaggtgaaaaaagcatgccctatgtgtggcaggttctacgggcaactggtgggaaatcagccccaaaacggaagaatgctggtgagtaaagatgccaccttacttttgccatcgtatgagaagtatggcactatcgtaattcaatatgtatttcccccaggggttcagggagccgagcatcccaacccaggcgtgcggtaccctggaaccactcgcgtggcatacctcccagactgtccagagggtaacaaagttctcaccctgtttcggaaggcctttgatcagcgtttaaccttcacgatcggcaccagtatgaccaccggtcggcctaacgttattacatggaacgacatacatcataagacatcttgtaccggcggtccgcagctgttcggctacccagatccaacgtacctcaccagggtgcaggaggagctgcgcgctaaggggatcacggacgattag

SEQ ID NO: 220561 - DNA, 615 bp, synthetic construct
  misc_feature 1..615: note = Description of Artificial Sequence: Synthetic coding sequence
  source 1..615: mol_type = other DNA
atgcctattttatcttcatccgggtccaagatggccgcatgcggaggcacgtgtaagaataaagtgactgtttccaagcccgtgtgggattttctaagcaaggaaacgccagccagacttgcaagactgcgcgaagagcacagagtgagcattctgattgacggcgagacgtctgatatttacgttctgcagctatctccgcagggccctccccctgcccctccaaatggtctgtatctggctcgcaaagccctgaaagggctgttgaaagaggcagagaaagagctgaagaaggcgcaacgacagggtgaacttatgggttgccttgccctgggcggagggggagagcatcccgagatgcaccgagcaggacccccacctctgagggcagcccctctgctgccaccaggggcacgcggtctgcctcccccaccacctcctctccccccacctttgcctcccagattgcgcgaggaagcagaagagcaggagtccacctgtcccatctgccttggcgaaatccagaacgcgaagaccttggaaaagtgccggcatagtttctgtgaagggtgcattactagggccctacaagtcaagaaagcctgccccatgtag

SEQ ID NO: 220562 - DNA, 24 bp, synthetic construct
  misc_feature 1..24: note = Description of Artificial Sequence: Synthetic coding sequence
  source 1..24: mol_type = other DNA
atgccaatcctgagcagctcctag

SEQ ID NO: 220563 - DNA, 1053 bp, synthetic construct
  misc_feature 1..1053: note = Description of Artificial Sequence: Synthetic coding sequence
  source 1..1053: mol_type = other DNA
atgccgattctgtcttcatcgggttccaagatggccgcttgcgggggaacatgcaagaataaagttacagtgtcgaaacccgtgtgggactttctgtccaaagagacccccgctcggctggctcgcctgagggaggagcaccgcgtctcaatattaatagatggagagaccagcgatatctacgtgctgcagctgtccccccaggggccacctccagcacctccaaatggcctctacctcgcccgtaaggctctcaagggcttgttgaaggaagcagaaaaggagttgaaaaaagcacaacgacagggcgagctgatgggttgcctggctctgggcggaggtggcgagcacccagagatgcacagggccggtcctcccccactgcgagcggcacctctgctcccaccaggagccagaggattacctccgcctccccctcccttgcccccacccttacccccacgcctccgagaggaagccgaggaacaggagtcaacctgccccatctgtttaggcgagatccagaacgccaaaacactagaaaagtgcaggcactccttctgtgagggctgcattacccgcgcactccaggtgaaaaaggcctgccctatgtgtgggaggttctatgggcagctggtgggaaaccagcctcagaatggcagaatgctggtcagtaaggacgccactctgcttctgcctagttacgaaaaatatggcactatcgtgattcagtacgtattcccaccaggagtccaaggagcagaacatccgaatcctggcgtgcggtatccaggaaccacacgagtggcctatcttccagattgtcccgaggggaacaaagtgctcacattatttaggaaggccttcgaccagaggctgacgtttaccataggcaccagtatgaccactggtcggccaaacgtgattacctggaatgatatccaccacaaaacctcttgcacgggcggaccccagctgttcggttaccccgacccgacttatcttaccagggtgcaggaggaacttagagccaagggaattacggatgactag

SEQ ID NO: 220564 - DNA, 150 bp, synthetic construct
  misc_feature 1..150: note = Description of Artificial Sequence: Synthetic coding sequence
  source 1..150: mol_type = other DNA
atgtcattcgtgctgtcccgtatggccgcatgcggtggaacttgcaagaacaaggtcactgtctcaaaacctgtatgggacttcttaagtaaggaaacccccgcaagattggcacgactgcgtgaagagcacagggtctctattctgtag

SEQ ID NO: 220565 - DNA, 2136 bp, synthetic construct
  misc_feature 1..2136: note = Description of Artificial Sequence: Synthetic coding sequence
  source 1..2136: mol_type = other DNA
atgctggatggtccactgtttagcgaggggcctgactccccacgcgagctgcaagatgaggagagcggttcatgcctgtgggtccaaaaatccaaattgcttgtgattgaggtgaagactatctcatgtcactatagcagacgggcaccatccaggcagcccatggatttccaggccagtcattgggcacgaggttttcagaataggacctgtggcccaagacccggatccccccagcctccacccagaaggccatgggcgtcgagggttctgcaggaggcgaccaattggcgggctggtcccttagctgaagtacgggctcgtgaacaggaaaagaggaaggccgctagccaggagcgcgaggcaaaggagacagagagaaagcggaggaaggccggtggagccagacggtcaccaccaggtcgacctaggcctgagcccaggaatgcacctcgagtggcacagttggcagggctgcctgctcccctgcgtccagagaggctggcccctgttgggagggcacccaggccctccgcccaacctcagtctgacccaggttccgcatgggccggaccttgggggggtcggaggcctgggccaccgtcctacgaagcccaccttttgctgcgcggatcggcagggacagccccacggcgaaggtgggaccggccacctccctatgtggcccctcccagctacgaggggcctcatagaactctggggacaaaacgcggacctggcaatagccaggttcccacctcctcagcccctgccgcaacaccggctcggaccgacggtgggagaaccaaaaaaagactcgaccctaggatctacagggacgttttgggggcttgggggctgcgccaaggccaggggcttctgggcggttctccgggatgcggggctgcgagagcaagacccgaacctgggaagggagttgtcgagaagagcctgggacttgccgctgcagacctgaatagcggcagcgattcccacccacaggctaaagccactggatcagcgggtaccgaaatcgccccagctggatccgcaactgccgcaccatgtgcaccacaccctgctccgcgttccaggcatcatctcaagggctcaagggagggtaaggaaggtgagcagatttggttccccaaatgctggataccatcccccaagaagcagcctccgaggcatagtcaaacccttccgcgaccatgggcgcctggtggaactggatggcgcgagtctctggggcttggagagggggctggtcctgaaactctggaagggtggaaagcaacaagacgggcacacactcttccacgatcctctcagggtctcagccgcggtgagggggtttttgtgatcgatgccacatgcgtcgttattagatcacagtatgtgccgaccccgaggacccagcaggtgcaattgctgccaagcggggtcacacgggtggtgggagactctccctctcaatcaaaacccggtaaagaggagggagaaggggcaacagtgttcccatccccctgccaaaaacggttatcttcatctaggctattgcatcagcccggagggggacgagggggagaggcagagggtggacggccaggagattctacattggaggaaaggactttccgaatattggggctgccagcacccgaagtcaatttgcgggacgctcctactcagcctggatcgccggagcatcaagcactgggtcccgcagcttccggtgctcaggggagggccgaagggtccgaagtggccgtggtccagcgcagggccggtcgcggatgggcgaggacccccggaccctatgccggagccctgcgcgaggctgtgtcccggattcgcaggcacacggcaccagatagtgacaccgatgaagccgaggaactctcggtgcattccggttcttctgatggctctgacacagaggccccaggcgcatcctggagaaacgagcggactttgcccgaagtcgggaacagttctccagaagaagatggtaagacggccgagctgtcagattccgtgggagagatccttgatgtcatctctcaaaccgaggaggtgctgtttggggtgagagacatcagagggacccagcaaggaaacaggaaacgacagtag

SEQ ID NO: 220566 - DNA, 852 bp, synthetic construct
  misc_feature 1..852: note = Description of Artificial Sequence: Synthetic coding sequence
  source 1..852: mol_type = other DNA
atgggtatttggacgtccggaactgacatttttctgtcactgtgggagatctatgtgtccccaagaagtccgggatggatggatttcattcagcacctcggagtgtgttgtttagtggccctgatctcagtaggcctactgtctgtggctgcctgttggttccttccttcaatcattgccgctgcagcttcttggatcataacttgtgtccttctttgctgttccaagcacgcgagatgttttattctgctggtgttcctgtcatgcggtctaagagagggaagaaacgccctgatcgccgctgggacagggatcgtcattctaggtcatgtcgagaatatctttcacaattttaagggactacttgacggtatgacctgcaacctccgcgctaagagttttagtattcacttccccctgctgaagaagtatatcgaggcaattcagtggatttacggacttgcaacaccattatctgtgtttgacgatctggtgagttggaaccaaacactggccgtctcactgttctctccctcccatgtcttggaggctcagcttaatgatagcaagggtgaagtcttatcagtattgtatcagatggccactacgaccgaggtgctatcttctctcggacaaaagttgctggcctttgcaggactgtccctggtgttgctggggaccgggctgttcatgaagagattcctaggtccatgcggttggaagtatgaaaatatctatatcacccgtcaatttgtgcagttcgatgaacgcgaacgccatcagcagagaccttgtgtgctgccacttaataaggaagaaaggcgcaagttcatctctggtttccaatcatag

SEQ ID NO: 220567 - DNA, 1401 bp, synthetic construct
  misc_feature 1..1401: note = Description of Artificial Sequence: Synthetic coding sequence
  source 1..1401: mol_type = other DNA
atgctcaaatggcccattcccggacaggtcgccttgtttcagattctccgctgccggggtaattctcgtcggacaacggtaacctctctgactgtgtcccaagtgggacagaacttcaccttcgtgctcaccgacatcgattccaaacagaggttcggtttttgccgcctcagcagtggcgctaagagctgcttttgtatactttcttacctgccatggttcgaggtgttttacaagctgctgaatatcctcgcagactacacaactaagaggcaggagaaccagtggaatgagttattggaaacactgcacaaactgccaatccccgacccgggtgtgagtgtacacctgtcagtgcactcctacttcactgtgccagataccagggagcttcccagtattcctgaaaacagaaatttaactgagtattttgtcgccgtggatgtgaataatatgctgcacctatacgctagcatgctatacgagaggaggattctgattatttgctctaaactgtcaacactgactgcctgtattcatggctcagctgccatgttgtacccgatgtattggcagcacgtgtatatccccgtcctgccaccgcatctgttagattactgttgcgcaccgatgccctacctgattggaatacacctgtccctgatggagaaggtacgaaatatggcgctcgatgatgtggtcatcctgaacgttgacacgaacacactggagactccgttcgatgacttgcagagcctcccaaacgacgtcatctcttctttaaagaacagactgaagaaagtctccacaactacgggcgatggggtcgctagagcattccttaaggcacaggccgcatttttcggctcctacagaaatgcacttaaaatcgagccagaagagcccatcactttttgtgaggaggcctttgtgagccattatcgttcaggtgcaatgcgccagttcctccaaaatgcaacacagctccaattgtttaagcaatttatcgacggaaggctcgacctgctgaactcaggcgaggggttctctgacgttttcgaagaggaaatcaatatgggtgaatacgccggatctgacaaactttatcatcagtggctcagtaccgtacgcaagggcagcggcgcaatcctcaatacagtcaagactaaggctaatcctgctatgaaaaccgtgtacaaattcgctaaggaccatgctaagatgggtatcaaggaagtgaagaaccgccttaagcaaaaagatatcgcggagaatggatgcgcacccactcctgaggaacagctcccaaagactgctcccagcccgctcgtggaagcaaaggatcctaagttgagagaagaccgccgacctatcacagtgcattttggacaggccctgtag

SEQ ID NO: 220568 - DNA, 1680 bp, synthetic construct
  misc_feature 1..1680: note = Description of Artificial Sequence: Synthetic coding sequence
  source 1..1680: mol_type = other DNA
atgggaagccgcattaagcaaaatcctgagacaacttttgaggtttatgtcgaagtcgcatacccccgtaccggcggaacactatcagaccccgaggtccagcgccagtttccagaggattattctgatcaggaagtgctccagacgttgaccaaattttgttttcccttctatgtcgattcacttactgtcagtcaggtcggtcaaaactttaccttcgttctcacggacatcgacagcaagcagcgttttgggttctgtcgactatcatctggcgctaaaagctgcttttgtatattgtcctatttgccgtggttcgaggtattttacaaacttctgaacatcctggcagattacactaccaagaggcaagagaaccagtggaacgaactgctggagaccctccataaattacccatccctgatcccggagtgtccgtgcacttgtccgtccatagttactttaccgttcctgacactcgcgagcttccctcaattcccgagaatcgaaacctgaccgaatatttcgtagcggtagacgtcaacaatatgttacacctttatgctagtatgctgtacgaacgaagaatcctcatcatttgctcgaaactctcaactttgactgcctgcatccacggttcagcagcaatgttgtatcctatgtactggcagcacgtgtacattccggtgctaccaccacatctgctggattactgctgtgcgcctatgccgtacctgatcggcatccacttgagccttatggaaaaagtaagaaacatggcgctggatgacgttgttattctcaatgtcgatactaacacgctggaaacccctttcgatgatctgcagtccctgccgaacgacgttatatcatctttgaagaatcgactgaaaaaggttagtacaacaactggcgacggggtggcccgtgcatttttgaaggcacaggctgccttctttggcagctatcggaacgcactgaagattgagcctgaggagcctattactttttgtgaggaagcatttgtatcccactacaggagtggggcaatgagacaatttctgcagaacgccacacaactccaactcttcaagcagtttatcgatggacgcctggacctcctgaacagcggagagggctttagtgatgtgtttgaagaggagatcaacatgggggaatacgcgggttctgacaaactttaccatcagtggctctccaccgtgcgtaagggtagcggggctattcttaatacagtcaagactaaggctaatcccgcaatgaagactgtttataagtttgctaaagatcatgctaagatgggtatcaaggaagtcaagaacagactgaagcagaaggacatcgcagaaaatggctgtgcccctacgcccgaagagcagttgcccaagaccgcgccttccccccttgtcgaagcaaaagaccccaaactgcgagaggacagaagacctatcacagttcactttggccaagttcgccctccacgcccacatgtcgtgaagaggcctaaatcaaacatagctgtcgaaggaaggcggaccagcgtacccagcccagagcaaaacaccatcgcaacacccgctacacttcacatcctgcaaaaaagcataacgcacttcgccgctaaatttcctacaagaggatggactagcagttcccattag

SEQ ID NO: 220569 - DNA, 3030 bp, synthetic construct
  misc_feature 1..3030: note = Description of Artificial Sequence: Synthetic coding sequence
  source 1..3030: mol_type = other DNA
atgggaagtcgtataaaacagaaccctgaaacaacttttgaagtttacgtcgaggtggcctaccctcgcacgggtgggacgttatcggatcctgaggtccaacgacagtttcctgaagactacagtgaccaagaggtgttgcagaccctaactaagttttgctttcctttctatgtcgattcccttaccgtcagccaggttggacagaacttcacgtttgtgctgacagatatcgacagcaagcagaggttcgggttttgtcgattgtcatctggagcaaaatcgtgcttttgtatcttatcttacctcccttggttcgaggttttctataaactcctgaatatcttagccgactacactactaagcggcaagaaaaccaatggaatgaactcctggagaccctccacaagctaccaatcccggaccccggagtgagcgtgcacctgagcgtccactcatattttactgtccctgataccagggagttaccttctatccccgagaatagaaacctgaccgagtatttcgttgctgtcgacgtgaataacatgctgcacctctacgcctcaatgctctatgaacggaggattttgattatctgcagcaagctgagcacgctgaccgcttgtattcacgggagtgccgctatgctttatcccatgtactggcagcatgtgtacatacccgtccttccaccacatctccttgactactgctgcgcccctatgccatacctgattggtattcacctcagcctgatggaaaaggtgaggaatatggccttggatgacgtggttattctgaatgtggacactaatacccttgaaaccccctttgacgatctccaaagcctgccgaatgatgtgataagctctttgaaaaacagattgaagaaggtctcgactacgactggagacggagtggcgagggcttttctgaaggcccaggccgctttcttcggctcttataggaacgccctcaagattgagcccgaagagcctattaccttctgcgaagaggcttttgtatcccactataggagcggagccatgaggcaatttctgcagaacgctacccaactccagctctttaagcagttcatcgacggacggttggacctattgaattcaggtgaaggattttcagatgtgtttgaggaagagatcaacatgggggagtatgcgggatccgacaagctttaccatcaatggttgtctaccgttaggaagggatcgggagcaattctcaacacagtgaaaactaaagccaacccagcgatgaagaccgtatataagtttgccaaagaccacgcaaaaatgggcattaaagaagtgaagaacaggctcaaacagaaggacattgcagagaatgggtgcgctcccacacctgaagaacagctgcccaaaaccgctccctcgccgctggtggaggccaaagatccgaaactgcgagaggacagacgccctatcactgtccactttggccaggtgcgtcccccacggccacacgtggtgaaacggcctaaaagtaatatagcagtggaagggcgacgcacatcagtcccttccccagagcagccccagccgtataggactttgcgggagtcagacagtgctgagggtgacgaagcggagtcacccgaacaacaggtgagaaaaagtaccgggcctgtcccagctccacctgatagagcggcttctatcgaccttctcgaggacgttttctcgaatctggacatggaagctgcgctgcagccactggggcaggccaagagtctagaggacctgcgtgcccctaaggacctgcgagaacaacctgggaccttcgattatcagcgattggatctcggaggatccgaacgctccagaggagttacagttgcactcaagctcacccacccttataataaactgtggtctctgggacaggacgatatggcaattccatccaagccacccgctgcgtcacctgagaaaccttccgcactcctaggaaattccctcgctctaccgcgacggccacaaaacagagattcaatccttaatccgtctgataaagaagaggtaccgacgccaacgctgggctcaatcaccatcccgcgaccacagggacgaaagactcccgagctggggattgtgccccctcccccaattccccgtcctgccaaactgcaggcagcaggcgctgcacttggcgatgtctcagaaagattacagaccgatagagaccgcagggccgcactgagtcccggactgctgccaggcgtggtcccccaggggccaacggaactactgcagccactgtccccaggccctggagcagccggaacctcatctgacgccctgttggcactgctggatcctttaagcactgcgtggtctgggtcgacactgccttctagaccagccacccctaatgttgcaacaccattcactcctcaattctcattccctccggctggaacgcccactcctttcccacagcccccactcaatccttttgttccttcaatgccagcagctcctcccacactgcctcttgtgtccactcccgcagggccattcggtgcacctcccgcaagcctcggtcctgcattcgcctccgggcttctgttatcctccgccggattttgcgcacctcatcggtcccaacctaatctgtcggctttgtcaatgcctaacctgtttggacagatgccaatgggcactcacacatcccctttgcagcccctgggacctccggctgtggctccatccaggatacgaaccctgccactggcgaggtcatccgcgagggccgcagagaccaaacagggtctggcactgaggcctggtgatcccccactgctacctcccaggccacctcagggtctggaaccgactctgcagcccagtgccccacagcaggccagggatcctttcgaagacttacttcagaaaacgaagcaggatgtatcaccatctccagcactcgccccagctccggacagtgtggagcagctgcggaaacagtgggagaccttcgaatag

SEQ ID NO: 220570 - DNA, 1590 bp, synthetic construct
  misc_feature 1..1590: note = Description of Artificial Sequence: Synthetic coding sequence
  source 1..1590: mol_type = other DNA
atgctaaaatggcctattccaggccaggtcgccctatttcaagaagtactgcaaaccctaacgaagttttgtttccctttttatgtggatagccttacggtttcccaagtgggccagaactttacattcgtcctcaccgacatcgacagtaaacagcgcttcgggttttgccgcctatcctctggagcgaaaagttgcttttgcatcctctcatacctgccatggttcgaggttttctacaagcttttgaacatccttgccgactacactactaaacggcaggagaaccagtggaatgagttgctcgagaccttacacaagctacccatccccgatccgggtgtgtccgtgcacctatctgtacattcttacttcacagtgccagacacgagagagcttcctagcattcccgaaaaccgcaacctcactgaatattttgtcgctgtggatgtcaataatatgctgcacctctacgcatctatgttgtatgaacgaagaatactcatcatctgcagtaagctgagtacgctgactgcctgtattcatggaagcgccgcaatgttatatccaatgtactggcaacatgtttacatcccagttttgcccccacacctgcttgactactgctgtgccccaatgccctacctcattggcatacacttgtctctgatggagaaagtgcggaacatggcccttgacgacgtggtgatactcaatgtcgacacaaataccctcgagacgcctttcgacgacctacaatctctgcctaatgatgttatttctagccttaagaataggctgaaaaaggtgtccactacaaccggtgatggagtggctagggccttcctgaaagcacaggctgctttctttggttcataccgcaatgctcttaaaattgagcctgaagaacctattacgttctgtgaagaagcattcgtgtcccactacaggtctggcgctatgagacagtttctgcagaatgccacccagctgcagctgttcaagcaatttattgacggtaggttagaccttctgaactctggcgaaggattttctgatgtgttcgaagaggaaattaacatgggtgaatacgccggatcagacaagctgtatcatcagtggttgtctacagtgcgcaaaggcagcggggctatccttaataccgttaaaaccaaagccaacccagctatgaaaacggtatacaaattcgcgaaagaccacgccaaaatgggtattaaagaagtaaaaaaccgcttgaagcagaaagatattgccgaaaatgggtgtgcgcctacgccggaggaacaattgcccaagaccgctccttcaccactcgtcgaggccaaggatccaaagctcagagaagataggagacctatcacggtgcacttcggacaggtcagaccccctcggccacatgtggtcaagaggccgaagtcgaatatcgccgtagaaggcaggcgcacttctgtcccgtcgccagagcagaataccatcgccaccccagcaacacttcatatactgcagaagtccatcactcattttgcggcaaaattccccacacgaggatggacgagcagttcacattag

SEQ ID NO: 220571 - DNA, 3063 bp, synthetic construct
  misc_feature 1..3063: note = Description of Artificial Sequence: Synthetic coding sequence
  source 1..3063: mol_type = other DNA
atgcgtagaccaggcgaccatggcctgcaggaccaagaagtgctccaaactctcaccaagttttgttttcccttctatgtggacagcctcaccgtgagccaggttggccagaatttcacttttgtactgacagacatagattcaaaacagaggttcggattctgcaggctgagttcaggagctaaaagttgcttctgtatcctgagttatctaccatggttcgaggtgttttataagttattgaatattcttgctgattataccaccaagaggcaggaaaaccagtggaacgagcttttagagacgctgcacaagctgcctatccccgaccctggggtttctgtccacttaagcgtacattcctattttactgtaccagataccagagaactccccagcatcccagaaaaccggaaccttactgagtactttgttgccgtggacgtgaacaatatgctgcacctgtacgcctccatgctgtatgagagacgtatcctgatcatctgtagtaagttgtcaacattgaccgcgtgtatccacggctctgctgccatgctgtacccaatgtattggcagcatgtttacataccggttctcccgccacacctgctggactattgctgcgcccctatgccctacttgatcggaatccatcttagtctgatggaaaaagtgcgtaacatggctctggacgatgtcgtgatcctgaacgtggacacaaatacactggaaaccccttttgatgaccttcagtcactgccgaatgatgtaatcagcagtctgaagaatcgccttaaaaaagtgagcaccaccacaggtgatggagtggctagagcattcctcaaggctcaggccgctttctttggcagttaccgcaacgcattaaaaatagagccagaggaacccatcacattctgtgaagaagcctttgtgtctcactaccggtccggcgcaatgagacagttcctgcagaacgctacccagctgcagttgttcaagcagttcatcgatgggaggctagaccttttgaattcaggggagggattttctgatgtctttgaggaggagatcaacatgggggagtacgccggatccgacaagctctatcaccagtggctgagcactgtacgtaaggggtctggagcaattttaaatacggtcaagactaaagctaacccagccatgaaaaccgtgtataagttcgctaaagatcatgccaaaatgggtatcaaagaggtgaaaaacaggctgaagcagaaagatatagcagaaaatggatgcgctcccactcctgaagagcagttgcctaagacggcaccttcaccactggttgaggcaaaggatcccaaacttcgggaagacaggcgtcccatcacagtccatttcggtcaggtcagaccgcctagacctcacgttgtgaaacgccctaagtctaatatcgccgtagagggtaggagaacctcagtgccctcacccgaacatctggtgaaaccactcaggcattacgcagtgttcttgagcgaggactctagcgacgacgaatgccagagagaagagggtcccagtagcggttttaccgaaagctttttcttctccgctccgttcgaatggcctcagccctacaggacactgcgtgaatcagacagcgccgaaggcgatgaggcggagtctccagagcagcaggtcagaaagtctaccggcccagtaccggcacctccagatagagcagcttctatcgatctgctggaggatgtgttctcaaacctggacatggaagctgctctgcagccgctcggacaggccaaaagcttagaggatctgcgcgctccaaaagatttgagggagcagcccggaactttcgactatcaacggctggatctggggggtagtgagaggtctcgcggagtgacagtggctttgaagctaacacacccttataataagctatggtcccttggccaggacgatatggcaataccatctaagccacccgcagcgagccctgaaaaacctagcgcccttctagggaacagtctggcgttacctaggcgcccacaaaaccgggactccatcctgaaccccagcgacaaggaggaggttccgacccctaccctcggatctatcacaattcctcgtcctcagggaagaaagaccccggagcttggcatcgtgcccccacccccaatccccaggccagccaagctgcaggcagctggggctgcccttggcgacgtgtccgagcgcttgcagactgaccgggatcggagagctgccttgtctcctggcctgcttcccggtgtcgtgccccagggccctacggagttgcttcaacccttgagtcccggtccaggtgcggcaggcacatcctctgacgcactgctggctctgcttgaccctctgagcactgcgtggagtgggagcacactaccgagtcgaccggctactcccaacgtagcaacgccattcacacctcagttctctttccccccagccggtactcccaccccattcccgcagcccccactcaacccctttgtgcctagcatgcccgcagctccacctacactgccacttgtcagtacccccgctggtccttttggggcacccccagcaagcctcggcccagcatttgcatcaggcctgttactctctagcgcaggcttctgcgcccctcaccgatcccagccaaacctgtcagctctgtctatgccaaatctgtttgggcagatgccgatgggaacacacacatcccctctacagcccctcgggccacctgctgtggctccttcccgaattagaaccctccccctcgccagatcttcagctagagctgccgagacaaaacaggggctggcgctgcgtccaggcgacccaccactgctcccgccaagaccccctcaaggtctcgagccgacactgcagccatcagcccctcagcaggccagggatccatttgaagatctactccaaaaaactaaacaggacgtgtctcccagccctgcgctggctcccgctcctgactctgtggagcagctgagaaagcaatgggagacttttgagtag

SEQ ID NO: 220572 - DNA, 2385 bp, synthetic construct
  misc_feature 1..2385: note = Description of Artificial Sequence: Synthetic coding sequence
  source 1..2385: mol_type = other DNA
atgctttatcctatgtattggcagcacgtctatattccagtcttgcctccccatttgctggactactgctgtgccccaatgccatatctgattggaatccatctttccttgatggagaaggtgcgcaatatggctctggatgacgttgttatccttaacgttgacaccaacacccttgaaaccccgtttgatgatttgcaaagtttacccaacgatgtggaagaacccattacattctgcgaggaagcctttgtgtcgcactaccggtcaggtgcaatgcggcagtttttacagaacgcaacacagctgcaactctttaagcaatttattgatggccgactggacctacttaattctggcgaaggcttcagcgacgtgttcgaggaagagattaacatgggagagtatgctggctccgataagctataccatcagtggctgtcaaccgtgcgaaagggatcaggcgcaatactgaataccgtgaaaaccaaagcgaatccggcaatgaagactgtatataaattcgcaaaagaccacgcaaaaatgggaattaaggaggtcaaaaacagattaaaacagaaagacatagctgagaacggctgcgcccctacgcccgaggagcagctgccaaagactgcaccatcccccctcgtggaagccaaagaccctaaactgagagaagacaggcgccctattactgtgcactttggccaagtgagaccaccgaggccacatgtggtgaaacgtccaaagagcaacatcgcagtcgagggaaggagaacctccgtgccttccccagagcatctggtgaagccactgaggcactatgctgttttcctatccgaggattcttctgacgacgagtgtcagagggaagaggggcctagcagtggattcaccgagagtttttttttctctgccccatttgagtggccccaaccctacagaacacttagagagtctgattctgctgagggcgatgaagcagaatcccctgaacagcaggtcaggaaatctaccggccctgtgccagcaccacccgatcgtgctgcttcaattgaccttctggaagacgttttttctaatcttgacatggaggcggctctgcagcccttgggacaagcaaaaagccttgaggacctacgcgcacctaaagacctgcgcgagcaaccaggaaccttcgactaccaacggctagaccttggaggttcggagcgttccaggggagtcactgtcgcactcaaactaacacacccctacaacaagttgtggtcccttggacaggatgatatggcaattcctagcaagccgccagctgcgtctcctgagaaaccttccgcattgttgggaaactcattagcactgccaaggaggcctcaaaaccgggacagtatcttgaacccctcagacaaagaggaagttccaacaccaacactgggatctataacgattcctaggcctcagggtaggaagactcccgaactgggtatagtcccccctccccctatccccagacctgccaagctgcaggctgctggggctgccctcggtgatgtctctgagcgactgcaaactgacagggatagacgggctgcactttccccagggctactgccaggagtggtaccacagggcccaacggaactgctgcagccgcttagccctgggccaggagcggctggcacatcctcagatgctctcctcgctcttttagacccattgagtaccgcttggagtggctctaccttacccagcagaccagcgacaccaaacgtcgccacaccattcacgccacagttctcattccctccagccggaacaccaacgccctttccccagccccctttgaatcccttcgtgccttcaatgcccgcagcaccgcctaccctgccattagtctcaacacccgctggtccgtttggggcacctccggctagcctggggcctgccttcgcctcaggcctgctgttgagcagtgccggtttctgcgctcctcataggtcccagcctaatttgtctgctctgagtatgccaaatctgtttgggcagatgcctatggggactcacacatcaccacttcagcccctcggtcctcctgccgtggccccttcgcgtatacggacgctgcctctcgcgaggagttctgccagggctgctgagacaaaacaggggttggcactgcgaccaggagatcccccactcctgcccccacgccctccccaaggccttgagccaaccttgcagcccagtgccccacagcaggcacgggatccatttgaggacttactgcagaaaactaaacaggatgtgagtcccagcccagcccttgcacctgccccagatagcgtggaacagttgcggaagcagtgggaaaccttcgagtag

SEQ ID NO: 220573 - DNA, 1191 bp, synthetic construct
  misc_feature 1..1191: note = Description of Artificial Sequence: Synthetic coding sequence
  source 1..1191: mol_type = other DNA
atggccgcagccccaagggaggagaagcgctggccccagcccgtctttagcaaccctgtggtgctttggaaattccctgaagactttggggaccaggaaatcctccagtccgtccccaagttctgtttcccatttgacgtggagagagtgtcccagaatcaagtgggacagcatttcactttcgtgcttacagacattgaaagtaaacagaggttcggtttctgcaggcttacatcgggaggcactatctgcctctgtattctctcctacctcccctggtttgaggtctactacaagcttctgaacactctcgccgattacctggctaaggaactcgaaaacgacttaaacgagacactgagaagcctgtacaaccacccagtgcccaaggccaacacccctgtaaatctgagtgtgcactcctatttcattgcacccgacgtgaccggcttgcctacaatccccgaatcccgcaatctaaccgagtactttgtggcggtggacgtcaacaatatgttgcaactatacgcctccatgttgcacgaacgacgcatagtgatcatctcatccaaactgagcactctgacagcttgcatacatggaagcgccgctcttctgtatcccatgtactggcagcacatatacatcccggtcctgcctcctcatctgctcgattattgttgcgctccaatgccctatctgatcggcatccacagtagtctgatagagagagtgaaaaacaagtccttggaagatgttgtgatgctcaatgtagacaccaacacgctggagagcccatttagcgacctgaacaatctgccaagcgacgttgtttctgcattgaagaacaagctcaaaaaacagtccacagcaactggagacggcgttgcaagggctttcctgcgcgctcaggccgctctgttcggttcttatcgcgatgcattacgatacaaacctggcgagccaattaccttttgtgaggagtccttcgtaaagcatcggagcagcgtgatgaaacaattccttgagacagccattaacctccaactgtttaagcagtttatagacggacgtctggcaaagctgaacgcgggacgcggattttctgatgtgttcgaagaagaaatcacatctgggggtttctgtgggggaaaggacaaactccaatatgactatccttttagccagtag

SEQ ID NO: 220574 - DNA, 1281 bp, synthetic construct
  misc_feature 1..1281: note = Description of Artificial Sequence: Synthetic coding sequence
  source 1..1281: mol_type = other DNA
atggattgtagaacaaaggccaaccctgatagaacattcgacctggtcctcaaggtgaaatgtcacgcgtcagaaaacgaagatccagtggttctgtggaagttccctgaggatttcggggatcaggagattctgcagtctgtgcccaaattctgctttccctttgacgtcgagagagtgtcccagaaccaggtggggcagcattttacgttcgtactgactgatatcgaatctaagcaacggttcggtttctgccgccttacatcaggcggtacaatatgtctctgtattctctcttatttgccatggttcgaggtatactacaagttgctgaacactctggcagactacttggctaaggaactcgaaaatgacctgaacgaaacattgcgatccctttataaccaccctgtcccaaaagctaacactccggtaaatttatctgttaatcaggagatattcatcgcctgtgaacaggtgctgaaggatcagcctgccctggtcccccattcctattttatcgcccctgatgtgactggccttcccactatccccgagagccggaacctgacagaatacttcgtggcagtagacgtgaacaacatgttgcagctatatgcctctatgcttcacgaacgcaggatcgtgatcatctcatctaagctttctactcttacagcatgtatccacgggtcagccgcactcctctaccctatgtactggcaacatatatacataccggtgctgccaccgcacttgctggattattgctgtgcgcctatgccttatctgattggaattcatagctccttaatagaaagagtgaagaacaaatccctggaggatgtggttatgctgaacgtcgacactaatacactagaaagccctttctcagatctgaataacctaccatccgacgtggtaagcgcgctcaaaaataagctcaaaaaacagtcaaccgccaccggagatggggtggctcgagcttttttgcgggcacaggccgcactgttcgggagctaccgggatgctctgcgctacaaacccggagaaccaataacattctgcgaggagtcattcgtgaaacatcggagcagcgtaatgaagcagttccttgagaccgccattaatcttcagctgtttaaacaatttattgacgggagactcgccaagcttaacgcaggacggggtttctcagatgtgtttgaggaggagatcactagcgggggattttgtgggggaaaggataagctccagtacgactacccatttagccagtag

SEQ ID NO: 220575 - DNA, 1191 bp, synthetic construct
  misc_feature 1..1191: note = Description of Artificial Sequence: Synthetic coding sequence
  source 1..1191: mol_type = other DNA
atggctgccgctccacgagaagaaaagcgctggccccagccagtgttctccaacccagtggttttgtggaaatttcctgaggactttggagaccaggagattctgcagtctgtgcccaaattctgcttcccctttgatgtggagagagtgtctcagaatcaggttggacagcatttcaccttcgtactaacagatatagaatctaagcagagatttggcttctgtagacttacttctggcggaactatttgtctatgcatcttatcttacctaccttggttcgaggtgtactacaagttgttgaacacattggctgattatttggcaaaggaactggagaacgatctgaacgagacactgcgtagcctctataatcacccagtccccaaggcgaacactcccgtgaacttaagcgttcatagctacttcattgccccagatgtaacaggactcccgaccatccctgagagtcggaacctcacggagtactttgtggcagtcgacgtgaacaatatgctgcagctgtatgccagcatgcttcacgaaagaaggatcgttataatttcgtccaagctttctacgctaactgcctgcatccacggaagcgcggctcttctataccctatgtactggcaacacatctatatcccggtcttaccccctcacttgcttgactactgttgcgcgcctatgccatatttgatcggaatacactcctccctgattgagcgagttaaaaacaagagcctggaagatgtggtgatgctgaacgtggacacaaatacactggaatcccctttcagcgaccttaacaatctgccatccgatgtggtgtcagcgctgaagaacaagctcaagaaacagagcactgccactggcgatggtgtcgcaagggccttcctgagagcgcaggccgctttattcggcagctacagagacgctcttaggtacaaacctggcgaacccatcactttctgtgaagagagttttgtgaagcaccggtcatccgtcatgaaacagtttttggagacagctattaacctgcagctgttcaaacagtttattgacggcaggttagccaaacttaacgcaggcagagggttctctgatgtatttgaagaggaaattacctcagggggattttgtggaggaaaagacaagctacagtatgactatcctttctcccagtag

SEQ ID NO: 220576 - DNA, 2268 bp, synthetic construct
  misc_feature 1..2268: note = Description of Artificial Sequence: Synthetic coding sequence
  source 1..2268: mol_type = other DNA
atcgaaaccaagacacgcgcaaacccagatcgaaccttcgacctcgtactgaaagtgaagtgccacgcttccgaaaacgaggatcccgttgtgctgtggaagtttcctgaggacttcggggatcaagagatcctgcagtctgttcctaaattctgttttccatttgatgttgagcgtgtgtcccaaaaccaggtcggacagcattttacttttgtgcttaccgatattgagtccaaacagcgattcggcttctgtcgactgacctctgggggtacaatatgcctctgcattctgtcctatttgccctggttcgaggtctactacaaactgcttaatacgctggcggattatttggcaaaggaactcgaaaacgatcttaatgagactctgaggagtttgtacaatcaccctgttccaaaggccaatacccccgtcaacctatctgtgcacagctacttcatcgcacccgatgtgactggcctccccacgattcccgaatcacgtaacttgactgagtactttgtcgccgtcgacgtgaacaacatgctccaattgtacgcgagcatgctgcatgagcggagaatcgtgatcataagtagcaagctgtcaaccctgaccgcctgtattcatggcagtgccgctctcctctatccaatgtactggcagcacatctacataccggtcctaccgcctcacttgctggactactgctgcgcccctatgccctatttgataggaatacacagcagcctgatagagagggtcaaaaacaaaagccttgaagacgtggttatgctcaacgtagatactaacacccttgaatcaccctttagtgacctgaacaatctgcccagtgatgtagtgagcgccctcaaaaacaaattgaaaaagcagagcacagccaccggcgatggggtagcacgcgcttttctccgcgctcaggccgctctgttcggctcttaccgagacgctctccgctacaagccgggagagcccatcacattctgtgaggaatcctttgttaagcacaggagtagcgttatgaaacaattcctggagactgcaattaacctccagctgttcaaacagttcatcgacggtaggctggccaagctcaacgcaggacggggatttagtgacgtctttgaagaggagataacctcgggaggattctgtggtggcaaccctcggtcctatcagcagtgggttcacaccgtgaaaaaaggcggagctctgttcaataccgctatgactaaggctactcccgctgtaaggacagcctataagttcgcaaagaaccacgccaaactcgggttgaaagaagtcaagagtaaactgaaacacaaggagaacgaagaggattacggaacttgttcttctagcgtccagtatactcctgtgtataaactgcacaacgagaaaggagggaactccgaaaagaggaaactggctcaagccaggttgaagcgtcccttgaagagtcttgacggcgcactctatgacgatgaggatgatgacgacattgagcgtgcatcgaaactcagtagtgaggatggtgaggaagcctctgcctatctgtacgagtctgacgatagtgtcgaaaccagggtgaaaaccccgtattctggcgagatggatttgttaggggaaatcctggatacattatccacacactcctctgatcagggcaagctggcagccgctaagtccctcgatttcttccgtagcatggatgatatcgattacaaaccaaccaataaatccaacgcgccatcagagaacaatctggcgtttctgtgcggaggaagcggcgatcaggcagagtggaacctgggtcaagatgacagcgcactacacggaaagcacctcccaccatccccgagaaaacgcgtgtcttcttctggacttaccgattcactattcattctgaaagaggaaaatagtaacaagcatcttggcgcagacaacgttagtgacccgacaagtggcctagatttccagctcacatcaccagaggtctcacagacagataaggggaaaaccgaaaagcgggaaactctgagtcagatctccgacgacctactgataccaggactaggaagacacagtagtacattcgtaccatgggaaaaagaaggcaaagaggctaaggagactagcgaggatattgggctgctgcacgaggtagtgtccctgtgccacatgacttctgatttccagcagagcctgaacatcagcgacaaaaacacaaacggcaaccagacttag

SEQ ID NO: 220577 - DNA, 2328 bp, synthetic construct
  misc_feature 1..2328: note = Description of Artificial Sequence: Synthetic coding sequence
  source 1..2328: mol_type = other DNA
atcgagacaaagactagggcaaatcccgacagaacatttgacttggtactgaaggtcaagtgtcacgcctcagagaatgaggaccccgttgtcctttggaagtttccagaagacttcggagatcaagagattttacagtctgtgccgaagttctgctttccatttgacgtggagcgggtatctcagaatcaggtaggccaacacttcaccttcgtactcaccgacatcgagagcaaacaacgctttggattttgtagactgacgtctggcggtacgatttgcctgtgcatactgtcatacttgccctggttcgaggtgtattacaagctgctgaataccctggccgactacctcgccaaagaactcgagaatgacctgaacgagacactccgttcgctttacaaccaccccgtccctaaggccaacacgcctgtgaatttatcagtaaatcaggagatctttatagcttgcgagcaggtactgaaggatcagccagccctggtgccacattcttactttatagctccagacgtgaccggcctgccaactatccccgagagcaggaatctgaccgagtactttgtggccgtcgacgtcaacaacatgctccagctttacgcgagcatgctgcacgagagaaggatcgtgatcatttcttccaaactttctaccctgactgcttgtatccacggcagtgccgcactcctgtaccccatgtactggcagcacatctatatcccggttctgccgccacatttgctagactactgctgcgcacctatgccttacttgatcggaatacactcttccctgattgaaagagtcaaaaataaaagtttggaggacgtggtgatgcttaatgtggatactaataccctggaatcaccattctccgatcttaacaatctgccttccgacgtggtgagcgctctgaagaacaaactgaagaaacagtctaccgctaccggcgacggcgttgccagggcctttctgagagcacaggccgctctctttggcagctatcgagatgcattgcggtacaagcccggtgagcctatcaccttttgcgaggagtctttcgtgaagcatcgatcctcagtgatgaagcagtttttggagaccgcaattaacctccaactcttcaaacagttcatcgacggcagattggctaaactgaatgccggaaggggcttcagcgatgtctttgaggaagaaatcacgtcaggagggttttgcggaggtaacccccgttcataccagcagtgggtccataccgtaaagaaaggtggcgctttgtttaacaccgcaatgaccaaggccacaccagcggtacggaccgcctacaagttcgcgaagaaccatgctaaactggggctgaaggaggtgaaatcaaagctgaaacacaaggaaaatgaagaggattacggcacttgttctagttctgttcaatacacccctgtgtataagctacacaatgagaagggcggaaacagcgagaagagaaagctcgcacaggccagactgaaacgacctctcaaatctctggatggggctctatacgatgatgaggatgatgatgatattgaacgagcttctaagttgtcatcggaggacggggaggaggcctcggcatatctgtatgagagcgatgacagtgttgaaacgagagtgaaaaccccttactctggcgagatggatttgctcggtgagattttggatacactgtccacccactcctctgaccagggtaaactggcggctgcaaaatcactcgatttctttaggtcgatggatgatatcgactacaaacccacaaataaatctaatgcgcctagcgaaaacaaccttgcattcttatgcggagggtcaggggatcaagctgaatggaatctgggtcaagatgatagcgctttgcatgggaagcatctccctccctctccgaggaaacgggtctcttcatctggactcacagactcgttgttcatcttgaaagaagaaaactctaataagcatctgggcgcagataatgttagtgaccccacgtcaggcctggacttccagctcaccagtcccgaagtaagtcagacagataagggaaaaactgaaaagcgcgagactctgtctcagatctccgatgatctgttgatcccagggctcggacgtcatagtagcacgtttgtgccctgggaaaaggaaggaaaagaagccaaagagactagcgaggatattggccttctgcacgaagttgtcagcctgtgccatatgacctcggattttcagcaatctctcaacatctctgataaaaacaccaacgggaatcagacatag

SEQ ID NO: 220578 - DNA, 1248 bp, synthetic construct
  misc_feature 1..1248: note = Description of Artificial Sequence: Synthetic coding sequence
  source 1..1248: mol_type = other DNA
gtgaagcacaggagctcagtaatgaagcagttcctggaaaccgcgattaatttgcagttgttcaaacaattcatcgatggacgactggctaagctcaacgctgggagagggttcagcgatgtgtttgaagaggagattacatccgggggtttttgcggcggaaaccccagatcgtaccagcagtgggtacacaccgtgaagaaggggggagcactgttcaacaccgctatgaccaaggctacaccagctgtgaggactgcctacaaatttgctaagaatcatgcaaagctaggacttaaagaggttaagagcaaattgaaacacaaagaaaacgaggaagactacgggacatgttcttcttccgtgcagtacactcctgtttacaagctgcataatgagaagggcggaaacagcgaaaaacgaaaactagctcaagctcggcttaaacgtcccctgaaaagcctggatggagccctttacgacgatgaggacgacgatgatattgaaagagccagtaagctgtcttccgaggatggagaagaggcctctgcttatctgtacgagtctgatgactctgtcgagacccgggtcaaaacaccatactccggtgaaatggacctgctgggtgagattctggatacccttagtacgcactcatctgaccagggcaaattggctgccgcaaaatccttggatttcttccggagcatggacgatattgactacaagcccaccaataaaagtaatgcccctagcgagaacaatcttgcttttctctgtgggggatccggtgaccaagcggagtggaatctcggacaggacgacagcgcactgcatggcaagcatctccccccatccccgaggaaaagagtgtcatccagcggactgactgattctctgttcatattaaaagaagagaattccaacaagcatctgggcgctgacaatgtctccgaccctacctctggactggactttcaacttacctccccagaggtgagccagactgacaagggcaaaaccgaaaaaagagaaaccctgtcgcaaatctccgacgacttgctgatccccggacttgggcgacacagcagcacctttgtcccatgggaaaaggaagggaaggaggccaaggagacaagtgaggacataggcctactgcatgaagtggtgtcactatgtcacatgacaagtgattttcagcagtccctgaacatttcagataagaacaccaacggaaaccagacctag

SEQ ID NO: 220579 - DNA, 2406 bp, synthetic construct
  misc_feature 1..2406: note = Description of Artificial Sequence: Synthetic coding sequence
  source 1..2406: mol_type = other DNA
atggagtcacgggcagaaggcggaagccccgcagtgttcgactggttctttgaagccgcatgtcctgctagtcttcaagaggacccaccaatcttgcggcagtttccaccagattttagagaccaggaggcaatgcagatggtgcctaagttctgctttccattcgatgtagaacgagaaccaccaagccctgcagtacaacatttcaccttcgccttaacggacctagcagggaacagaagatttggcttctgtcggctgagggccggaacccagagctgtctttgcattctgtcccacctgccatggttcgaagttttttacaaattactaaataccgtaggcgatctgctggcacaagaccaggttacagaggccgaggagctactccagaacctgtttcagcagtccctgagtggtccccaggcgtctgtgggtctggagttgggatcaggagtgactgtttcaagcggacagggaattcccccacccactcgaggaaacagcaaaccgctgagctgtttcgtggccccagattccgggaggttgcccagcattcccgaaaaccggaacctcacagaactcgtggtggcagtgacggatgaaaatatcgttggcttgtttgccgcacttctggcagagagaagagtcctcctgacagcctcgaagttgtccacactgacatcctgtgtacacgctagttgcgccctactgtaccccatgcgctgggagcacgtgctgattccgactctgcctcctcatttattagactattgctgtgccccaatgccctacttaattggcgttcacgcctctctagctgagcgggtgcgcgaaaaggcgttggaggatgttgtggttctgaacgtcgacgctaacactctggagactactttcaatgatgttcaggcccttccccctgatgtagtcagcttactgcgcctaagattgcgaaaagtcgcgctggccccaggagagggtgtcagccgtctgttcctgaaagcccaagctcttctattcggcggttatcgagacgcccttgtttgctctccagggcagcctgtgaccttctctgaagaagtatttctagcccagaagcctggcgctccactgcaagcattccaccggcgtgccgtgcacttacaacttttcaaacagttcattgaggccagactggagaagctgaataagggcgaaggtttttcggaccaattcgagcaggagattactggatgtggagcgtccagcggagctctgcgctcttatcagctttgggccgacaacttaaagaaggggggtggggctctgctacattctgtgaaggccaagacacagcctgccgtgaaaaatatgtaccggagtgccaagtctggactaaagggcgtgcaatcactgcttatgtacaaggatggcgatagcgtgctgcaaagggggggaagtctgcgcgcacccgctttgccttctcgctccgaccgactgcaacagcgactgcccattactcaacatttcggaaagaacagacctctgagaccatcccgtcgtaggcaactcgaagagggcacaagtgagccgccaggcgctggtacccccccacttagcccagaggatgaaggctgcccttgggccgaggaggctttagatagctctttcctaggcagcggggaggagctggacctgctgagtgaaatcctagattccctaagcatgggcgcaaaaagcgccggaagcctgcggccatctcagagtcttgactgttgtcaccgcggagacctcgattcatgtttttctctgccaaacatccccaggtggcaacccgatgataagaagctgccagaacctgagccacagccgctctcgctgccctcactccaaaacgcttcctccttagacgccactagtagctccaaggatagtagaagccaactcatacctagcgagagcgaccaggaagttacctcaccttctcagtcttctaccgccagcgccgatccaagcatatggggggaccccaagcccagccccctgaccgaaccgttaatcttacatcttaccccatcccacaaagcggcagaggattcgactgcccaggaaaatcccactccctggctcagcaccgctccaactgaacccagcccaccagagtccccgcagattttagctccgactaagcccaattttgatattgcgtggacaagtcagccgctggatccctcttcggacccctcctccttagaagacccccgagccagacccccaaaagccctcctggcggagcgggctcacctgcagccacgggaagagccaggggctttaaattcccccgcaacacctacatctaactgtcagaaaagccagccaagtagtagaccacgtgtcgctgacctgaaaaaatgtttcgagggatag

SEQ ID NO: 220580 - DNA, 2274 bp, synthetic construct
  misc_feature 1..2274: note = Description of Artificial Sequence: Synthetic coding sequence
  source 1..2274: mol_type = other DNA
atgcagatggtgcccaagttctgtttccccttcgatgtggaacgggaaccgccaagtcccgctgtgcagcatttcaccttcgccctgactgacttagcaggcaatcgacgttttggcttttgccgcttgcgtgccggaactcagagttgcctgtgcattttatctcatcttccctggttcgaggtattctataagctgcttaacacagtgggcgatttgcttgcgcaagaccaggtcacagaagctgaagaactactacagaacctctttcaacagtctctttctggcccacaggcaagtgtgggactagagttgggatctggcgtgaccgtcagtagcggacagggtattccgccacctactcggggaaacagcaagcccctctcatgttttgtcgcaccggacagcggcagactcccaagtatccccgagaaccgaaatctcacggagttggtggtcgccgtgaccgacgagaatatcgtgggactattcgccgctctgctggccgaacggagagtcctgctcactgccagtaaactttcaactctgacgagctgtgtacatgcttcatgcgcactgctgtaccctatgaggtgggagcatgtgctgatccctactcttcccccacaccttttagactattgttgtgcccctatgccatacttgataggcgttcacgcttcactggccgaacgggtccgagaaaaagcgctcgaagatgtggtagtgctcaacgtggatgccaacacacttgagaccacattcaatgacgttcaagctctgcctcccgacgttgtctcacttctgcgcctcagattgcgcaaggtggcgctcgctcccggtgaaggggtgtcgaggcttttcctcaaggcacaggcactgctttttggcggataccgggacgctctggtctgttccccgggtcagccagtcacctttagcgaggaggtatttctcgcgcagaaaccaggcgcaccactgcaggcgttccacagacgggctgttcatcttcagctgtttaagcagtttattgaagctcgcctggagaaactgaataaaggtgaagggttcagcgaccagttcgagcaagagattaccggatgcggcgcatcttcaggggctctgagatcatatcagctttgggccgataacctaaagaaaggcggaggagccttactccatagtgtgaaagcgaagacccaacccgcagttaaaaatatgtaccgaagcgccaaatccggcctgaaaggcgtacagtctctgttaatgtacaaagacggcgactcagtgctgcagcggggagggagcctgcgagcaccagcactccccagcaggtctgatcgtcttcagcaaaggctgcccattacccaacacttcggaaaaaataggccattacgaccatcacggaggagacagctcgaggagggtacctccgagccacctggcgctggcactcccccattaagccccgaggatgaggggtgcccatgggcagaagaagcactcgacagctcctttctcggaagtggggaggagttagatctgttaagcgaaattctggatagcttatctatgggggcaaaatctgcaggtagcctgaggcccagccagagccttgactgctgtcatcggggagacctggactcatgcttctcactgcccaacatccccagatggcagccagatgataagaagcttcctgagccagagccgcagcccttgagtctgccatccttacagaacgcatcttcactggacgcaacctcatcctccaaggattcacgaagtcagttaatacctagcgaatccgatcaagaggtaacctccccgagtcagtctagcacagcctctgccgatccaagtatttggggtgatcccaagccgtctccgctcacagaacctctcatcctccacctgaccccgtcccataaagccgctgaagattctaccgctcaggagaatcccacaccctggctgtccaccgcccctacagaaccaagccccccagaatccccccaaatcttggcccctactaagcctaattttgatatagcgtggacttcccagcccttagacccttcctcggatccctcatccctagaggatccgagagcgcgtccccctaaagcccttttagccgagagggcccacctccaaccacgcgaggagcccggtgctctgaactctcccgcaacccccacttcaaactgccagaaaagccagccgtcaagtcgaccacgcgtggccgatttgaagaagtgctttgaaggctag

SEQ ID NO: 220581 - DNA, 2193 bp, synthetic construct
  misc_feature 1..2193: note = Description of Artificial Sequence: Synthetic coding sequence
  source 1..2193: mol_type = other DNA
atgctgttcaatagcgtccttcggcagccccagctcggcgtgctgagaaacggttggtcaagccagtaccccctacagtcactgctcacgggatatcagtgctccggaaatgatgagcacacatcatacggggaaacaggggtccctgtgccgccttttggttgtacattttctagcgcgccaaacatggagcacgtgctggccgtggccaacgaagaaggttttgtgcgcctttacaacactgagtcacagtcttttaggaagaaatgcttcaaggaatggatggcgcattggaacgcggtcttcgaccttgcttgggtgccaggggaactgaaactggttaccgcagctggtgaccagacagccaaattctgggatgtgaaggcgggagaattgatcggcacttgcaaaggacatcagtgctctctcaagagcgtagcatttagcaaatttgagaaagcagtgttctgcacgggaggccgtgatggcaatataatggtttgggatacgcggtgcaataagaaagatggattttataggcaagtcaaccagatctctggagcacacaacacatcagataagcagactccctccaagcccaagaaaaagcagaacagtaagggcctggccccttctgtcgatttccagcagagcgtcactgtggtgctattccaagacgaaaatacgcttgtcagcgccggagctgttgatggtatcatcaaggtctgggatctccgcaaaaactataccgcgtaccgacaagagccaatagcgagtaagtccttcttatacccgggatccagtactagaaaattgggatactcttccctcattctcgatagtactggtagcactttgtttgccaattgtacagatgataatatttatatgttcaatatgaccggcctgaaaacttcacccgtcgccattttcaacggacaccagaatagcactttttacgtgaaaagctctctttctcctgacgaccaatttttggtatcaggtagctcggatgaggcagcctacatctggaaggtctccacaccatggcagcctcctactgtgcttttggggcactctcaggaagttacatccgtctgttggtgccctagcgatttcacaaagattgccacgtgctcagacgataatactctgaagatttggagactgaaccggggtttagaagagaagcctgggggtgataagctttcaacagtgggctgggcgtcacagaagaagaaggaaagccgccctggactagtcaccgtgacgagctcccagtccacaccagccaaggcccctagggcaaagtgcaatcccagtaacagctccccatcaagtgctgcttgcgccccttcctgcgccggtgatcttccattgccaagtaacacgccaacgttttcaatcaaaacatctcccgcaaaggctcggtcccctattaacaggcgcggatccgtgtctagcgtcagtcccaagcctccttctagcttcaagatgagtatcaggaactgggttaccagaaccccttcatcatcccctccaatcactccacccgctagtgagaccaagatcatgtcccctcggaaggcattgatccctgtctctcagaagtcatctcaagcagaggcttgctctgagagcagaaacagagtgaagcggagactggatagtagctgcctggagtccgtgaagcaaaaatgcgtcaagagttgtaactgtgtaacagagcttgacgggcaagtggagaacctacacttagacctatgctgccttgccggaaatcaggaagatctatctaaagactccctaggaccgacgaaaagcagcaagatcgagggcgcaggcacaagcattagcgagccaccctcccctataagtccatacgcttcagagtcttgcggtaccttacctctgccgcttaggccatgtggagaggggtcagagatggtggggaaggaaaacagttcacccgaaaacaaaaactggcttctcgccatggccgctaaacggaaggctgaaaatccctcccccagatctccatcctcacagaccccgaatagcaggcgccaaagtggcaagaagctgccttctcccgtcactataaccccatcctccatgcgtaagatttgcacttactttcatcgaaagagccaggaggacttttgtggtcctgaacattccactgaactgtag

SEQ ID NO: 220582 - DNA, 1230 bp, synthetic construct
  misc_feature 1..1230: note = Description of Artificial Sequence: Synthetic coding sequence
  source 1..1230: mol_type = other DNA
atgttgttcaactccgtcctaagacagcctcagctgggcgtcttgcgcaacggatggtcctcccagtaccccctgcagtctctgctgaccggctatcaatgcagcggtaacgatgagcacacttcatacggagagactggtgtgccggttcccccattcgggtgcacgttctcatccgatgataacaccctcaagatctggaggctgaataggggcctggaggagaagccgggaggtgataagctgagcacagtcggatgggcatctcagaaaaaaaaggagtcccgtcccggattggtcaccgtgactagctcacagagtacgcccgctaaagcccctcgcgctaagtgcaatccttccaactcttctccttcatctgccgcttgtgcaccatcatgcgctggcgatctccctttgccatctaacactccaactttctccataaagacaagcccagcgaaggctcggagtcctatcaacaggcgagggtcagtgtctagcgtcagcccaaaaccaccatcctcgttcaagatgtcaatccgtaactgggtgacgaggacacctagctcaagtcccccaataactccaccggcttcagaaaccaagattatgtcgcccaggaaggccctgatccccgtctcacaaaaatcctcccaggccgaggcctgctccgagagcagaaacagggtgaaacggaggctggactcatcctgtcttgaatccgtcaagcagaagtgtgttaaaagttgcaattgtgtgactgagctggacggccaggttgaaaatcttcacttggacctgtgctgccttgctggcaatcaggaggatttgtccaaggactctttgggacctaccaaatcaagcaaaatcgagggcgcagggaccagcatttctgagcccccttctccaatctcaccctatgctagcgagagctgtggaactctccctctgccactgcggccatgtggggaagggagtgaaatggttgggaaggaaaacagtagcccagaaaataaaaactggctgctagccatggcagccaagcggaaggccgagaacccaagtcctcgatccccctcctcacagacccccaatagccgcagacagtccggaaaaaagctcccgtcacctgtgacaattaccccttccagtatgcggaagatatgcacatactttcacaggaaatctcaggaagacttttgcggtccagagcactcgactgaactgtag

SEQ ID NO: 220583 - DNA, 2067 bp, synthetic construct
  misc_feature 1..2067: note = Description of Artificial Sequence: Synthetic coding sequence
  source 1..2067: mol_type = other DNA
atgctgttcaattcggtgctgagacagcctcagctcggggtgctcagaaatgctcctaacatggagcacgtgctggccgtggccaacgaagaggggtttgtgcggttgtacaacaccgagagtcaaagcttcaggaagaaatgcttcaaggagtggatggcgcattggaatgctgttttcgaccttgcatgggtgcctggtgaactaaaactcgtgaccgctgcaggtgaccagactgctaagttttgggacgtgaaggctggagaactgatcgggacttgcaaaggccatcagtgcagcttaaaaagcgttgcctttagtaaattcgagaaagcagttttctgcaccggcggacgcgacggtaacattatggtgtgggacacaaggtgcaacaaaaaagatggattttataggcaagttaaccaaatcagcggagctcacaacacttccgataagcagacgccaagcaagcctaaaaaaaaacagaactccaagggacttgccccaagcgtcgacttccagcagtccgtaacggtggtgctctttcaggacgagaatacactcgtatctgctggtgctgtggacggcataataaaggtttgggacctgcgaaaaaactacacagcctacagacaggaaccaattgcttccaaatctttcctctatcccggaagtagcacaagaaagctgggctactcatcccttattctggactcgacaggcagcactctgttcgctaactgtacagatgataacatctacatgttcaatatgacagggctcaagacatcgcctgtcgctatcttcaacgggcatcagaattccacattttatgtgaagtcttctctgagtcctgatgaccaattcctagtcagcggatcttctgacgaggcagcctatatctggaaggtgagtactccttggcagcctcccaccgtccttctcggccatagccaggaggtgacatccgtctgctggtgcccatccgactttactaaaatcgccacttgttctgatgacaataccctaaagatatggagactgaacaggggcctggaagagaagccaggcggagataaactctcaactgtgggatgggccagtcagaagaagaaggaatcacgacctggactggtgacagtgacctcttcccaatctaccccagcaaaggcacctcgggctaagtgtaacccctcaaactcatccccttcctcagctgcgtgtgcacccagttgcgccggtgatctgccactgcctagcaacacacccaccttctcaatcaaaacctcacccgcaaaagcccgtagcccaataaaccgcagggggtctgtatccagtgttagtccaaaaccaccatcctcctttaagatgtctatccggaattgggttacccgtaccccgtccagcagcccccctattactccacctgcgagtgagaccaaaattatgagccctcggaaagccctcatccccgtgagtcagaaatctagccaggccgaagcatgctctgaatcgcggaaccgggtgaagcgacgcttagactccagctgcttagagagcgttaaacagaaatgcgtcaaaagctgtaattgcgtcaccgagctggacggccaagtggaaaatctgcatttagacctctgttgtctcgccggaaaccaagaggacttatcaaaagactctctgggcccaactaaatccagtaaaatcgagggagcgggaacatccatatcggaacccccatcaccaatctcgccatacgctagtgagtcttgcggcactcttccacttccactgcggccatgtggggaagggagtgagatggtcggaaaggaaaattcatccccagagaacaaaaactggctcttagccatggctgccaaaaggaaagccgagaaccccagtcccaggagcccctcaagccagacacctaacagccgcaggcaatctggcaaaaagctccctagccccgtcaccattactcccagctccatgagaaagatttgtacttacttccaccgaaaaagccaagaagacttttgtggcccagaacatagcactgaactttag

SEQ ID NO: 220584 - DNA, 1494 bp, synthetic construct
  misc_feature 1..1494: note = Description of Artificial Sequence: Synthetic coding sequence
  source 1..1494: mol_type = other DNA
atgaagattagtatccttttgatgttcctgtggggtctgtcttgcgcattgccagtaactcgctaccagaataatgagagtgaggatagcgaggaatggaaagggcacctcgcccaagcacctactcctcctctggcaaacgaggaccccagcgacagcacacaatctgaggaaggtttggggagcgatgaccaccagtatatttatagactggctggaggattttcgagatctaccgggaaggggggagacgataaagacgatgacgaggatgactcaggcgacgacaccttcggagatgacgactcaggacctggccctaaggatcgccaggaaggcggtaacagcaggctgggatctgatgaagacagcgatgatacgattcaggcttctgaggagtcagcaccacagggccaagactctgcccaagacaccacttctgaatcccgggagctggataatgaagaccgtgtggatagcaaaccagagggaggggattcaacacaggagtctgagtctgaggagcattgggtaggagggggtagtgacggcgagagtagccatggcgacggatctgaacttgatgacgaggggatgcagagcgacgacccagaatccatacgttctgaacggggaaacagccggatgaattctgcaggcatgaagtccaaggagtcaggagaaaactccgagcaagcaaatacccaggactccggcggatcccaactcctggagcatcccagccgcaaaatcttccggaagtcccggatctctgaggaggatgatcggtcagaacttgacgacaataataccatggaggaagtgaaatcagatagtactgaaaattcaaatagcagggataccggcctctcgcagcctcgacgcgattccaagggggacagtcaggaggactccaaagagaatctttctcaggaagagagccagaatgttgatggccctagttcagagtcaagccaggaagcaaacctgagtagtcaggagaactcctctgaaagccaggaggaagtggtatcggagagtagaggcgacaacccagatcctacgacctcttacgtggaagatcaggaggattctgactctagcgaggaggattcctctcacactttgtcccacagcaagtccgagtccagagaggaacaggcagactcagaatcctcagagagtctgaacttctccgaagaatctccagagagccccgaagacgaaaattcctcctctcaggaagggctccaaagtcacagttcctccgctgaatcccagagcgaagagagccactccgaagaggatgacagcgacagtcaagatagctctcggagtaaggaagattcaaattctaccgaatcaaagtctagttccgaagaggatgggcagctgaagaacatcgagatcgaaagtcgcaagcttaccgtggatgcttaccacaataagcctattggcgaccaggacgacaatgactgtcaagatgggtactag

SEQ ID NO: 220585 - DNA, 1542 bp, synthetic construct
  misc_feature 1..1542: note = Description of Artificial Sequence: Synthetic coding sequence
  source 1..1542: mol_type = other DNA
atgaaaattagcatcctgctcatgtttctgtggggtctcagttgtgcccttccggttactaggtaccagaataatgaatctgaggacagcgaagagtggaagggccatttagctcaagctccgacacctccactggagtcctctgagtcctctgaaggctcaaaagtaagttccgaagagcaagctaatgaagatccaagtgactccacacagtctgaagagggcctaggatctgatgaccaccagtatatctacagattggcgggtggattttctaggagtacaggaaaagggggtgatgacaaagacgacgacgaggacgactctggagatgacacctttggggatgacgatagcggcccaggcccaaaagatagacaggagggaggcaacagccgtttgggttccgacgaagacagtgatgatacgattcaggcatccgaagagagtgcgcctcagggccaggacagcgctcaggacacgacctccgagtctagagagctggataacgaagatcgggtggactccaagccagaggggggagattcaacgcaagagtccgaatccgaggaacactgggttggcggaggctctgacggggaatctagccacggggacggttctgaactagatgatgagggaatgcagagtgacgaccctgaaagcatccgctccgagcgcggtaatagtcgcatgaattcagctggaatgaaaagtaaagagagcggagagaactccgaacaggcgaatacccaggattctggtggatcacagcttcttgagcacccctcccggaagatatttcgcaaatcgagaatttctgaggaggatgatcggtcagagctcgacgataacaacacaatggaggaagtcaagtctgacagcaccgagaacagtaactccagggacaccggattgtcgcaaccgagaagggattccaagggtgactcacaagaggacagcaaggaaaacctttcccaagaggagagtcagaacgttgatgggccttcgagcgagtcctcccaggaagcaaacctgtcttcccaggaaaatagctcagagtcccaggaggaagttgtctccgaaagtagaggggacaatcccgatcccacgactagctatgtcgaggaccaggaggattccgatagcagtgaggaggactcgtcccacactctgtcccactctaagagcgagtctcgtgaggagcaagccgactctgagagttctgagagcctgaacttttctgaggaatcccctgaaagtcccgaggacgaaaacagcagcagccaggagggcctgcagtcacatagcagcagtgccgaatctcagagtgaagaatcgcactctgaagaggacgatagcgatagtcaggattcgagtagaagcaaggaggacagcaacagtacagagagcaaaagcagtagcgaggaggatggacagctgaagaatattgagatcgagtcccggaaactcacggtggatgcataccacaacaagccgatcggcgaccaagatgacaatgattgccaggacggctattag

SEQ ID NO: 220586 - DNA, 3906 bp, synthetic construct
  misc_feature 1..3906: note = Description of Artificial Sequence: Synthetic coding sequence
  source 1..3906: mol_type = other DNA
atgaagataattacatatttttgcatctgggcagtggcatgggcaataccggttcctcaaagtaagcctctggaacgacacgtggaaaagagcatgaacttacatctgttggccaggtcaaatgtgtcagtacaggatgagctcaatgccagtggaacgattaaggaatctggagtgctggtgcacgagggagaccgcggaagacaggaaaatacccaagacgggcacaaaggagagggcaacgggagcaaatgggcagaggtggggggtaagagtttcagcacttatagcacccttgcaaacgaagaaggcaacattgagggatggaacggcgataccgggaaggccgagacctacggtcacgacggtattcatgggaaggaagaaaacatcactgcaaacggcatccagggtcaggtgagcatcatcgataatgcgggagcgactaaccgcagcaacactaacggtaatacggataaaaatacgcagaatggagacgtcggcgacgcaggtcataatgaggatgttgccgtggttcaggaggacgggcctcaggtcgccggatcaaataattctactgacaatgaggacgaaatcatcgaaaattcttgcaggaacgaaggcaatacatctgaaatcacaccacagataaacagcaagaggaacgggacgaaagaggccgaggtcacgcctggcactggggaagatgccggactggacaactcagacggctcccccagcgggaacggggctgacgaggacgaagatgaaggcagcggagatgatgaggacgaggaggccggtaacggcaaagacagttcaaacaattccaagggacaagaagggcaggatcacggcaaggaagacgaccatgactcctccatcggacagaattctgacagtaaggagtactacgatccagaggggaaggaagatcctcacaatgaggttgatggagataaaacctcaaaatccgaggagaatagcgcaggtattcctgaagataatggatctcagcggatagaagatacccagaagctgaatcaccgggagtctaaacgcgtcgagaatcgcatcaccaaggagagcgaaacccacgcagtcggtaagagccaagacaagggcattgagatcaaaggaccctcaagtggcaaccgaaatatcaccaaggaagtgggaaaagggaacgagggtaaagaggataaaggtcagcacggaatgatactgggcaaaggcaacgtgaagactcagggagaagtggtgaatatcgagggcccaggccagaagagcgaaccaggaaataaggttgggcattccaacactgggagcgactcaaattctgacggttacgacagttacgacttcgacgataagtcgatgcaaggagacgatcccaactcctccgacgagtctaacggtaacgacgacgcaaactcagagtctgataacaactcaagcagcaggggtgatgcgagctataatagcgatgaaagcaaggacaacggcaacgggtctgactccaaaggggcagaggatgatgatagcgatagtacgtcagataccaacaattcagacagcaacggtaacgggaacaacgggaatgacgataatgataaatctgactctgggaagggaaagtcggatagttcagacagtgatagctccgacagttctaacagctccgattctagtgactcatctgattcagactcgtctgacagtaacagctcctcggactcagattcgagtgactccgactcgagcgatagcagcgattctgatagctctgatagctctaattcctcagattcaagcgactcctcagattcttcggattctagtgatagcagcgattccagtgactccaaaagcgactccagtaaatcagaatctgattctagtgacagcgattctaagagcgatagctcagacagtaactcttccgacagttcagacaactcagatagcagcgattcgagcaactcaagcaattcctccgattcctctgacagctccgatagctccgactcatcatccagctcggactcctcaaattcttccgatagcagtgacagctccgattcatcgaattctagcgaaagctccgattcgagtgatagtagtgattctgactctagcgattcttccgatagtagcaatagtaatagcagtgattctgactcctcaaatagctccgacagctccgacagctctaattcctctgactctagtgattcatccgattcatccaactctagcgacagttctgattcttccgacagcagcaactcttccgattcaagcgatagttccgactcttccgacagttccgactcttccaatagctctgatagcaacgactcatctaattccagtgacagctctgatagcagcaactcttcagattctagcaactcatctgatagttcggacagcagcgattccagcgactcggattccagcaacagcagcgatagtagcaacagtagcgactcatctgactcatccaactcatcagatagtagcgattctagtgatagctccgatggatctgattctgattcttccaacagatcagactctagcaactcctcagattcatcagattcctctgacagttccaactcaagcgactcaagcgatagttctgacagcaacgagtcgtccaacagcagcgactctagcgatagctctaattctagcgactccgattcttcagattcaagtaactcctcggattcgtccgatagtagcaacagctccgattcttctgaatcctcaaactctagtgataactccaactcaagcgattcttcaaattcgtctgattccagtgattcttccgatagtagtaatagcagtgattcctctaactccagcgactccagcaattctagcgactcctcggactccaatagctctgatagctccgatagcagtaatagttcagattcttccgacagcagcgattccagtgacagtagcgattcgagcgactcttctaactccagcgacagcagcgactcttctgattcatcagattccagcaacagctctgacagctccaacagctccgactcatctaatagtagtgattcttcagactcatccgatagctctgactcctccgactcgtcagattccagcgactcaagtgactcaagcaacagctccgattccagcgactcatctgattcaagcgactcctctgatagctctgactcaagcgactcttcagacagctccgagtcctcagattcatcagacagctctaattcttctgattcttccgactcctccgactcctctgattcgtctgactcgtctgattcatctgacagcagcgactcatcagacagctctaatagttcggactcctcggactcctccgacagctctgatagctcggattcttccaactccagcgattcgtctgacagcagtgagtcctcagattcttccgacagttccgacagcagcgactcttctgattcctccgacagctcggactctagcgattcctcagacagtagcaactccagtgattccagcgactcctctgattcttctgacagctcagattccagtgatagctctgactcttcagattcctctgactccagcgatagctcagacagctcagactctagtgactcttctgattccagtgatagttcggatagttctgatagtaacgaatcatcggatagctcagattcgtccgatagtagtgactcttctaattctagcgattcaagcgattcctccgattcctctgactctacaagtgattcaaacgatgaatcggacagtcagtccaaaagcggcaatggaaataataacgggtcggacagcgacagcgatagtgaaggctcagattcaaatcactctactagtgacgactag

SEQ ID NO: 220587 - DNA, 3906 bp, synthetic construct
  misc_feature 1..3906: note = Description of Artificial Sequence: Synthetic coding sequence
  source 1..3906: mol_type = other DNA
atgaaaataatcacgtatttctgtatctgggccgtggcctgggcaatacctgtgccacagagcaagcctcttgagcgccacgtggagaagagtatgaaccttcatttgttagctcggagcaatgtatccgtccaagatgagctcaacgcgtccggaacaattaaggagtccggtgtgttagtacacgagggcgatcgtggtaggcaggagaacactcaggacggccacaagggggaggggaatgggtccaaatgggcagaagtgggaggtaagtcattttcaacctatagtactctggccaacgaagagggaaacatagaggggtggaacggggacacagggaaggctgagacttatggccacgacggcattcatgggaaagaggaaaacataaccgcaaatgggattcaaggacaggtatctatcatcgataacgccggagccaccaatcggtcaaatacgaacgggaacaccgacaaaaatacccagaacggagacgtgggagacgctgggcataatgaagatgtcgccgtggtgcaagaggacggacctcaggtggcaggatctaacaattccacagataacgaagacgagattatagagaactcttgcagaaacgagggaaacactagcgaaattactccccaaattaatagcaagcggaacggcacgaaagaagccgaggtgacgcccggaacgggcgaggatgcaggcctcgataacagtgatggaagtccgtccggcaatggtgccgatgaagatgaggacgaaggctccggagatgacgaggatgaggaagccggaaatggcaaggatagctctaataacagcaagggacaggagggccaagaccatgggaaggaggatgatcacgactcgagcattggacagaactcggacagcaaggagtattacgatcccgaaggtaaggaagacccacataacgaggtcgatggcgacaaaacctccaaaagcgaagagaactccgccggtataccagaggacaacgggagccagcgcatcgaggatacacagaagttaaaccaccgtgagagtaaacgagtcgaaaacagaattaccaaggaaagcgaaacccatgctgtgggcaaatctcaagacaaaggaatagagattaaggggcctagcagcggcaacaggaatattactaaagaggtgggaaaggggaacgagggaaaggaagacaagggtcaacacggcatgatcctcggcaagggtaacgttaagacccaaggggaggtggttaatatagaaggaccgggtcaaaagtctgagcctggcaataaggtcggacactccaacacggggtctgacagcaactccgacggctacgattcctatgattttgatgacaaatcaatgcagggggacgaccctaatagctccgacgagtctaatggtaatgacgacgctaacagtgagagtgacaataacagttcctcccgcggtgatgcttcttacaacagcgacgagagtaaggataacggcaacggatctgattctaagggagcagaggacgacgactccgattccacaagcgacacgaacaatagcgattccaacggaaacggcaataacggaaatgatgacaatgataagtccgactccggaaagggcaagtcagatagttccgactctgattcctctgactcgtccaattcttccgattcctctgattcatctgattctgacagctcagactctaatagttctagcgatagcgatagcagcgattctgacagctccgactctagtgatagcgatagcagtgattcttctaattcctccgatagctccgactcttctgactcttctgatagcagtgactcctccgactcaagtgacagtaaatccgatagtagcaagagtgaatccgatagctccgatagcgattcgaagtcagactcttccgatagcaattcctccgattctagcgacaattcggactcttctgattcaagcaactccagcaatagtagcgacagttcagactcctccgactcatcagactccagttcttcttccgactcgtccaattcttccgatagttccgacagctccgatagttcaaactcatcagaatcaagcgattcatccgactcttcagactccgattccagtgatagtagtgactcttcgaattccaacagctctgattctgacagctctaactcatccgacagttctgacagctccaactcaagcgacagttctgattcttccgactcatccaacagcagtgactctagcgattcaagtgattcatccaatagctcagactcctcagattcctcagactcctccgattcatcagacagcagcaattcaagcgacagtaacgattcgtccaactcgtcagactcgagtgatagttccaactcctctgattccagcaattcttctgactcttcagattcgagcgacagttctgattccgactcatctaattcttccgactcctcgaactcaagcgatagcagcgacagcagtaactccagcgactctagcgattcctcggactctagtgatgggtcagattcagacagttctaaccgcagcgactccagtaacagtagcgactcatcagacagtagcgactcgtccaactcctcagattctagcgacagctctgactcaaatgagtcctctaactcttccgacagctctgactctagtaacagctctgactctgattcatctgacagttctaattcttccgattcctcagactcctctaatagctccgacagttctgagtcaagcaactcctcagataactcaaattcaagtgatagctcaaacagctcagactcaagtgatagctccgattcgagtaacagtagcgatagcagcaactcttccgattcctctaacagtagcgattctagcgatagcaattctagcgactcgtccgattcgtccaatagtagcgacagcagcgatagttccgattcctccgattcttccgattccagcgactccagtaacagtagcgattcttctgactctagcgactcctccgattcttcaaacagtagcgattcatccaacagctccgacagctctaattccagcgactcttccgattcctccgattccagcgattcttcagacagcagtgattcttctgattcgtccgactcctctaactcttccgactcatctgattccagcgatagcagtgacagtagtgactcctcagacagctcagattctagcgactctagcgaaagttccgactcttcggatagcagcaattcctccgatagttccgatagctccgacagcagcgatagctcagacagctctgacagctccgacagctcagatagctcagatagcagtaacagttctgactcatcggatagttccgacagcagcgattctagcgacagctctaacagttctgacagtagcgattccagcgagtcctctgactcctcggactcaagcgactcttccgattcctccgatagttccgacagcagcgactccagtgatagttctgatagctccaattcctctgattcgagcgatagctccgactcaagcgattcctccgacagcagtgactcgagcgactcgtcagactcctctgatagcagcgatagcagcgattctagcgattcgagtgatagcagtgattcttccgactccagtgactcatccgatagtaacgagagttccgatagtagtgattcgtcagactccagtgattcttcaaactcttccgacagcagcgatagttcagattcaagcgattctacctccgactctaacgatgagagcgactctcagtctaagtccggcaatggcaacaataacgggtcagactctgatagtgactccgaaggctccgatagcaaccacagtacctccgatgactag

SEQ ID NO: 220588 - DNA, 783 bp, synthetic construct
  misc_feature 1..783: note = Description of Artificial Sequence: Synthetic coding sequence
  source 1..783: mol_type = other DNA
atggcaacccccccaaagagatcatgtccatcgttctctgcttcctcagaaggaacacgtatcaaaaaaataagcatcgagggaaatatcgctgctggtaaaagcaccttcgtgaacatcctaaagcagctgtgtgaggactgggaggtagtacccgagccagtggcacgttggtgcaatgtgcagtcaacccaagacgaatttgaggagctgactatgtcccagaagaacggcggaaacgtgttgcagatgatgtatgagaaacctgagcggtggagctttacttttcagacctatgcatgcctgagccggatccgcgctcagctggcttcactcaatggtaagctgaaggacgctgagaagcctgtgctatttttcgaacggtctgtgtacagtgaccggtacattttcgcaagcaatctctacgaatctgagtgtatgaatgagactgaatggaccatctaccaagactggcatgactggatgaacaatcagttcggacagtctctcgaattggacggaattatctacctgcaagccacacctgaaacctgtctccacaggatctatctgaggggacgcaatgaggaacagggcattccgcttgagtacctggagaagctacattataaacatgagtcttggctcttgcacaggacactgaaaaccaactttgactaccttcaggaggtaccaattttgactctggatgtgaacgaggactttaaggataagtatgagagtctggtcgagaaggtgaaggaattcctgtccaccctctag

SEQ ID NO: 220589 - DNA, 48 bp, synthetic construct
  misc_feature 1..48: note = Description of Artificial Sequence: Synthetic coding sequence
  source 1..48: mol_type = other DNA
atggctacaccacccaaacggagctgtcccagtttctccgccagctag

SEQ ID NO: 220590 - DNA, 834 bp, synthetic construct
  misc_feature 1..834: note = Description of Artificial Sequence: Synthetic coding sequence
  source 1..834: mol_type = other DNA
atggctgccggacggttgttcctgtccagactgagagctcccttttcttcgatggccaaatcccctcttgagggcgtgtcatcttctcgaggcctgcatgctggccgtggcccacgtcggcttagcatcgagggcaacatagctgtgggaaagtccactttcgtcaaactcctgaccaagacatatcccgaatggcacgttgctaccgaacctgtcgcaacgtggcagaacattcaggcggcaggcactcagaaggcttgtacagcccaatctctgggcaatctgctggatatgatgtaccgagagccagctcgatggtcttatacattccagacgttctccttccttagtcgcctgaaggtccagctggaaccattccctgagaagctgttacaggccagaaaaccagtgcagatcttcgagagaagtgtgtactcggataggtacatcttcgcaaaaaatttgttcgaaaatgggagcctgtcagacatcgagtggcatatctaccaagactggcattctttcctcttgtgggagttcgcaagtagaattaccctgcatggattcatttatcttcaggcgtccccacaggtgtgtctgaagcgtttgtatcagagggctagggaagaagaaaagggcatcgagctcgcatacctggagcagcttcatggccagcacgaggcctggctgatccataagacaaccaaattgcatttcgaggctctgatgaacattcctgtcctcgtgctcgacgtcaacgacgacttctccgaggaagtcacaaagcaagaagacctgatgcgcgaagtgaatacattcgttaaaaatttatag

SEQ ID NO: 220591 - DNA, 720 bp, synthetic construct
  misc_feature 1..720: note = Description of Artificial Sequence: Synthetic coding sequence
  source 1..720: mol_type = other DNA
atggcagccggaaggctgtttttatccagactgcgcgcaccctttagcagcatggcgaaaagccctcttgagggggttagctctagccgaggcctgcatgcaggcaggggccctagacgcttatccattgagggcaatatagcatgtaccgcgcagtctctaggaaaccttcttgatatgatgtaccgcgaacctgctaggtggagctacacattccagactttctcttttttgagtcgcctgaaagtgcagcttgagcccttccccgagaagcttttgcaagctcgcaaacctgtgcagattttcgagcgctcggtgtattccgatcgatatatctttgccaaaaacctgttcgagaatggcagcctgtctgacatcgaatggcatatctatcaagactggcattcattcctcctgtgggaatttgcctctcggatcaccttgcatggcttcatttatctgcaggcttcaccccaggtgtgtctgaaacgactttatcagagggcccgagaagaagagaaaggcatagagctggcttacctggaacaattgcatggacagcatgaggcatggctcatccataagaccacaaagcttcactttgaggccctgatgaatatccccgtgctggtattagacgtgaacgatgacttctccgaagaggtgacaaagcaggaagaccttatgagagaagtgaatacattcgtcaagaacctctag

SEQ ID NO: 220592 - DNA, 570 bp, synthetic construct
  misc_feature 1..570: note = Description of Artificial Sequence: Synthetic coding sequence
  source 1..570: mol_type = other DNA
atggcagcaggccgtctctttctgtccaggcttagagcccctttcagcagtatggcaaaaagccccttggaaggggtgagctctagcagaggtctgcatgccggtaggggcccacgtcgcctcagtatcgagggcaacatcgctgtcgggaaatcaaccttcgtgaagctactgactaagacctaccctgaatggcacgtcgcaacagagcctgtggcaacatggcagaacatccaggccgctgggactcagaaagcctgtactgcacagtcactgggtaacctgttagacatgatgtacagagaacccgctagatggagttacacgtttcagacatttagctttctgagtcgtctgaaggtgcagttggagccgtttcccgaaaagctcttgcaggcccgaaagccagttcagattttcgagcggtcagtgtacagcgaccgcctccactttgaggccttgatgaacatcccagtgttggtcctggacgtgaacgacgatttctccgaggaagttaccaaacaggaagatcttatgagagaggtaaatacattcgtgaaaaacctgtag

SEQ ID NO: 220593 - DNA, 768 bp, synthetic construct
  misc_feature 1..768: note = Description of Artificial Sequence: Synthetic coding sequence
  source 1..768: mol_type = other DNA
atggctgccggacggctctttttaagccgcctgagggcccctttctccagtatggccaaaagcccattggaaggcgtgagttcctcccgcggattacatgcaggaaggggcccacggagactctctatcgaaggcaacatcgggaatatacttaagcagattcgcatgagagcccctattcaggagaccgcatgcacagcccagtcacttggaaacttactggatatgatgtatagagagccggctcgctggagttacacttttcaaaccttctcattcttgtctcgactcaaagtccagctggaaccgtttcctgagaaactgttgcaggcaagaaaaccagtccagatttttgagcgctcagtatactcggatagatatatattcgcaaaaaatctctttgagaacggctcactatctgatattgagtggcatatctaccaggattggcatagctttctcctgtgggagtttgccagtcgtataaccctacatgggttcatttacctgcaggctagtccccaagtgtgcctaaaacgcctgtaccagcgggcacgggaagaggaaaagggaatcgagctggcctacctggagcagctccatggccagcacgaagcttggctcattcacaagacaactaagcttcatttcgaagccttaatgaacatccctgtactggtgctagacgtgaacgacgacttcagcgaggaggtgactaaacaggaggatctaatgcgagaggtgaatacattcgtgaagaacctgtag

SEQ ID NO: 220594 - DNA, 1416 bp, synthetic construct
  misc_feature 1..1416: note = Description of Artificial Sequence: Synthetic coding sequence
  source 1..1416: mol_type = other DNA
atggccaaaaaggtggccgtcattggggcaggagtgtccggactgatttcattgaaatgctgtgttgacgagggcctggagccaacatgttttgagagaacagaggatatcggaggtgtgtggagatttaaggaaaatgtcgaagatggaagagctagtatctatcagagcgtggttacaaacacttccaaggagatgtcttgtttttccgattttcccatgcctgaggattttcccaacttcctgcacaacagtaaacttctggaatatttccgaatctttgccaagaagttcgacctgttgaaatatatccaattccagaccaccgtgttatctgttcggaagtgtcctgatttctcttcctctggacagtggaaagtcgtgacgcagagtaatggaaaggaacaaagtgcggtattcgatgccgtcatggtctgcagcggccaccacatcctacctcacatacccctcaagtccttccccggtatggaacgattcaaaggacaatattttcacagccgacagtataagcatcctgatgggttcgaaggcaaaagaattttggtcattggcatgggcaactccggctcagacatcgccgtggagctctcaaaaaacgccgctcaggttttcatatcaacacgacacggcacttgggtgatgtctcgcatttctgaggacggctacccatgggattccgtgtttcacacacgttttagaagtatgctgagaaacgtgttacctaggaccgccgttaagtggatgatcgaacagcagatgaaccggtggttcaatcacgaaaattacgggctggaaccgcagaacaagtacatcatgaaggagccggttctaaacgatgatgtgccatcccggttattatgtggcgcaattaaagtgaagtcaacggtaaaggaattgactgagacatccgctatctttgaggatggaactgtcgaggaaaatatcgatgtgattatcttcgctacgggatactcctttagcttcccgtttctcgaggacagcctggttaaagtggagaacaacatggtgtcactgtacaaatatattttcccagcgcatctggataagagcaccctcgcatgcataggactgattcagccgctggggtccatcttccccactgctgaactccaggcgagatgggtgacaagggtcttcaagggtctatgttcactgccgagcgagcgcacgatgatgatggacatcatcaaaaggaacgaaaagaggatcgacctcttcggcgagtcacaaagccagacgctccaaactaattacgtcgactacttggacgaactcgctctggagattggggctaaacctgatttctgtagcctattgtttaaggatccgaaactggcagttaggctgtattttgggccatgcaactcatactag

SEQ ID NO: 220595 - DNA, 969 bp, synthetic construct
  misc_feature 1..969: note = Description of Artificial Sequence: Synthetic coding sequence
  source 1..969: mol_type = other DNA
atggaggggagtcttgagagggaagcgccagctggcgcacttgccgcagtgcttaagcacagcagcaccctgccccctgagtccacacaggtgaggggttacgacttcaacagaggtgtgaactaccgcgctctgctcgaggcttttgggaccactggattccaggccacaaatttcggcagggcagtgcagcaggtgaatgcgatgattgaaaagaagctcgaaccattgtcacaggacgaagaccagcacgcagatttaacacagtctcgcaggcctcttacgagctgcactatcttcctgggttatacatctaatttgataagcagcggaatcagggaaaccatccgatatttggtgcaacacaatatggtcgacgtgctcgtcacaactgccggaggcgtagaagaagatctcatcaaatgtctggctcccacttacctgggcgagttctcactgcgcggtaaagagctgcgggagaatgggataaaccggattggcaacctgctggtgccaaacgaaaattactgcaagttcgaagattggctaatgcctatcttagaccaaatggttatggagcagaacaccgagggcgtgaagtggacacctagtaaaatgatcgccagactcggaaaggagatcaacaatcccgaaagcgtgtactactgggctcagaagaatcacattcccgtcttttcgcctgctcttacagacggttctctcggggacatgattttttttcacagctataaaaaccctgggctggtgctggatatcgttgaggcccaggagttcgatggctccgactcaggcgcacgccctgatgaggccgtgtcttgggggaagatcagggtggacgcgcagccggtgaaagtctacgcagacgcctccttagttttcccacttctcgtggcggagacatttgcccagaaaatggacgcattcatgcacgaaaaaaacgaggactag

SEQ ID NO: 220596 - DNA, 984 bp, synthetic construct
  misc_feature 1..984: note = Description of Artificial Sequence: Synthetic coding sequence
  source 1..984: mol_type = other DNA
atgcccataattccagccttttgggaagccgaggccggtggatctcgggaggaggaatttgagacctcccttgctaatatgatcgagaagaagctggagccactgtctcaagatgaagatcagcatgccgacctgacacagtccagaagacccttaaccagctgtaccatatttttaggctacacctccaatctgatttctagcggaatccgcgaaacaatacgatacctagtgcagcataacatggtggacgtcctcgtgaccaccgctggaggggtagaagaggacctgatcaaatgcctggctcccacctatctgggcgagttcagccttaggggtaaggagctccgggagaacggaattaatcgtattggcaatctgctcgtgcccaacgaaaattactgtaagtttgaggattggttgatgccaatactagatcagatggtcatggaacagaacactgagggcgtcaagtggacaccctctaaaatgatcgccaggctgggaaaagagattaacaatcctgagtccgtttactattgggcccaaaagaatcatatcccagtgttttcacccgctttgaccgacgggtcactaggagacatgatcttttttcactcgtataagaaccccggtttagtcctggacattgtagaagacttgcgactgatcaatacccaagcaattttcgcgaaatgcactggtatgattatcctcgggggaggggttgtaaagcaccatatcgctaacgccaacctgatgaggaacggcgcagattacgccgtatacatcaacacggcccaggaattcgatggttctgattcaggggctagaccggatgaggctgtgtcatggggcaaaattagggtggacgctcagcccgttaaggtctatgcagatgccagcttagtctttccgctgctggttgctgaaacattcgcccaaaagatggacgcattcatgcatgagaagaatgaggactag

SEQ ID NO: 220597 - DNA, 462 bp, synthetic construct
  misc_feature 1..462: note = Description of Artificial Sequence: Synthetic coding sequence
  source 1..462: mol_type = other DNA
atgccccagctgtgtacccgcgcttccagcagtgagatccctggaagacttttaactactctccaaagcgcacagggacagaagttccttcatttcgccaagtccgactcattcctcgatgatatatttgccgcttggatggctcagagactaaaaactcacctcttgactgagacctggcagcgcaaacgacaagagctcccttctaactgctctctgccgtaccacgtctataatatcaaagccatcaagctgagtcggcatagctatttcagctcttaccaggaccacgctaagtggtgcatctcacagaagggtaccaaaaacagatggacttgcatcggagacctgaaccggtctccgcaccaggccttccgatctggagggttcatatgtactcagaactggcagatctatcaggcctttcagggactagtgctttattatgaatcctgtaagtag

SEQ ID NO: 220598 - DNA, 1086 bp, synthetic construct
  misc_feature 1..1086: note = Description of Artificial Sequence: Synthetic coding sequence
  source 1..1086: mol_type = other DNA
atgaagcagaaaatgatggcccgactgctgcgtaccagtttcgccctcttgttcctggggctcttcggggttcttggggctgcgaccatctcctgtaggaacgaggaggggaaagccgtggactggtttaccttctataagctgcccaaaaggcagaacaaggagtcgggagaaacagggctggaatacctctatcttgatagtacaactcgctcctggcggaagagtgaacagttaatgaatgacacaaaatccgttttgggacgaaccttgcagcagctgtatgaggcatatgcctcaaagtcaaacaatactgcctatttgatttacaatgacggcgttcctaaacccgtgaattatagccggaagtatgggcacaccaaggggctgctgctgtggaatcgggtccaggggttctggcttatacatagcataccacagttcccgccaatccccgaagaagggtatgactacccacccactggcagacgcaacgggcaatccggcatatgtattacattcaagtataatcagtatgaggccattgattctcaattattagtgtgtaacccaaacgtgtattcttgctcaattccagccactttccaccaggagctaatacatatgccacagctgtgtactcgggctagtagctcggaaatccccggtcggctactgactacactccagtcagcccaaggacagaaattcctgcattttgctaagagcgactcatttctggatgacatattcgctgcttggatggcacagcggttaaagacgcacttactcactgagacatggcagaggaagcgccaagaacttccctcaaactgtagcttgccctaccatgtgtacaatatcaaagcaatcaaactgtcaaggcatagctatttttccagctatcaagatcatgccaaatggtgtataagtcagaaaggaaccaaaaacagatggacttgtatcggcgatctgaaccgcagtccacatcaggcttttagaagcgggggattcatttgcactcaaaattggcagatatatcaggcctttcagggtctggttctgtactacgagagttgcaaatag

SEQ ID NO: 220599 - DNA, 1317 bp, synthetic construct
  misc_feature 1..1317: note = Description of Artificial Sequence: Synthetic coding sequence
  source 1..1317: mol_type = other DNA
atggctcttagaggggtgtcagtcaggctgctgtctcgaggcccagggctgcatgttctcagaacttgggtcagctccgctgctcagactgaaaaaggcggtcgcacgcagagccagctcgccaaatcttcaagaccagagtttgactggcaagacccgctggtcctggaggaacagctgaccactgacgagatcctgatccgggatacatttcggacttattgccaagagagattgatgccccgaatcctgctggcaaatcgaaatgaagttttccaccgggagatcattagcgaaatgggtgaattgggagtgcttggccctacaattaaagggtatggatgcgccggagtctcttctgtagcttacggtctgctggccagggagctcgagagggtcgacagcggctatcggtcagctatgtctgtgcagagctctctggtcatgcacccaatttatgcctatggctctgaagaacagaggcagaagtacttgccccaactcgccaaaggggagctgctcggttgttttggcctaacagaacccaactctggcagtgatccgtcttcaatggagactcgcgctcactacaacagttccaataaatcctataccctgaatggcaccaaaacatggatcaccaacagccctatggctgatttatttgtggtgtgggctcggtgcgaggatgggtgcatccgtggattcctcctggagaagggaatgagaggactgagtgctcctaggatccaaggcaaattttctttgagagcttctgctaccggcatgataatcatggacggtgtcgaagttccagaagagaatgttttgccaggtgcttccagcctgggcggaccattcggctgcctgaacaatgcacgctatggtattgcctggggcgtcttgggagcatccgagttttgtctccacacggctcgacaatacgctctggaccgcatgcagttcggagtccccctcgctaggaaccagctcatccagaaaaagctggcggatatgctgaccgagattaccctgggcctgcacgcgtgcctccaactgggaagattaaaagaccaggataaggcggctcctgaaatggtctcactgttgaaaaggaataattgcggaaaggcccttgacatcgccaggcaagcaagggatatgctgggaggcaatggaatttctgacgagtaccatgtgattcgccacgctatgaatctcgaagcagtcaacacctatgaaggaacccatgacatccacgcccttatactggggagggccataactgggatacaggcattcaccgcctccaaatag

SEQ ID NO: 220600 - DNA, 918 bp, synthetic construct
  misc_feature 1..918: note = Description of Artificial Sequence: Synthetic coding sequence
  source 1..918: mol_type = other DNA
atgatacctcttctgctggcagccctgctatgtgttcccgcaggtgctctgacgtgttacggagactctggacaacctgttgactggtttgtggtgtacaagctacccgcacttaggggatctggcgaggctgctcagcggggtctgcagtataagtacctggacgagtccagcggaggatggcgtgacggcagagcattgattaattctccagagggagcggtgggcaggagtctccagccactttaccggagcaacacttcacagctcgccttcctgctctacaatgatcagccccctcagccttccaaggctcaggacagttcaatgcggggacacacaaaagggaaacagctcacctatacgtatccctgggtttacaactaccaattagagggaatctttgcgcaggaatttcctgacctggagaacgttgtgaagggccatcatgtgtcgcaggagccatggaacagctcaattaccctgacttctcaggcaggggcagttttccagtctttcgccaaattctcaaaattcggagacgatttatatagcgggtggctggccgcagccctgggcacaaatcttcaggttcagttttggcataagacggtagggatcctgccctctaattgttccgatatctggcaggtgttaaatgtaaaccagattgcattcccaggtccggcagggccttcattcaattcaacggaagatcactccaagtggtgcgtcagtccaaagggaccatggacttgtgttggcgacatgaacagaaatcagggagaggagcaacgaggcggaggcaccttatgtgctcaactgcctgctctgtggaaggcatttcagcccctcgttaagaactaccagccttgcaacggcatggccagaaagcctagtagggcttacaaaatttag

SEQ ID NO: 220601 - DNA, 909 bp, synthetic construct
  misc_feature 1..909: note = Description of Artificial Sequence: Synthetic coding sequence
  source 1..909: mol_type = other DNA
atgcactacccaaccgctctactgtttttgattctggcaaatggtgcacaggcttttcgcatatgcgcatttaacgcgcagagactcacgctcgctaaggtggccagagaacaggtgatggatacactggtcaggatactggcgagatgtgatataatggtcttgcaggaagttgtggattcatcaggctccgcgattcccctgctgctgagggagctgaatcggttcgacgggtccggtccctattccactctctcgtcccctcagctcggacgctctacctatatggagacctatgtgtatttctaccgctcccacaagacacaggtcctctcctcctatgtttacaatgatgaggatgacgtgttcgctagggaaccatttgttgcccagtttagtctgcctagtaatgtacttcctagtctggtgctggtaccactgcacacgacacccaaggccgttgaaaaggagttaaatgccctgtatgacgttttccttgaagtctcgcaacattggcaaagcaaggacgttattctgctgggggattttaacgcagattgtgcttctctgactaagaagcgcctagataaacttgaactgcgcaccgaacccggtttccactgggtgatcgctgacggcgaggatactacagtgagggccagtacacactgtacatacgaccgagtggtcctccacggagaacggtgtcgctccttgctccataccgcagccgcattcgacttccctacttctttccagctgactgaggaggaagccctgaatatctcagaccattatccagttgaagttgaactgaaactcagccaagcccacagcgtgcagcccttgtccctcacggtcctgctgctgctgagcctcctaagtccgcagctgtgccccgctgcctag

SEQ ID NO: 220602 - DNA, 909 bp, synthetic construct
  misc_feature 1..909: note = Description of Artificial Sequence: Synthetic coding sequence
  source 1..909: mol_type = other DNA
atgcattatccaaccgcccttctgttcctaatcctggcaaacggagctcaagcgtttaggatctgtgccttcaatgcccagcggctgactttagcaaaggtagcccgtgaacaagtcatggacactctcgttagaattcttgcacggtgtgacattatggtcctgcaagaagtcgtagattcctccggttccgccattccactgctcctgcgcgagcttaaccgtttcgatggttccggcccttatagtaccctgagcagcccgcagttaggtcgaagtacttacatggagacatatgtttatttctataggagtcacaagactcaagttctgtcaagttacgtgtataacgacgaggatgacgtttttgccagagagccctttgtggcccaattttcactgccgtctaacgttctccctagtctggttctcgtccctctgcacacaacccccaaggccgtcgaaaaggagctgaacgcactttatgatgtgtttctcgaggtgagccagcattggcaatccaaggacgtaatcctgctgggtgacttcaatgccgactgcgccagcctaaccaagaagagactggataagctggaattgaggaccgaacccggtttccactgggtgatcgctgatggagaagataccacagtccgcgcttctacccattgtacctacgatcgggtggttctgcatggcgaaaggtgtagatctctgctccatacagctgcggcttttgattttccgacgtccttccagttgactgaggaggaggctttgaatatctccgaccactaccccgtggaggttgaactgaaactttcccaggctcactccgtgcagccgctgtcactgaccgtgctcctgctattgtctctgctctcgcctcagttgtgccctgccgcatag

SEQ ID NO: 220603 - DNA, 909 bp, synthetic construct
  misc_feature 1..909: note = Description of Artificial Sequence: Synthetic coding sequence
  source 1..909: mol_type = other DNA
atgcactacccgacagctctcctcttcttgatcctcgctaacggagcccaggcgttccggatatgtgctttcaatgcccagagattaacacttgccaaggtagccagggaacaggttatggacaccctcgtgcggattctcgcaagatgcgacatcatggtgctgcaggaagtagttgactcaagtggcagcgctataccactgttactccgggaacttaaccgctttgatggcagtggcccttacagcaccctcagctcccctcagctgggaaggtccacatacatggaaacctatgtttatttctacaggtcccataagacccaagtgctgtcaagttacgtttataacgacgaagatgacgtgttcgcacgggagccttttgtggcccagttttctctcccttccaatgtgctgccttccctggtccttgtacctcttcatacgacacctaaagccgtagaaaaggaactgaatgccctctatgatgtgtttctcgaagtcagccagcattggcagtccaaggacgtcatcctgttgggagactttaatgcagattgcgccagcctgacaaaaaagcgactcgataagttagagctccgtacagagcctggttttcactgggtaatagcggacggagaagataccactgtgcgagcatctacacattgtacttacgaccgcgtagtgctccatggggaacggtgccgaagcctattgcacaccgctgcagcatttgactttcctacaagctttcagctcacagaggaagaagccttgaacattagtgatcactaccctgtggaagtagagttgaagcttagccaggctcactcagtccagccactgagcctgactgtgctgctcttgctctccttactgagccctcagttatgccctgctgcatag

SEQ ID NO: 220604 - DNA, 909 bp, synthetic construct
  misc_feature 1..909: note = Description of Artificial Sequence: Synthetic coding sequence
  source 1..909: mol_type = other DNA
atgcactatccaacagctcttttgttcctcatcctggctaacggcgctcaggcctttcgcatctgtgcatttaatgcccagcggttaaccctggccaaagtggcccgagagcaggttatggacaccctggtcagaatcctggcccgatgtgatattatggtgctgcaagaggtagtcgactcatcaggaagtgcaatccctctgctgctccgggagctcaatcgttttgatgggtccgggccatactctacattgtcgtctccgcagctcgggagatccacgtatatggagacttacgtttacttttatcgatcacataagacgcaggtgcttagttcctacgtgtacaacgatgaagacgatgtgttcgcgagggagcccttcgtggcacaattttctttaccctctaatgtgctgccctccctggtgctggtgccactgcatacaacacctaaggctgttgaaaaggagcttaatgccctgtacgacgtctttctcgaagtaagtcaacattggcaatccaaagacgtgattctactaggagacttcaacgccgactgcgccagcctgacgaagaaaaggttagacaagctagaactacgcaccgagcccggattccattgggtaatagcggacggtgaagacactactgtacgtgctagcacacactgcacgtacgaccgggttgttctccatggagagcggtgtaggtccctgttacacaccgcggcagcttttgacttcccaacctcatttcaactgaccgaggaggaagccctgaacattagcgatcattaccctgtcgaagtggagttgaaactgagccaggcacattctgtgcaaccactgtcattaaccgtgctcctgctgctatccctgttgagcccccagctctgtcccgctgcgtag

SEQ ID NO: 220605 - DNA, 909 bp, synthetic construct
  misc_feature 1..909: note = Description of Artificial Sequence: Synthetic coding sequence
  source 1..909: mol_type = other DNA
atgcattacccaactgctttactgttcctgatcttagccaatggcgctcaagcctttcgcatttgcgcttttaacgcacagagattgactctggccaaagtggcacgcgaacaagtgatggacaccctggttcgtatactcgctagatgcgacatcatggttctccaggaagttgtggattccagcgggagtgccattcccttactcctgcgggaactgaacaggttcgacggctctggaccctactccacactaagcagcccccagcttggcagaagcacctacatggaaacgtatgtctacttctataggagccataaaactcaagtgctgagcagttatgtttacaatgatgaggacgacgtgttcgcccgtgagccattcgttgcacagttctcactccccagcaacgttttgcctagtctggttctggtccctctgcacacaacccccaaagctgtggaaaaagagttgaacgcgctctacgatgtgttcctcgaagtttcccagcactggcagtccaaggatgtcatattactcggtgacttcaacgctgattgcgcgtccctgacaaagaagcggctggacaagctcgagctgcgcactgagccgggttttcattgggttatcgctgatggggaagacaccacggtcagagcttcaacgcattgtacctatgatcgcgttgtgctccatggggaaagatgcaggagcctattacacaccgcagccgctttcgatttccctacgagcttccagttgaccgaagaagaggcactaaatatttccgaccattatccagtggaagtggagctgaaactgtcccaggctcattctgttcaaccactgtcactaacagtactgctattgctgtcactgctcagcccccagttatgtccggctgcctag

SEQ ID NO: 220606 - DNA, 909 bp, synthetic construct
  misc_feature 1..909: note = Description of Artificial Sequence: Synthetic coding sequence
  source 1..909: mol_type = other DNA
atgcattatcccaccgcgctgctgttcctgatcctagccaacggcgcacaagcgtttcggatttgtgcctttaacgcccaaaggctcacccttgcgaaggttgccagagaacaggtaatggataccctagtcaggattctcgctcgatgcgatatcatggttctccaagaggttgtcgacagcagcggaagcgcaatcccgcttctgctcagggaactgaaccgcttcgacgggagtgggccttacagtaccctctccagcccacagttgggcagaagcacttacatggagacctacgtctacttctaccgctctcacaaaactcaggtgctgtcttcgtatgtatacaatgatgaagatgacgtattcgcaagggagccgtttgtggcccagttcagcctcccctctaacgtgttgccatcgctggtgctggtgcctttgcacacaacccctaaagcagtggagaaggagcttaacgccctgtacgacgtgttcctggaggttagccagcactggcagagtaaggacgtgattctgttaggcgactttaatgctgactgtgcatccctcaccaagaagcgactggacaagctggagttgcgtacagaacccggtttccactgggtgattgccgatggcgaagacacaacagtgcgagcttcaactcactgtacatatgacagagtcgtgctgcatggggagcgctgtaggtctctgcttcatacagccgctgcttttgacttccccactagttttcagctgactgaagaagaagccctcaacatcagcgaccactacccagtagaagttgaactgaagctaagtcaggcccattccgtgcagcctctttccctgacagtactcctgctgctgagcctcttgtctccccagctttgtccggctgcgtag

SEQ ID NO: 220607 - DNA, 315 bp, synthetic construct
  misc_feature 1..315: note = Description of Artificial Sequence: Synthetic coding sequence
  source 1..315: mol_type = other DNA
atgcactaccctacggcactgttatttctgatcttagccaacggcgctcaggccttcagaatatgtgcctttaacgcgcagcggctcacccttgcaaaagttgccagggagcaggtcatggacacacttgttaggattttagccagatgtgacattatggtgttgcaagaggtggtggactctagcggatccgccatccccctgctgcttagggagctgaaccgatttgatggaagcgggccttacagcacactgtcttctccgcagttgggcagaagcacatatatggaaacctacgtttacttctataggtag

SEQ ID NO: 220608 - DNA, 81 bp, synthetic construct
  misc_feature 1..81: note = Description of Artificial Sequence: Synthetic coding sequence
  source 1..81: mol_type = other DNA
atgcactaccctactgctctgctgttcctgatccttgcgaacggcgctcaagccttccgcatatgcgcctttaatgcatag

SEQ ID NO: 220609 - DNA, 627 bp, synthetic construct
  misc_feature 1..627: note = Description of Artificial Sequence: Synthetic coding sequence
  source 1..627: mol_type = other DNA
atgcattacccaaccgcactattatttctgatactggctaacggagcacaggcatttagaatctgcgcgtttaacgcgcaacgacttacactggctaaagttgccagggaacaggtaatggacacactcgtgcggatattagcacggtgcgatatcatggtcctgcaggaagtcgtggactcttcgggtagcgctatccctttattgctgcgagaactaaaccgttttgatggctccggaccctattctactctaagttccccccaacttggaaggagtacctacatggagacttacgtgtatttttacaggtcccacaagacacaggtcctgagcagctacgtgtacaacgacgaggacgacgtgtttgcacgtgagccattcgtagctcagtttagcctcccctccaatgtactgccctccttagtgctagtgccgctgcacaccacccctaaggcagtggaaaaggaactaaacgccctttatgatgtgttccttgaggtatcccagcactggcagtcaaaagacgttattttacttggagacttcaacgcggattgtgctagcttaactaagaaaaggttggacaaactcgagctccgtactgagcccggatttcactggtag

SEQ ID NO: 220610 - DNA, 918 bp, synthetic construct
  misc_feature 1..918: note = Description of Artificial Sequence: Synthetic coding sequence
  source 1..918: mol_type = other DNA
atgagccgcgaactggcccctctcctattgctgctgctttccattcacagtgctctcgctatgcgaatctgttccttcaatgtgcggagcttcggggagtccaagcaagaagataagaatgctatggatgttatagtcaaagtcattaagcgatgcgacattatcctcgttatggaaataaaggacagtaataatagaatctgcccaatactgatggagaaactaaaccgaaattctcgacggggtataacatacaactacgtgattagctccagactcggcaggaacacttacaaggaacagtacgcctttctgtacaaggaaaagcttgtgagtgtgaagcgctcgtaccactaccacgactatcaagacggagatgccgacgtgttctccagggagccctttgtcgtatggttccagtcaccccacaccgcggtcaaggactttgtgatcatccctctgcacaccactcccgagacctctgtcaaggagatcgatgaactggtggaggtatacacagacgtgaaacaccgctggaaggcagagaacttcattttcatgggcgactttaacgcgggatgtagttatgtgcccaagaaggcctggaaaaatatccgactgaggaccgacccaagatttgtctggctgataggagaccaggaagataccacagttaagaagtctactaactgtgcctacgaccgcatagtgttgagagggcaggaaattgtgtccagcgtggtccctaagtccaactctgtgtttgattttcagaaagcctacaaactcacggaggaagaggcccttgatgtgtctgaccattttccagtagagtttaaattgcagtcgagcagagcctttacaaattcaaagaagagcgtcaccctccgaaagaagaccaagtctaagcgcagctag

SEQ ID NO: 220611 - DNA, 918 bp, synthetic construct
  misc_feature 1..918: note = Description of Artificial Sequence: Synthetic coding sequence
  source 1..918: mol_type = other DNA
atgagtagagagctcgccccactgttactgctgctcctgtccatccacagcgccctggcgatgagaatttgttcctttaatgtgcgcagcttcggtgagtccaaacaggaggacaaaaacgccatggatgttatcgttaaagtcatcaagcgctgcgacattattctggtcatggaaattaaggacagcaataatcggatatgtcctatcctaatggaaaaactgaacaggaactctcgccgagggatcacctataactacgtgatttcatcacggctgggcagaaatacgtataaggaacaatacgccttcctttacaaagaaaaactagtttctgtcaagaggtcttaccattatcacgattaccaggatggtgatgcagatgtgttcagccgcgagcctttcgtggtttggttccagtccccacacactgcggttaaagacttcgtcattattccgttgcataccacccctgagacctccgtcaaggagatcgacgagctggttgaagtgtataccgacgttaagcacagatggaaagccgagaatttcatcttcatgggcgacttcaacgcaggttgttcttatgtgccaaagaaggcatggaaaaatattcggcttcggactgatcccaggtttgtctggctgattggtgatcaagaggatactactgtgaaaaagagtaccaattgcgcctatgatcggatcgtcctgagagggcaggagatagtctcctctgtagtgccaaaatcaaatagcgttttcgacttccagaaagcctacaagctaaccgaggaggaggcactggacgtcagtgatcatttccccgtggaattcaagctgcagagttcccgtgccttcaccaattccaagaagagcgtgactctgagaaaaaagacaaagtcaaaaaggtcctag

SEQ ID NO: 220612 - DNA, 867 bp, synthetic construct
  misc_feature 1..867: note = Description of Artificial Sequence: Synthetic coding sequence
  source 1..867: mol_type = other DNA
atgtctagggagctggctccactcctcctgctcctgctgagtatccacagtgccttagcaatgcgcatttgcagtttcaacgttagaagtttcggggagagtaaacaggaggacaagaacgcaatggacgtcatcgttaaggtcattaagagatgtgatattatcttggtcatggagataaaagattccaacaatagaatttgtcctatactgatggagaagctcaaccggaattctagaaggggaattacatacaactatgtaatttcaagcaggttgggacggaacacctacaaagagcaatatgcatttctttacaaggaaaaactggtgtctgttaaacggtcctaccactaccatgactaccaggacggcgatgctgacgtgttcagcagggagccatttgtagtgtggttccaaagtccacacacagccgtaaaagattttgtgattatccccttacacacaacaccggaaacatcagtgaaagagatcgacgagctggttgaagtgtataccgacgtgaaacatcgctggaaagcggaaaacttcatctttatgggggatttcaacgccggttgttcctacgtccctaagaaggcttggaaaaacataagattgcggaccgaccctcgctttgtttggctgatcggtgaccaagaagacaccactgtcaaaaagtccaccaactgtgcctacgatagaatagtgctcagggggcaggaaatcgtgagcagcgttgtccctaagagtaacagcgtgttcgattttcagaaggcttacaagctcacggaggaggaagtccgactgccttcttgcctgagcatgcctctgagttggaaggacgaacttgcttgggcaacctag

SEQ ID NO: 220613 - DNA, 303 bp, synthetic construct
  misc_feature 1..303: note = Description of Artificial Sequence: Synthetic coding sequence
  source 1..303: mol_type = other DNA
atgtctcgcgaactcgctccactcctgctacttttactcagcatccattctgctctggccatgaggatttgtagctttaatgtgagatctttcggagagtctaaacaggaagacaagaatgcaatggacgtgatcgtcaaggtgatcaaaaggtgtgacattattctggtgatggagattaaggactctaacaatcgaatttgccctatcctgatggagaagctgaatcggaacagtcgcagggggattacatacaactatgtcatcagcagccgcctgggaagaaatacctacaaggaatag

SEQ ID NO: 220614 - DNA, 828 bp, synthetic construct
  misc_feature 1..828: note = Description of Artificial Sequence: Synthetic coding sequence
  source 1..828: mol_type = other DNA
atgtctagggagctggccccactgttgctgctactgctcagtatccactccgcactggccatgcggatttgttcgttcaacgtgaggagcttcggggaaagtaagcaggaagacaaaaatgcaatggatgtcattgtgaaggtgataaagcgatgcgatatcatccttgtaatggagatcaaggactccaacaatcgtatatgcccaatcctgatggagaagctgaatcgtgaaaagctggttagtgtgaagagatcgtatcactatcacgattaccaggacggagatgccgatgtgttctcacgggagccttttgtggtttggttccaaagtccccatacagccgtcaaggatttcgtgatcatccctttgcatacgaccccggagaccagcgtaaaagaaattgatgagctggtggaggtgtacacagacgtaaagcataggtggaaggccgaaaattttattttcatgggggacttcaacgccggttgtagttatgtgccgaaaaaagcctggaaaaatattcggctgagaacagacccccgtttcgtgtggctgatcggagaccaggaggacaccaccgtcaagaagtccaccaactgcgcttatgataggattgtgctgagggggcaggagattgtgtcatctgtagtgccgaagtctaattcagtgtttgattttcaaaaagcctacaagctcactgaggaggaggccctagatgtcagcgaccactttccagtggagttcaaactgcaaagcagtagagcctttacaaacagtaagaagtccgtaacgttgcggaaaaagaccaaatccaagcgctcttag

SEQ ID NO: 220615 - DNA, 753 bp, synthetic construct
  misc_feature 1..753: note = Description of Artificial Sequence: Synthetic coding sequence
  source 1..753: mol_type = other DNA
atgacaccgctctgtcccagaccagccctctgctatcactttttaaccagcttactgaggtctgcgatgcagaatgctaggaccgccgaaggcaggagtcgtggcacgttgcgagccaggcctgctccgcgacctgccgctcagcacggcattccacgtcctctaagtagcgccggaaggctgtcgcaggggtgccgaggcgcatcaacagtgggtgctgccggatggaagggcgaactccctaaagcaggcggatcacctgcccctggccctgagactcccgctattagcccctccaaacgggctcgtcctgcggaagtgggcggtatgcagttacgcttcgcacgtcttagcgagcatgctaccgctccgacccggggtagcgctagagccgctgggtatgacctgtatagcgcttatgactatacaatcccgcctatggagaaggctgttgtcaaaacagatatccagattgcactcccctcgggctgctacggccgtgtggctcccaggagtggcctggctgccaagcatttcattgatgtgggcgctggcgtcatcgatgaggactaccggggaaacgtgggcgtggtgttgtttaacttcggaaaggagaagtttgaggtgaagaagggagacaggatcgcccagcttatttgtgaacgtattttttatcctgagatagaagaagttcaagccctggatgatacagagcgcggatcaggcggttttggcagcacgggcaaaaattag

SEQ ID NO: 220616 - DNA, 759 bp, synthetic construct
  misc_feature 1..759: note = Description of Artificial Sequence: Synthetic coding sequence
  source 1..759: mol_type = other DNA
atgacccctctgtgccctcgaccggctctgtgctaccatttcttgacgagcctcctgagaagcgcgatgcaaaatgccaggggcgcacggcagcgggctgaagcagccgtccttagcggaccaggacctcccctgggacgggctgcccagcacggcatccccagacctctgagttccgcaggcaggctttctcaaggttgcaggggcgctagcacagtcggtgctgccggttggaaaggggagctacctaaggccggaggctcgccggctcccggtcctgagacacctgccatctctccttccaagcgcgctaggccagctgaagtcggcggaatgcagcttcgcttcgctcgattgtctgaacacgccacagcacccacgaggggcagcgcgagagcagccggttacgacctgtattcagcttacgactatacaattcccccaatggagaaagctgtggtgaagaccgatatccaaattgcacttccaagcggctgctatgggcgtgtagcacctaggtccggtctggcagcaaagcacttcattgatgtgggcgctggcgtgatcgatgaggattacagaggcaacgtgggtgtggtgctgtttaactttggtaaggagaaatttgaggtcaaaaagggagacaggattgcccagctcatctgcgagcgcatattctaccccgaaatcgaggaagtgcaggctctggacgacactgagaggggctcggggggtttcggcagtaccggcaaaaattag

SEQ ID NO: 220617 - DNA, 495 bp, synthetic construct
  misc_feature 1..495: note = Description of Artificial Sequence: Synthetic coding sequence
  source 1..495: mol_type = other DNA
atgccctgcagcgaggaaacccccgctatctccccatccaagagagctcggccagccgaggtgggcggtatgcagctaaggtttgccagactaagtgaacatgctacggcccctacacggggatcagcacgtgccgctggctacgacctgtattctgcgtatgactacaccatcccccctatggagaaagcagtggtcaagaccgacattcagattgcgttgccatcaggctgttacgggagggttgcccctaggtcaggacttgctgcaaagcactttatcgatgttggggcaggtgtcattgacgaggattataggggcaatgttggcgtggtactgtttaattttggcaaggagaaattcgaggtcaagaagggagaccggatcgcccaactgatttgtgaacggatattctatccagagatcgaagaggtccaagccctggatgatacggagcgagggtctgggggattcggttccactggtaagaattag

SEQ ID NO: 220618 - DNA, 426 bp, synthetic construct
  misc_feature 1..426: note = Description of Artificial Sequence: Synthetic coding sequence
  source 1..426: mol_type = other DNA
atgcagctgcggtttgctaggctctccgagcacgcaaccgcccctacacggggttctgccagggcagcaggctacgatctctactccgcttacgattataccatacctccgatggagaaagccgtcgtcaaaactgacatccagattgcacttccaagcggctgttacgggcgtgttgcccctagatcagggctggccgcaaaacactttatcgatgttggagccggagtcatcgacgaggactatagggggaacgttggcgtggtactgttcaatttcggtaaggaaaagttcgaggtgaagaagggcgatcgaatcgcacagctgatttgtgagaggattttctacccagaaattgaagaggtgcaagcactggatgatacggagcgcggttctggagggttcgggtcgacagggaagaattag

SEQ ID NO: 220619 - DNA, 1056 bp, synthetic construct
  misc_feature 1..1056: note = Description of Artificial Sequence: Synthetic coding sequence
  source 1..1056: mol_type = other DNA
atgcccctaaggaaacacagacagcattttaaaaaatatggcaactgttttaccgctggtgaagccgttgattggctgtacgatttgctcagaaacaattctaacttcggacctgaggtgacgaggcagcagacaattcagttgctccggaagttcctgaagaaccacgttatagaagatattaagggtcggtggggatctgaaaatgtggatgataacaaccaactcttcagatttcctgctacgagtcctttgaaaaccctcccaaggagaacccctaagagacacggcctgcatttgagccaggagaatggcgaaaaaataaagcatgagattattaacgaggatcaggaaaatgctatagacaacagggaactgagtcaggaggacgttgaagaggtttggcgctacgtgattctgatctacctgcaaaccattctgggggtcccctctctggaagaagtgattaaccccaaacaggttatcccacagtatattatgtataacatggcaaacactagcaaaaggggagtagtgattttacagaacaagtctgacgacttaccacactgggtacttagcgccatgaagtgtctggctaactggcctcgctccaatgacatgaataaccccacctatgtgggtttcgaaagagatgtctttcggaccatcgctgattatttcctggacctgccagaaccgctactgacattcgagtactacgagctgttcgtaaacatacttggcaattttaaggattttagatcctctataccagttgtttgtggatacattacagtttctgatcgctctagtggaatacacaagattcaggacgaccctcagagctcgaaattcctgcacctcaataatctgaactccttcaagtctacggagtgtctcttgctctctcttctgcatcgtgagaagaataaagaggagtccgacagtaccgagaggctccagatctcaaatccaggattccaggaaagatgtgctaaaaaaatgcagctcgtgaacctccgcaacagacgcgcttgctgcaatttgatctag

SEQ ID NO: 220620 - DNA, 1584 bp, synthetic construct
  misc_feature 1..1584: note = Description of Artificial Sequence: Synthetic coding sequence
  source 1..1584: mol_type = other DNA
atggagtcacagggggtaccccctggcccttacagggccacaaagctgtggaatgaggtcactacttcgttccgcgctggtatgcctcttcgcaaacacagacagcattttaagaagtatggcaattgcttcaccgccggagaggcggtagattggttgtacgatctactgcgcaataactcaaactttggcccagaggtgaccaggcagcagaccatccaactcctacggaagttcctaaagaaccacgtgatcgaggatattaaggggaggtggggctctgaaaacgtggacgacaacaatcaactgttccgcttccccgcaaccagtccactgaaaacacttcctagacgctaccctgaactgcggaaaaacaatatcgagaacttcagtaaagacaaagactcaatcttcaagctgagaaacttgagtcgcaggaccccaaagaggcacggactgcacctgagtcaggaaaacggcgaaaagatcaaacacgaaataattaacgaggaccaggagaacgcgattgacaatcgggagctgagccaggaagatgtagaggaggtctggcgctacgtgattctgatctatctgcagacaatcctgggggtccccagtctggaggaggtgataaaccccaagcaggtgatacctcagtatataatgtacaacatggcgaatacgtcaaaaagaggagtcgttattctacagaataaaagcgatgatctgccccactgggtgttatccgccatgaagtgtctcgctaactggcctagaagcaacgacatgaacaatcccacttacgtcggctttgagagggatgtgttccggaccatcgctgactactttctggacttaccggagccactgctgacattcgaatactatgagttgttcgttaatattttaggcctcctccaacctcatctggaacgggtggccattgacgcactgcagctctgctgtctcctgctgcccccaccgaatagacggaaattgcagctgcttatgcgaatgatctctcggatgtcccagaatgtagacatgcccaagttgcatgatgccatgggcacaagaagcctgatgatacacactttttcaagatgtgtgctttgttgtgcggaggaggtggacctcgacgagctcctggccggtcgtctggtatcctttctgatggaccaccaccaggagatcctccaagttccatcgtacctgcaaacagccgtggaaaagcacctggattatctcaagaaaggccacattgaaaatccaggtgacggattatttgctcctctgcctacctactcctattgtaaacagatatccgctcaggagtttgacgaacagaaggtttcaacaagccaggcagctattgctgaacttctcgaaaatatcatcaagaataggtccctgccattaaaggaaaagcgcaagaagctgaagcagtttcagaaggagtaccctttaatttaccagaagaggttccctactacagagtcagaagccgctctgttcggggataagccaacaataaaacagcctatgctaatactgcgcaaacctaagtttagaagcctgagatag

SEQ ID NO: 220621 - DNA, 2436 bp, synthetic construct
  misc_feature 1..2436: note = Description of Artificial Sequence: Synthetic coding sequence
  source 1..2436: mol_type = other DNA
atggagagccagggggtgcctccgggtccgtacagagccactaagctgtggaatgaagtgactacctcctttcgagctggtatgcccctccggaaacaccgccaacacttcaagaagtacggtaattgctttaccgccggtgaggctgtcgactggctctatgatctgcttagaaataactcaaacttcggccctgaggtgacgcggcaacagacaatccagctgcttaggaaatttctcaagaatcacgttatcgaagatattaaggggaggtggggttcggaaaacgtagatgataataaccaattgtttcgcttcccagccacgtctcctctcaaaaccctgcctcgcaggtatcccgagctccggaagaacaacatcgagaacttctccaaggacaaagacagcatcttcaaattgcgcaatttgagcaggcgcacacctaagcgtcacggcctgcacctgtcacaagagaatggcgaaaagataaagcatgagatcattaatgaggaccaggagaatgccatcgataacagagagctgtcccaggaggatgtcgaggaggtgtggagatatgtaatactcatttacctccagactatattgggggtgccctctttggaggaagtcataaatccaaagcaggtcatccctcagtacattatgtacaacatggctaacacttccaaacggggagtggtaatccttcagaataagagtgacgacttgcctcactgggttctgagcgctatgaaatgcctggccaattggccaagaagcaatgacatgaataatcccacatatgttggctttgagcgggacgtttttaggaccatcgccgattactttttagacttacctgagcccttactgacattcgagtactacgaactgttcgttaacattttggtagtctgcggttatatcactgtgagcgatcgcagctccgggatccataaaatccaagatgatccccagtcatcaaaattcctgcatctgaacaatttgaacagtttcaagtcaactgagtgcctgttgctcagcctgctccatagagagaagaataaagaggagagcgacagtactgagcgtttacaaatcagtaatcctgggttccaagaacggtgtgccaaaaaaatgcagctggttaaccttagaaatcgcagagtgtctgcaaatgacattatgggaggcagttgtcacaacttgataggactcagtaatatgcacgacctgtctagtaactccaaaccgcgttgttgctccctcgagggaatcgttgacgttcctggcaattcctcaaaagaggcgagttcagtgttccatcagtcatttcctaatatcgagggacaaaacaacaagttgtttctcgagtctaagcccaagcaggagtttttgctgaaccttcactcggaggaaaacatccaaaaaccattcagcgcgggtttcaaaaggaccagtacactgacagtccaggatcaagaagagctttgtaacggaaagtgtaagagtaagcagctctgtaggtctcagtctttgctgctcagaagtagtacccgcaggaatagctacatcaacactcctgtggccgaaatcattatgaagccaaatgtcgggcagggctccacctcagtacagacggctatggaatccgaactaggagaaagttctgctactatcaacaaacggctgtgcaagtccacaattgagctcagcgaaaatagtctcctgccggcttcttcaatgctgacgggcacacagtcattactgcagccccatctggaacgcgtggctatcgacgccctgcagctctgttgtcttctgctccctccgcctaatcgcagaaagctgcaactactgatgaggatgatcagcaggatgtcccagaacgtcgacatgccaaagttacacgatgcaatgggcacacgcagcctgatgatccacacgttctctagatgcgttctttgttgtgccgaggaggtcgacttggacgagctgttggcgggaaggctggtgtcttttctgatggaccaccatcaggagatactccaagtgccctcctaccttcaaacagcagtggagaaacacctcgactatctgaagaaaggccatattgaaaatcctggggacgggctgttcgcaccactccctacatactcgtactgcaaacaaatttccgcccaggagtttgacgagcagaaggttagcacttctcaggctgcgatagctgagctcctggaaaatatcatcaaaaacaggtccctgcccttgaaggagaagcgtaaaaaactgaagcagttccagaaagagtaccccctgatctaccagaagaggttcccaaccactgagtctgaggccgcactgtttggagataaaccaacaatcaagcagccaatgctcatcctcagaaagcccaaattccggtctttgcgctag

SEQ ID NO: 220622 - DNA, 1590 bp, synthetic construct
  misc_feature 1..1590: note = Description of Artificial Sequence: Synthetic coding sequence
  source 1..1590: mol_type = other DNA
atggagcatcgtattgtcggacctggaccttacagagctacaagactttggaacgagactgtggagctgtttagagcaaagatgccactcaggaagcaccggtgtcgatttaagtcctacgagcactgttttaccgccgctgaggctgtcgactggttgcatgagttactgaggtgcagtcagaattttggtcccgaggtcacacgtaagcagacagtccaactgctcaagaaatttcttaagaaccatgtgattgaagatatcaaaggcaagtggggtgaagaagattttgaggataacaggcacctatacagatttcccccttctagccccttaaaaccttatcctaaaaagcctcccaaccaaaaagatgtcataaaattccccgagtggaatgatcttccgccaggcacaagtcaggagaacatacctgtgcggccagttgtgatgaacagcgaaatgtggtacaagcggcatagtatagcaatcggcgaagtgcctgcatgccggctggtccaccgcaggcagctgaccgaagcaaatgtggaggagatctggaaaagcatgacactgtcatatctccagaagatcctgggactggatagtctggaggaggttctggacgtaaaactggtgaattctaagttcatcatccacaatgtatactccgtcagcaagcagggagttgttattctggacgataagagcaaagaacttcctcactgggtgctgtctgccatgaagtgccttgcaaattggccgaattgttctgacctcaagcagcctatgtatcttggtttcgaaaaggacgtgttcaaaacgatagccgactattatggacaccttaaggagccacttctcacattccatctatttgatgcctttgtctctgtgctggggctgcttcagaaggagaaggtggctgtggaagccttccaaatttgttgcctgctcctgccgccagagaacaggagaaagctgcagctgttgatgcggatgatggcccgaatttgtttgaacaaggagatgccaccgctctgtgatggattcggaaccaggacacttatggttcaaactttttcccggtgcatcctctgcagcaaggatgaagtcgatttagacgaactgcttgctgcaagactggtgacttttcttatggataactaccaggaaatcctgaaagtgccactggccctgcaaacatcaattgaggagagggtggcacacctgaggcgcgtacagatcaaatatcccggtgcagatatggatatcaccctgtccgccccttcattttgccggcagatctctccagaggagtttgagtaccagagatcatatgggagtcaggaacctctggcggctctcctggaagaggtgattactgacgcaaagctgagcaacaaggagaagaagaaaaagctgaagcagttccaaaaatcctaccctgaggtataccaggagcgattccccacgcctgagtccgccgcacttttattccctgaaaaaccaaaacccaagccccagctcctgatgtgggcgctgaagaaaccgtttcagcccttccagaggacccgtagcttccgcatgtag

SEQ ID NO: 220623 - DNA, 1404 bp, synthetic construct
  misc_feature 1..1404: note = Description of Artificial Sequence: Synthetic coding sequence
  source 1..1404: mol_type = other DNA
atggaacaccgcattgtagggcctgggccataccgcgctacccggttgtggaatgagacagtggagctgtttagggccaagatgccacttcgcaagcatcgatgtcgctttaaatcttacgagcattgttttactgcagctgaagcagtcgactggcttcatgaactcttaaggtgcagccagaatttcggccctgaggtgacccggaagcagaccgtccagctcttgaagaaatttttaaagaatcacgtcattgaagacattaaggggaagtggggagaggaagactttgaagacaatcggcacctgtaccggttccctccctcctcaccgcttaaaccgtatcctaagaaacccccaaaccaaaaagatgttattaagtttcccgagtggaacgacctgccccctggtacaagtcaggagaatatccccgtgaggcctgtcgtgatgaactcggagatgtggtacaagcgtcactccattgctatcggggaggtgccggcttgccgcttggtccatcgcaggcagcttaccgaagccaatgtcgaagagatatggaagtcaatgactctctcgtacctccagaaaattcttgggctggatagcttagaagaggtgctcgatgtcaagcttgttaacagcaagtttatcattcacaatgtatattcagtcagtaagcagggtgtggtgatcctggatgataagtccaaggaactgccacattgggttttgtcagcgatgaagtgtctggccaattggcccaactgctcggacctgaagcagccaatgtacctggggtttgagaaagacgtattcaagactatcgcagattactatggtcacctgaaggagcccctgctgaccttccacctatttgacgcatttgtgtccgtactgggcttgctgcagaaagaaaaagtggccgttgaagcttttcagatctgttgtttgctcctccctccagagaaccgaagaaaactgcaactgctgatgcgcatgatggctaggatatgtctgaataaagaaatgccgccattatgcgacggctttggcacacggactcttatggtgcagacttttagtaggtgtatcctgtgttccaaggacgaggtggacctggacgagttgttggctgcccgtctggtcacctttcttatggacaattaccaggagatcctgaaggtgcccctcgctttacagacaagcattgaagaacgcgtcgctcaccttaggcgcgtgcagttccagaagtcctatccagaggtgtaccaggagaggttccccacacccgagtcagccgcactcctttttcccgaaaagcccaagcctaaacctcagctgctaatgtgggcactcaagaagccattccagccattccagagaacccgctcgtttcgcatgtag

SEQ ID NO: 220624 - DNA, 1323 bp, synthetic construct
  misc_feature 1..1323: note = Description of Artificial Sequence: Synthetic coding sequence
  source 1..1323: mol_type = other DNA
atgcctctgcgaaaacaccggtgccggttcaagtcctatgagcattgtttcacggctgcagaagcagttgactggctccatgaattgctgcgctgctcacaaaacttcggccctgaagttactaggaaacaaaccgtccagctgctgaaaaagtttctcaaaaaccacgtgattgaggatatcaaaggcaagtggggggaggaagacttcgaagataaccgacacctgtacagatttcctccctccagcccattgaaaccttatccgaagaaaccccctaaccagaaggacgtcataaaattcccagagtggaacgacctaccgcctgggacgagccaggaaaacattccggtccgtccagtggtgatgaatagcgagatgtggtacaagcgccattcgattgccattggagaagtacccgcatgccgattggtgcacaggagacagctgactgaggctaatgtggaggagatatggaagagcatgaccctcagttatctgcaaaaaatcctcggtttagattcacttgaggaagtgttggacgttaagttagtgaacagtaagttcattatccacaacgtttacagcgtgtccaaacagggggttgtgatactagatgacaaatctaaggagttaccccactgggttttgtcagccatgaaatgccttgccaactggccgaactgtagcgacctcaagcagcctatgtatctgggctttgagaaagacgttttcaagacaatagccgactactacggccacctgaaagagcccctgctgactttccatttgttcgatgcttttgtgtctgtgcttggacttctgcagaaggaaaaagtggcagtagaggcctttcaaatttgctgcttgttgcttccgccagaaaatcgacggaaattacagctccttatgaggatgatggccaggatttgcctaaataaggagatgccccctctgtgtgacggattcgggactcggactctgatggtccagacgttctcccgctgtatcttatgttcaaaggacgaagtcgatctggacgagttattggcagcgagactggtcacgttcctgatggataattaccaagagattctcaaagtcccgctcgctctgcagacatccatcgaggagcgcgtggcgcatttacggagggtgcagttccaaaagtcctatcccgaggtgtaccaggaacgctttccaacaccagagtcggcagcgctccttttcccagaaaagccaaaaccaaaaccgcagcttctgatgtgggccctgaaaaagccctttcagccattccagcgcacccggtctttcagaatgtag

SEQ ID NO: 220625 - DNA, 4746 bp, synthetic construct
  misc_feature 1..4746: note = Description of Artificial Sequence: Synthetic coding sequence
  source 1..4746: mol_type = other DNA
atgcggacgaccaaagtttataagctggtgattcacaaaaagggcttcggcggttcagacgatgagcttgttgttaacccaaaagtatttccccacatcaagctgggggacatagtcgagatcgcacaccccaacgatgagtactcccccttactgctccaggtgaagtcactcaaagaggacctccaaaaagagaccatctcagtggatcagactgtaacacaggtcttcagactgcggccttaccaagatgtgtatgtgaatgtcgtggatcctaaagatgtgacattagacctggtggagttaacattcaaggatcagtatatcggcagaggcgatatgtggcgacttaagaaaagcctcgtgtccacatgtgcctatattactcagaaggtcgagttcgccggtatccgggctcaagccggagagctgtgggtaaagaatgagaaggtaatgtgtggatatatttccgaggataccagagtggtgttccgatctacatccgctatggtgtatatctttatccagatgtcttgtgaaatgtgggacttcgatatctacggcgacctgtattttgagaaagccgtcaatgggttcctggccgatctctttacaaaatggaaagagaaaaattgttctcatgaagtgactgtggtccttttcagccgcacattctatgatgccaagtctgttgatgagttcccggagattaatcgcgcttcaattagacaggaccacaaaggcaggttttatgaggatttctacaaggttgtagtgcagaatgagagacgggaagagtggaccagtctgctcgtcacaatcaaaaaactcttcatccagtacccggttttggtgagactggaacaggcagagggcttccctcagggtgacaattctacaagcgctcagggtaattatctcgaggcgatcaatctttccttcaacgtatttgataagcattatattaatcggaatttcgatagaaccgggcaaatgtcagtcgtcatcacacccggtgtgggggtctttgaggtggaccgcctattaatgatactcaccaaacaaagaatgatagataacggcattggcgtggatttggtgtgtatgggtgaacagcctctccatgcggtgccactgtttaagctccataacagatcagcccctagggactctaggctcggagatgactacaacatcccacactggattaaccattctttttataccagcaagagtcaactgttctgtaattctttcacgcctagaatcaaactggctggcaaaaaacctgcaagcgaaaaggcaaagaacggcagagatacaagcctcggctcccctaaggaatccgagaacgctctgcccattcaggtggattatgatgcttacgacgcgcaagtgtttcgcttgcctggacctagccgggctcaatgccttaccacgtgccggtctgtgagggagagagagagtcatagccgaaagtccgcatcctcatgtgatgtgtcctctagtcctagcctcccctcaaggacattgcctaccgaagaggtgcgatcacaggcgtctgacgactccagcctgggaaaaagcgcgaacatcttgatgattccccacccacacctccatcagtacgaggtcagcagctccctgggttataccagcacacgtgatgttctggagaatatgatggagcctccccagcgtgacagcagtgctcctggcagatttcatgtcggcagtgcagagtcaatgttacacgtccgcccaggcggatataccccacagagagcattgattaacccttttgctcctagtcggatgcccatgaaacttacaagcaacaggcgcaggtggatgcacacatttccagtaggaccctctggcgaggctatccaaatccatcaccaaaccagacagaatatggccgagctacagggcagcggacagcgggaccccacacactccagcgcagagttgctggaacttgcctaccacgaagcggctggacgccattctaatagtagacagcccggagacgggatgtcattcttaaacttctcaggcaccgaggagttatccgtcggcctactgtccaacagtggcgcaggcatgaatccacgtacccaaaataaagactctctggaggattccgtctcaacttcaccagatcctatactcaccctttcagcacccccagttgtgccagggttctgctgtactgtcggcgtggactggaaatcactgaccacccccgcttgtctgcctcttaccacagactacttccctgatcggcagggattacagaatgactacactgaaggatgctatgatttacttccggaggcggacatagacagacgcgatgaggatggcgtgcaaatgactgcccagcaagtttttgaggagttcatctgtcagcgtctgatgcaggggtaccagatcatcgttcagccaaagacccagaaacccaacccagccgtccctccgcctctgagtagctcaccgctttactctcgcggtcttgtgagtcgtaataggcctgaagaggaggaccagtactggctctccatgggcagaacatttcacaaagttaccttaaaggacaagatgatcaccgttactcggtaccttcctaagtacccttatgagagcgcacagattcactatacatattctctctgtccgtctcacagcgactccgagttcgtgtcttgttgggtggagttctcccacgagcgacttgaggaatacaagtggaattacctggaccagtacatctgttctgccggaagtgaagatttcagtttgatcgagagtctgaagttttggcgtacgagattccttctgctgcccgcatgcgttacagcgactaagcgcatcaccgagggtgaggctcattgtgacatttacggggacagaccacgtgccgacgaagatgaatggcagttactggacggcttcgtgcgattcgtggagggccttaatcggatcagacggcgtcataggagtgatagaatgatgagaaaggggaccgcaatgaagggactgcagatgacaggcccaatcagcacccactctcttgagtcaaccgctccacctgtcggaaaaaagggaactagcgccctgtccgccttactggagatggaagctagtcaaaagtgtctgggagagcagcaagcagcagttcatgggggaaaatcgagcgctcaatcagcggagtccagtagcgtggccatgacacctacatatatggactcaccacgcaaggtctccgtcgaccaaacagcaactccaatgctggatggtacctctcttggaatttgcactggacagtctatggacagaggaaattcgcagacattcggcaatagccaaaatattggggaacagggctattcttctaccaattcctcagattcttcatctcagcagctcgtggcgtccagtcttacatcctcctccacactaactgaaattctggaggcgatgaagcacccaagcactggagttcagctgctcagcgagcagaaaggcctttcaccttattgcttcatcagtgctgaggtggttcactggttagtcaaccatgtggaggggatccagacccaggcgatggccatcgacattatgcagaagatgctcgaagagcagctcattactcacgcttctggcgaggcttggcgtacttttatctacggattttacttttacaaaatcgtgaccgacaaagagcctgatagggtggccatgcaacagccagcgactacttggcacacagctggcgtagatgactttgcgagtttccaaagaaagtggttcgaggtggccttcgtggctgaggaactggtccactctgagataccggcatttctcttgccatggctcccaagccggcctgcctcatacgcctcccggcatagttcatttagtcggtcattcggaggccgaagtcaagccgctgcgctgctggcagcgaccgtgcccgaacaaagaaccgtgaccctggacgtcgatgtgaacaaccggactgaccgcctggaatggtgttcctgttactatcacggtaatttcagtttgaatgctgcattcgaaatcaaactgcactggatggccgtgaccgcagcagtgcttttcgaaatggtccagggatggcatcgtaaggccacctcgtgcggctttctcctcgtgcctgttctggagggaccatttgccttaccctcttatctatacggcgaccccctgagagctcaactgttcatccccctgaacatctcgtgtctgctgaaggaaggatcggagcatctcttcgattcctttgagcctgagacatactgggaccggatgcatctcttccaggaggcaattgctcatcgattcggttttgtgcaggataagtattctgccagcgcgttcaatttcccagcggagaataagccccaatacatccacgtgactggcaccgtatttttacaactgccctacagcaaaaggaaattctcgggccagcagaggagaaggcgaaattcaacctcttccaccaatcaaaacatgttttgtgaagagcgggtgggatataattgggcctataatacgatgctgacaaagacatggcgctcctcagcaacaggagatgagaagttcgctgacaggctccttaaggactttactgatttctgcattaacagagacaataggctcgtgaccttctggacaagttgcctcgagaagatgcatgcttctgccccatag

SEQ ID NO: 220626 - DNA, 3690 bp, synthetic construct
  misc_feature 1..3690: note = Description of Artificial Sequence: Synthetic coding sequence
  source 1..3690: mol_type = other DNA
atgaggacgaccaaggtctataagctggttatccataaaaagggcttcggaggcagcgacgatgaacttgtagtgaatcccaaggtattccctcacatcaaacttggcgacatcgttgaaattgcacatccaaacgacgaatactcccctctgcttttgcaggtcaagtcactgaaagaagatttacagaaagaaactattagtgtcgaccagaccgtgacgcaagtcttccggttgaggccctatcaggatgtgtacgttaacgtcgtggatccaaaagatgtgaccctggacctcgtcgagttaacatttaaggatcagtatatcggacggggtgacatgtggcggctcaagaaaagtctcgttagtacatgtgcttatatcacgcagaaggtggagttcgccggaattcgcgctcaggcaggcgagctctgggtcaagaatgaaaaggttatgtgcggatacatctctgaggacactagagtcgtatttcgaagtacttccgcaatggtatatatatttattcagatgagttgtgaaatgtgggactttgacatttatggcgatctttacttcgagaaagccgttaatggattcttggccgacctgtttactaagtggaaagaaaagaactgctcacatgaggttaccgttgtgctgttcagtaggacgttctacgatgctaaaagcgtggatgaatttcccgagattaaccgggcaagtatacggcaagatcacaagggacgcttctacgaggatttctacaaggtggtggtgcaaaatgaacggcgagaggagtggacctcattgttggtcacgatcaagaaactgttcattcagtacccggtgctcgtccgtctggaacaggcggaggggtttccacagggcgacaatagcacatccgcccaaggcaattacctggaggcaatcaacctgtcatttaacgttttcgacaaacactacataaacaggaatttcgatcgaaccggccagatgagcgtggttatcactcccggagtcggggtgttcgaggtggatagactgctgatgatcttgacaaagcagcggatgattgataacgggatcggagtggacctcgtctgcatgggagaacagccgctccacgccgtcccattattcaagcttcataaccgtagcgcgccaagggattccaggttaggcgatgactataatataccccactggattaatcattctttctacacttccaaaagtcaactgttttgcaattcattcacgccacgaatcaaattagccggtaagaagcccgcttctgagaaggccaagaacgggagggacacttcgttggggtcacccaaggaaagtgagaacgccctgcctatccaggtggattacgacgcgtatgacgcccaagtgttccgcttgccaggcccttctcgtgcccaatgtctgactacttgtcggagcgtacgcgaaagggagagccacagcaggaaatccgccagttcatgtgacgtctcctccagcccaagccttcccagtagaaccctgcctactgaggaagtacgtagccaggccagtgatgactcaagcctaggaaagtccgcgaatatcctgatgatcccccacccacacctgcaccagtacgaggtatccagctcactcggctacacctcaacaagagatgttcttgaaaacatgatggagccgcctcagagggacagctccgctcccggaagatttcacgtaggatccgccgagtccatgcttcacgtgcgccctggcggatacaccccccagcgagccctgatcaatccgtttgccccaagccgaatgcctatgaaattgactagcaataggcgccgatggatgcacaccttcccagtgggaatgaacccaagaacccagaataaggacagcttagaagatagtgtatcaacgtccccggaccctatcctgacgttatcggccccaccagtggtgcctggtttctgttgcaccgttggggtagactggaaatccctgacaactccggcatgccttccacttacaactgattattttcccgatagacagggcttacaaaacgattatacggaaggctgttatgatcttttgccagaggctgacatcgatcggagggacgaagacggggtgcagatgacagcacagcaggtcttcgaagagttcatttgtcagcggttgatgcagggctatcagatcattgtccaacctaagactcagaagcccaatccagcggtccctcccccactcagctccagcccactgtacagtagaggactagtatcccggaacagacccgaggaggaagatcagtactggctgtcaatgggcagaactttccacaaggtgaccttgaaagacaagatgataaccgttacaaggtatttacccaagtatccatatgaatctgcccagatccactatacgtactcactctgtccctctcatagcgactcagagttcgtgtcttgttgggtggaattctcccacgagaggctggaggaatataagtggaattacctcgaccagtacatctgctctgctgggagcgaagatttcagtctgatcgagagtctgaaattctggcgcacaaggtttctactcttacccgcttgtgttacagccacaaagcggatcactgagggagaagcacattgtgatatatacggcgatcgccctcgggctgatgaggatgagtggcagctgctagatggtttcgttaggtttgttgagggcctgaacagaatccgacggcgacacaggtcggaccgcatgatgaggaaaggaaccgcaatgaaagggttgcagatgactggccctattagcacacactcactggaatctacagcccctccagtgggcaaaaaagggacctccgccctctccgcacttttggagatggaggcctctcagaagtgtctgggggaacagcaggccgcagtccacgggggtaaaagctcagcgcagtctgctgagtcctcctctgtcgcgatgactccaacatacatggacagcccccgtaaagatggggcattcttcatggagtttgtaaggtcccccaggactgcatccagtgcattctatccccaagtgtccgtcgaccagaccgcaactcctatgctcgatgggacttcccttggtatttgcaccggccagtctatggaccgcggaaattcacagactttcggtaattcacaaaatattggggaacagggctactcatcaaccaactcctctgacagctcctcacaacaactggtggccagctcattgacaagtagtagcacgctgacggagattctcgaagcaatgaaacacccctctaccggcgtccagcttctttctgagcagaaaggattgtctccctactgcttcatcagcgcagaggtggtgcattggctagtgaatcacgtggaggggattcagacacaggccatggcaatcgatatcatgcagtggccatgctcgtcccccccaccacccggaactcagcaggagtggacgacctcacccgcttctagcgcttctggcctgcggtggccgttatggcagaaatcgtcttgcaccctgcgcttccttcctttcagctgtcctggatgtctcgccggacaacccccaatgcaggtaggaaccgctccactcgcagaggtccttgaagatggggcaagacgccaacatttttag

SEQ ID NO: 220627 - DNA, 4512 bp, synthetic construct
  misc_feature 1..4512: note = Description of Artificial Sequence: Synthetic coding sequence
  source 1..4512: mol_type = other DNA
atgagaaccacgaaggtatataaactggtgattcacaagaagggtttcgggggatcagatgacgaactcgtcgtcaatcccaaggttttccctcacataaaacttggcgacatcgtagaaatcgcgcaccccaatgacgagtatagtcctcttctactccaggtgaagagtcttaaggaggacctacagaaagagactatatccgtagaccagacagtcacccaggtgttccggctacggccataccaggacgtctatgtgaacgtcgtcgaccctaaagacgttactctagatttggtcgaactcaccttcaaggaccagtatattggacgcggagatatgtggagactgaagaaaagtttggtttcaacatgcgcatacatcactcaaaaggtcgaatttgccggaattagagcccaggctggagagttatgggttaagaacgaaaaggtgatgtgcggttatatttcagaggacacaagagtggtctttagatcaactagcgccatggtatatatctttatccaaatgagctgcgagatgtgggacttcgatatttatggtgacctgtatttcgagaaggccgtcaatgggttcctagcagacctgttcacaaaatggaaagaaaagaattgcagccacgaagtgacggttgtcctcttttcaagaactttttacgatgcaaagtccgtcgatgaatttccggagataaatcgagcctctattcgacaggatcacaagggaagattttatgaggacttctataaagtggtcgtccagaatgaaagacgcgaggaatggacttccctgctcgtgaccataaaaaagctgtttatccagtaccctgtactggtacgcttagaacaggcagaaggtttcccccagggggacaattcaacgtccgctcaggggaactacctcgaggcaatcaaccttagcttcaacgtcttcgacaaacactacattaaccggaacttcgatagaacgggacaaatgagcgtggtaatcacgccaggagtcggcgtgtttgaggtggacagattgctgatgattctgacgaagcagcggatgattgataacggtatcggagtggatctggtgtgcatgggggaacagccattgcacgccgtacctctgttcaagttacacaataggagtgctcccagggactctcgcctgggtgatgactataacatcccacactggattaaccactcattctatacttcaaaaagccaattattttgtaatagcttcactcctagaattaagctcgcgggaaaaaagcctgccagcgaaaaagccaagaacggtcgagacacgtctttaggctcgcccaaagaaagtgagaacgccttgccaatccaggttgactacgatgcctacgatgcccaggtattccgccttcctgggccatcccgagctcagtgccttacaacttgtcgatcagtgcgggagcgagaatctcatagccgaaaatctgcttcttcctgcgatgtgagcagctcaccatcactgccatctcgcaccttgcctaccgaagaggtaaggtcacaggcctccgacgattcaagccttggtaaaagcgctaatattcttatgattccacacccacatttacatcagtacgaggtatctagctctcttgggtatacctctacccgcgatgttctggagaacatgatggagccacctcaaagggattcctctgcgcctggccgatttcatgtggggtcggctgagagtatgttgcacgtgaggccaggaggctacacaccacagcgcgcattgatcaatccctttgcgccttcgcgtatgcccatgaagttgacaagcaatcgtcggagatggatgcacacctttcctgtcgagacctcttgcttttatcttagcatcggtatgaaccccagaacgcagaataaagacagtctggaggactcagtctccacttctccagatcctatgcccggattctgttgcacggtgggagtggactggaagagcctgaccacccctgcatgtttaccacttacgactgattatttcccagaccgccagggcttgcagaatgactacacagagggctgctacgatcttctcccggaagcagacatcgatcggagggacgaagacggagtgcagatgactgcgcaacaagtgttcgaagaattcatatgtcagagactcatgcaggggtaccaaatcatcgtgcagccgaagacacagaagccgaatcccgctgtcccccctcccctgagtagcagtccgctttattcacggggtctcgtatcccgcaacaggccagaggaagaagaccaatattggctgtctatggggagaaccttccataaggtgaccctgaaagataagatgatcaccgtcactaggtaccttcccaagtacccctatgagtctgcccagatccactatacgtacagcttgtgtccatcccactctgacagcgagtttgtgagctgttgggtggagtttagtcacgagcggcttgaagagtacaaatggaactatctggatcagtacatttgctccgcgggatctgaggacttctcacttatcgagagtttgaagttttggcggacccggttcttacttctccccgcatgcgtcacagctactaagcgaattactgagggcgaagcacactgcgatatatacggggaccgaccccgagccgatgaggacgagtggcagctcttggacggattcgttagattcgtggaagggctcaataggatccgcaggcggcacaggagcgaccgaatgatgcgtaaaggtaccgctatgaagggcctccagatgaccgggcctatttccacccacagtctggaaagcaccgcccctccggttggcaagaaaggcacttccgcgctgagtgcgctgctggagatggaggctagccaaaaatgcctgggtgaacagcaggcggctgtacacgggggaaaaagctctgcccagtcagccgagtcttcaagtgtggcgatgactccaacctacatggacagcccaagaaaggtgagtgtcgaccaaactgcgactcccatgttggacggcacgagtctgggaatttgcactggtcaaagtatggataggggcaattcgcagacctttgggaactctcagaacataggtgagcagggctacagttcaaccaattcctctgattctagttcccaacagctggtggccagcagtctcacctcctctagcaccctgacagaaatcttagaagccatgaagcatcctagcaccggtgtgcagctgcttagcgagcagaaaggcctgtctccttactgttttattagtgccgaagttgtgcactggctcgttaaccacgtggaggggatccagacccaagcaatggcgatcgatatcatgcaaaagatgttagaagaacagctgatcactcatgcaagtggtgaggcgtggcgaactttcatctacggattctacttctataaaatagtgaccgataaggagcctgacagagtggctatgcagcagcctgccaccacttggcatactgccggagtcgacgattttgcaagcttccagcgcaagtggtttgaggtggccttcgttgctgaagagttagtgcactccgagattcctgcgtttttactcccctggctcccgtcccggccagcttcttacgcctcccgtcactcgagctttagcaggagttttggaggccgatctcaagccgcagctctcctggcagccacagtgcctgaacagagaactgtcactctggatgtcgacgtcaacaaccggacagaccgactcgagtggtgtagttgctattaccacgggaactttagcctcaacgcagccttcgagatcaaacttcactggatggccgtgacagctgctgttttatttgagatggtgcaggggtggcaccggaaagcaacgtcttgcggattccttctggtgcccgtgctcgaagggccattcgcgctcccatcttatttgtacggcgatcctcttagagctcaactctttatccctctgaacatttcctgccttctcaaggagggctccgagcatctgttcgactcttttgagcccgagacctattgggatcgaatgcatttattccaggaagccattgcccaccggtttggctttgtccaggataagtattcagcaagtgcgttcaacttcccagccgagaataaaccacagtacatccacgtgacgggaacagtattcctccagctgccctactctaaacggaagttctccgggcaacagcgacgaagaagaaattccaccagtagtacaaatcaaaatatgttttgtgaggaacgggtagggtacaactgggcttataatactatgctcaccaaaacatggagatcatctgcaactggcgatgagaaattcgccgaccgcctgctgaaggatttcacagatttctgtatcaatcgcgataacaggttagtgaccttctggacttcgtgcctcgaaaagatgcacgctagcgcaccttag

SEQ ID NO: 220628 - DNA, 1680 bp, synthetic construct
  misc_feature 1..1680: note = Description of Artificial Sequence: Synthetic coding sequence
  source 1..1680: mol_type = other DNA
atgcgaaccacgaaagtgtacaagcttgtgattcacaagaagggttttggaggaagcgatgacgaactggttgtcaatccaaaagtttttccccacatcaaattaggcgatattgttgagatcgcccatccaaatgacgagtactcgccccttcttttgcaggttaagagccttaaagaggatctgcaaaaagaaaccatctctgtggaccagaccgtgacgcaggttttcagactgaggccataccaagatgtctacgttaatgtggtggatcccaaagatgtcactctagacctggtcgaacttacgttcaaggaccagtatatcggtcggggagatatgtggcggctgaagaagagcctcgtctcaacctgtgcttatattacgcagaaggtggaattcgctgggattcgggcacaggctggggaactttgggtaaagaacgaaaaggtgatgtgtggctatatatcagaggatacacgagttgtcttcagatccacttctgcgatggtgtacatcttcattcaaatgagctgcgaaatgtgggacttcgacatctatggggatctttattttgagaaagccgtaaacggtttcctggcggatctttttaccaagtggaaagaaaagaactgcagccacgaggttactgtagtcctcttcagcaggactttttatgatgcaaaatccgtggatgagtttccagagataaacagagccagcatccgccaagatcacaagggaagattctatgaggacttctacaaggtagttgtacagaacgaacgtagagaggagtggacaagcctgctggtcacaattaagaagctctttatccagtatccagttctcgtgagattggagcaggcggaggggttcccacaaggcgacaactcaacctcagcccaggggaactacttggaggccatcaatctcagtttcaatgtttttgacaagcactatattaacagaaactttgaccgaacggggcagatgtccgtcgttattactccaggggtaggtgtgtttgaggttgaccgcctgttgatgatcttgaccaaacaaaggatgatcgataatggcatcggtgtggacctggtttgcatgggggaacagcctctgcacgcagtgccactgtttaaactccacaaccggtccgcaccacgcgacagtagattaggcgacgactacaatattcctcactggattaaccatagtttttacacttcgaagagccagctattttgcaattcatttacacccaggataaagctcgcaggaaagaagccagcgtccgagaaggccaagaacgggagagacaccagtctcggctccccgaaggagtccgagaatgccttacccatacaggtcgattatgatgcctacgatgcacaggtattccgactgcctggtccctcgagagcccagtgcctcactacctgccgatctgtgagagagcgcgaatctcactccagaaaaagcgcgagcagttgcgacgtctcgtctagtccatctctgccctcgcgaaccctccctacagaggaggtgaggtcacaagcgtcggacgattccagcctcggcaagtcagccaacatattaatgataccacacccccatctgcaccaatatgaagtctctagcagcctgggttatacaagtacacgggagcatctgggttag

SEQ ID NO: 220629 - DNA, 4659 bp, synthetic construct
  misc_feature 1..4659: note = Description of Artificial Sequence: Synthetic coding sequence
  source 1..4659: mol_type = other DNA
atgcggacaaccaaagtttacaagttggtaatccacaagaaaggttttgggggaagcgatgacgagctggtggtcaaccctaaggtatttcctcatataaagctgggtgatatcgtagagatcgcacatccaaacgacgagtactcccccctgctgctgcaggtgaagagcctgaaggaagacctgcagaaggagacaatctccgtggaccagaccgtgacccaggtctttcgcctgaggccttatcaggacgtgtatgtcaatgttgtcgacccgaaagacgtgacactcgatttggttgaattgacatttaaggaccagtatattgggaggggagatatgtggaggctgaaaaagagtctggtgagtacttgtgcctacattacccagaaagttgaattcgcaggcattagagctcaggccggtgagttgtgggtgaagaacgagaaagttatgtgtggctacatctctgaagacaccagagtggtattccgtagcacatccgcaatggtttacatatttatccagatgtcatgtgaaatgtgggattttgatatctatggtgatctttattttgaaaaagctgtaaacggtttcctggctgatttatttaccaaatggaaagaaaagaattgcagtcacgaggtaaccgtagttctgttttcaaggaccttctacgatgcgaagtctgttgacgaattccctgagattaatagggctagcatccgccaggaccacaaggggaggttttacgaggatttttacaaggtagtggttcagaatgaaaggcgcgaagagtggactagcctgctcgtgactatcaagaagctgtttatccagtatcctgtactggttcgcttggagcaggccgaggggttcccgcagggcgacaatagtacctcagctcaaggcaactacctggaggctattaacctgtcctttaatgtgttcgacaaacattacataaatcgtaactttgataggaccggccagatgagtgtggttattactccaggagtaggggtgttcgaggtggataggctcctgatgatactcacaaagcagcggatgattgacaacggcatcggcgtggaccttgtctgtatgggcgaacagccgctgcatgccgttccgctgttcaagctgcataacaggagcgccccacgggacagtagactgggagacgactataacattccacattggatcaaccacagcttctacactagtaagagccagctgttctgcaactcattcacaccacggatcaaattggctggcaagaagcctgcctctgagaaggctaagaacggccgtgacacctctcttggatcgcctaaggaaagcgagaacgctctgccaatacaggtagactatgacgcttatgatgcacaagtgttccgtcttccagggccaagccgggcacagtgcttaaccacctgtcgctcagtcagggagcgcgagtcccacagccgtaaatctgcttcaagctgcgacgtctcctcgagccccagcttgcccagccgcactttacccactgaagaagtgcgaagtcaggcttccgatgattcttcgctcggcaaatctgctaatatcctaatgataccccatcctcatttacaccagtacgaggtgagcagtagcctaggatacacttctacgcgggacgtgctcgaaaatatgatggaacctccgcaaagggactcgtccgccccaggaaggttccacgtgggctctgccgaatcaatgctgcatgttcggccaggtggctacacgccccagcgcgctctgatcaatccatttgcaccctcgcgaatgcctatgaagctaacttcaaacagacgcaggtggatgcacaccttccccgtgggtccctccggcgaggcaattcaaatccatcaccagacacgccagaatatggccgagctccaggggtccgggcagcgcgatcctacacattccagcgccgagctgttggagctcgcctatcatgaggctgcaggcagacattctaatagcagacagcctggtgacgggatgtcttttctgaattttagtggaaccgaagaattgtccgtggggctgctgtccaactcaggtgcaggaatgaacccacggacacaaaataaggactcactggaagattcagtatctacgagtcctgaccctattttgacattatccgctcctcctgtggtacctgggttttgctgtaccgtgggcgtagactggaagtcactaaccacaccagcctgcttgccactgactacagattatttcccagaccgccaggggctccagaacgattacacagaaggatgctatgatctactgccggaggcagatatcgacagaagagacgaagatggggtccagatgaccgctcagcaagtctttgaggagtttatttgtcagcgcctgatgcaaggctatcagatcatcgtgcaacccaagacccagaaaccgaaccccgcagtgccaccccctctctccagcagtcccctgtactcacgtggactggtgtcccggaatcggcctgaagaagaagaccagtactggctctcgatgggcagaactttccacaaggttactctaaaggataaaatgataacagtgactagatacctgcctaagtacccatacgaatctgcacaaatccattacacatattctctctgcccatctcattctgattctgagtttgtgtcatgttgggtggagttcagccacgagcggcttgaggaatacaagtggaactacctcgaccagtatatctgttctgccggttccgaggatttttccctgatcgagtcattgaaattctggcggacaaggttcctactactccccgcttgtgtcacagctacaaaaagaatcactgaaggggaagcccattgcgacatttatggcgaccgccctagagcggatgaagacgaatggcagctactcgacggctttgtgcgtttcgtggagggtctgaaccgaattcgacgtaggcataggtcagaccgtatgatgcgcaaaggcactgcgatgaagggactgcaaatgacaggtccaattagtacccacagccttgagtctactgccccacctgttgggaagaagggaacgtccgctctttctgcccttctggaaatggaggcatcacagaagtgtctaggggagcagcaagccgctgtgcatggagggaagtcctccgctcagtcagctgagagttcaagtgtggccatgacacctacttacatggatagtccccgtaaagacggagccttcttcatggagtttgtgcgatcccccaggaccgccagcagtgccttctaccctcaggttagtgtggatcagaccgcgacgccaatgctggatggaacctcgctcgggatttgcaccgggcaaagtatggaccggggaaattcccagacatttgggaacagtcagaatataggggagcaggggtattccagcacgaattcatcggactcttcaagtcagcagctggttgccagttctcttacctccagcagtacgttaacagagatactcgaggctatgaagcatccctcgacgggggtgcagctgctgagtgagcagaagggattgtccccctattgtttcatcagcgccgaagtcgtccactggctggtaaaccatgtcgaggggatccaaacgcaggctatggctatagatatcatgcagaagatgctggaggagcagctgatcactcacgcctcaggagaggcctggcgcacctttatctatggattttacttttataaaatcgtaacagacaaagaaccagaccgagtggcaatgcagcagcccgcaactacctggcacactgcgggtgtggacgactttgcatcgttccagagaaaatggttcgaggtcgcctttgtggcggaggagttggtgcactcagagatccccgcattccttttgccatggttacctagccggccagcttcatatgcgtcacgccattcctcattcagccgcagtttcggtgggaggtcacaagcggcagctttgttagcagccacagtgcctgaacaacggaccgtgacgttggatgtggatgtgaacaacaggactgacaggctggagtggtgtagctgttactaccacggcaacttcagcctcaatgctgcctttgagataaaattacactggatggcggtcactgccgctgtgctctttgaaatggtgcagggttggcaccgtaaggctacaagttgcggctttctgctggtaccagtgctggaaggcccattcgccctgccaagttatctgtacggggacccactcagggctcagttgtttattcccctcaacatctcatgcctcctaaaagaagggtccgaacacctgtttgacagcctaggtctgtacaagattaacatcctacccctgctcctcacatccctgctgagaacatcactgtcgatttcaaccttacaagagcagtgcttttgtagttgtccaacaccgtcagcaagcagccagggaagctcggggggagggggaacgccgcctgcccctcccactcgcacatgctcagccagaagcggctccgcaaccacgggccctaccaccccctgtagccccaagcatggagctccggcaccccagggaatgaagagtctcctgataggatgttag

SEQ ID NO: 220630 - DNA, 4719 bp, synthetic construct
  misc_feature 1..4719: note = Description of Artificial Sequence: Synthetic coding sequence
  source 1..4719: mol_type = other DNA
atgcgaaccacaaaagtgtataagttggtcatccacaagaaggggttcggaggatcagacgacgaactggtcgttaaccctaaggtctttccccacattaagctaggcgatatcgtggagatagcgcatccaaacgatgaatattctcctttactgctgcaggttaaatccttgaaggaggacctccaaaaggagacgatatccgtcgaccagacagtcactcaggtgttccggctcagaccgtaccaggacgtctacgtgaacgttgtggatcctaaggatgtgacccttgacctggtggagctcacattcaaagatcaatacataggtaggggggacatgtggcgactaaagaaatctctcgtgtcgacgtgtgcctatattacacagaaagttgagttcgcaggcatccgggcacaagccggtgagctgtgggttaaaaatgagaaagttatgtgtgggtacatttctgaggacactcgggtggtgtttcgctcaacatctgcaatggtatacatcttcatacagatgagctgcgagatgtgggactttgatatttacggagatttatactttgaaaaggcggttaatggctttcttgcagacttgttcactaagtggaaggagaagaactgtagccatgaagtaaccgtcgtcttgttctcccgaaccttctatgatgccaaatccgtagacgagtttcctgaaataaacagggcgagcatccgtcaagaccacaaaggtcggttctatgaggatttctataaggtcgtcgtgcagaacgaaaggcgagaagaatggacatccctgcttgtgacaatcaagaagctttttattcagtatccggttcttgtgcgcctggaacaggctgaaggattcccccagggcgacaattccactagcgcacaaggaaactacctggaggcaattaacttgtcgtttaatgtgttcgacaagcactacatcaaccggaattttgacaggacagggcagatgagtgtggtaataacccccggagtgggggtgtttgaggtagatagactactgatgattctgacaaaacaaaggatgattgataacggcattggcgtggacctggtgtgcatgggggaacagccactccacgctgttcctttatttaagctccataatcggagtgctccaagggattctcgtctcggagatgattacaacatcccacactggatcaatcattccttttacaccagcaaaagtcagctgttctgtaacagcttcaccccccgaattaaactggcgggtaaaaaacccgcttccgaaaaagccaagaacggaagagatacgtcactgggctcccccaaggagtcagagaatgcgctcccaatacaggtggattatgacgcctatgacgcgcaggtttttaggcttccgggaccatcccgggctcagtgcctcacaacttgcaggtctgtgcgcgaaagagaatcccactcaaggaaatccgccagtagctgcgatgtatcatctagtcccagccttccttccaggacattgcccacggaagaggttaggagccaggcgtccgatgactcgagtttggggaagtcagctaatatactcatgatacctcatccacacctccaccagtatgaggtctcatcctctctggggtacaccagcacaagggacgtattggagaacatgatggagcccccacagagagactcatcagctccgggtagattccacgtgggctcagccgagtctatgctgcacgtaaggcctggcggttacacgccgcagagggccttgattaatccgttcgccccttctcggatgccaatgaagttgacgtctaaccgcagaaggtggatgcacacattccccgtgggaccttcgggcgaggctatccaaattcatcaccagactcgtcagaacatggcagagttgcaggggagcggccagcgggatcccactcactcctcagccgaactcctggagctcgcatatcacgaggctgcagggcgacactcaaactcaaggcaaccgggagacggcatgtcttttttaaacttcagcggaactgaagaactttccgtcggactccttagcaactcgggagccggaatgaaccctcggacccagaacaaggattccctggaggattccgtgagcacaagccccgaccccatgcccggattttgctgtacggtcggcgtcgattggaagtccctcaccactccagcctgtctgcctctgaccacagactatttccccgatcggcagggattgcagaacgattataccgagggatgctatgacctgcttcccgaagctgacatagaccgcagagatgaggatggcgtgcagatgacagcccagcaagtttttgaagagtttatctgtcagcgtctgatgcaaggttaccaaatcattgtgcagccaaagacccagaagcccaaccctgcggttcccccacctctgtcgtcatctcccctctatagtcgaggactggtcagcaggaacagacccgaagaggaagaccagtactggttgagcatggggagaaccttccacaaagtgacccttaaggacaagatgatcaccgtaactaggtatctaccaaaatacccttacgagagcgctcagatccactacacctattctttgtgcccctcccattcagactcagagtttgtatcctgctgggttgaattcagtcatgagcgcctggaagagtacaagtggaattatttagaccagtatatctgttctgctgggagtgaggactttagcctcattgagtcactgaaattctggagaacacgcttcctgctcctgccagcctgcgttactgctaccaaacggataaccgagggggaagcccattgcgatatctatggtgacaggcctcgggcagacgaggacgagtggcagctcttagatggcttcgtgcggtttgtggagggtcttaacaggattaggcgtagacaccgctctgaccggatgatgcggaaaggcacggcaatgaaaggtttgcaaatgacaggacccatatcaactcattcactcgagtctaccgctccccctgtgggaaagaagggcacatccgctctgagcgcgttgctggagatggaagcaagtcagaagtgcctaggtgagcagcaggccgctgtacatggtggaaaaagttcagcccagtcagccgagagcagtagtgttgccatgactcccacatatatggacagtccaagaaaggtcagcgtagatcagacggccacaccaatgctcgatgggacctcactcggcatctgcacgggccaaagcatggacagggggaattcccagaccttcggtaacagtcagaatattggggaacaagggtactcttctactaattcctctgattcctcctcacagcagctggttgcttcatccctcacttccagctcaacgttgactgaaatattggaagccatgaaacaccctagtacaggggtccaactgctgtccgaacagaagggcctgtctccgtactgcttcatcagcgccgaggttgtgcactggttggtgaaccatgtggagggtatacagacccaagcgatggctatcgatattatgcaaaagatgttagaagaacaactgatcacacatgcctcgggagaggcctggaggaccttcatctacggcttctacttttataaaattgttaccgataaggaacctgatcgagtcgctatgcagcagccagccacgacatggcacaccgcaggcgtggacgatttcgcaagttttcagcgcaaatggtttgaagtagcctttgtggcggaggaattggtacattccgaaattccagccttcctccttccctggctgccatcgcggcctgcctcttatgcctcccgccactcttcattctcacgcagcttcggcggaagatcgcaggccgcagccctgcttgccgctacggtgcccgagcagagaacagtcaccctcgatgtggacgtcaacaatcggacagatcggctggagtggtgctcctgctattaccacggaaacttcagtttgaatgccgcttttgagatcaagctgcactggatggcggtgacggctgccgtactgttcgaaatggttcagggatggcacaggaaagctacgagttgcggattcctcctggtccctgtgcttgagggccctttcgcattaccaagctacctttatggggaccccctgcgcgcacagctgtttatacccctgaacatttcttgtctcctgaaggaaggatccgaacacctcttcgatagctttgaacccgaaacatactgggaccggatgcacctgtttcaagaggccattgcacaccggtttggctttgttcaggataaatattccgcgtccgctttcaatttccctgccgagaataagcctcagtatatccacgttactggcaccgtgtttttgcagctcccctattcaaagcggaagtttagtggacaacagaggcgaaggagaaattccacttcatctaccaatcagaacatgttctgcgaggagcgcgtgggttacaattgggcatacaacaccatgttgactaagacctggaggtcctctgccacaggtgatgaaaaattcgccgatcggctgctgaaagatttcactgacttttgcattaatcgcgataatcggcttgtgacgttctggacctcttgtttggaaaaaatgcatgcgtccgcaccatag

SEQ ID NO: 220631 - DNA, 4719 bp, synthetic construct
  misc_feature 1..4719: note = Description of Artificial Sequence: Synthetic coding sequence
  source 1..4719: mol_type = other DNA
atgagaaccacgaaggtgtataaattggtgattcataagaaaggctttggcggtagtgatgacgagctggtggtcaacccgaaagtgtttcctcacatcaagctcggtgacatcgtagaaattgcacatcctaatgatgaatattctcctctccttttgcaggtgaaatctctaaaagaggatttgcagaaagaaactatatctgtggatcagaccgtaacacaggtgttccgcttgcgtccatatcaagatgtgtatgtgaacgtggtcgaccctaaagatgtgactctagacctcgtggaacttaccttcaaagatcagtacatcgggaggggagatatgtggaggcttaagaagtcgttagtgtctacttgcgcgtatatcactcagaaggttgagtttgctgggatcagggctcaggccggtgagctgtgggtgaaaaatgagaaggtgatgtgcggctacatctcggaagacactagagttgttttccggtcaacatccgctatggtgtatatattcattcagatgtcctgcgagatgtgggactttgatatctatggcgacctgtatttcgaaaaagctgttaatgggtttctcgctgacttgttcacaaagtggaaagagaaaaattgctcccatgaagtgacagttgtcctattctccaggactttttatgacgccaagtctgtggatgagtttcctgagataaacagggctagtatcagacaagatcacaagggccgtttctacgaagatttctacaaggttgtggttcagaatgaacgtcgcgaagagtggaccagcttgcttgtgacgataaagaagcttttcattcagtacccagtactggtgcgtttggagcaggccgaaggctttcctcaaggtgataatagcacatcggcccagggcaactacctggaggctatcaatctgagttttaacgtatttgacaaacattatatcaatcggaatttcgacaggaccgggcaaatgagcgttgtcattacccccggagtaggagtcttcgaggttgacaggctgttgatgattctcacgaaacagcgaatgattgacaacgggattggcgtagacttggtttgcatgggggaacagccgctgcacgcagtcccattgttcaaattgcataaccgctccgccccaagggactcgcggctgggcgatgactataatatccctcactggatcaaccactccttttacacctcaaaaagccaattgttttgtaatagctttaccccaagaattaagctcgccggaaagaaacctgcttcagaaaaggccaagaatggccgagatactagcctgggctctcctaaggagagtgaaaacgccttacccattcaggttgactatgacgcctacgacgcccaggtttttcgtttaccgggaccatccagagcacagtgccttaccacctgtcgtagcgtgagggagagagaatctcacagcagaaaatccgcgagttcctgtgacgtgagcagtagcccttcgttaccctccaggacactaccaacagaggaggtacgaagccaggctagcgacgattcctctctgggaaaatcagctaatatcctaatgatcccacacccccatctccatcagtacgaggtctccagttccttaggttatacctccaccagagatgtccttgaaaacatgatggaaccaccccagagagattcgagcgcacccggaagatttcatgtcggctcagccgaatctatgctgcatgtgcgaccgggaggctacacaccccagagagcactgattaatccctttgctccatcccgcatgccaatgaagctgacgagcaatcgccgtcgctggatgcatacttttcccgtgggaccatctggagaggcaattcagatccatcaccaaacacggcagaatatggccgaactgcaagggtccgggcagcgggatcctactcattcttcggccgaattattggagttggcttatcatgaggctgcgggtcgccattccaactcacgacagcccggagacggcatgtccttcctgaacttctctggcacagaagaactgagcgttggactactttcaaattctggtgctggtatgaatcctagaactcagaacaaggactccctcgaggacagcgtgagcacttctcctgatccaatgccagggttctgttgcacagtcggggttgactggaagagcctgacaacacctgcctgtttgccacttactaccgattacttccccgatagacaagggctccaaaacgactacacagagggatgctacgacctgctgccagaagcggacatcgaccggagggacgaggatggcgtccaaatgacagcgcaacaggtgtttgaggagttcatatgccagaggttgatgcagggctaccagatcattgttcagccaaaaacacaaaaaccaaacccagccgtacccccacctctgagttcaagccctctttattctcgtggactagtaagtcggaaccgcccagaagaagaggaccagtattggctcagtatggggcgtactttccataaagtcaccctgaaggataaaatgattaccgttacaaggtacctgcccaaatacccatacgagtcagcccagatccactacacttactctctctgtccatcacatagtgattcagagtttgtctcttgttgggtggagttcagccacgagagactcgaggaatacaaatggaattatcttgatcagtatatttgttccgccggttccgaggatttttctctcattgagtcattaaaattctggagaactaggtttttgttgttacccgcttgcgtcactgcgacaaagaggattaccgaaggggaggcccactgcgatatctatggtgaccggccacgcgcagacgaggatgaatggcagctgctcgacggattcgtacgctttgttgagggcctgaaccgtattagacggaggcacagatcagaccgtatgatgcgtaaagggaccgcaatgaaaggccttcagatgaccggtccgataagcacacactctctcgaaagtacagcgccacctgtcggcaaaaaagggacttctgccctgtctgccctcctcgagatggaggcatcccaaaaatgtttgggcgaacagcaagccgctgtgcatggaggaaagtccagtgcacagtccgctgagagttctagtgtcgctatgacacctacgtacatggactcacccagaaaggtgtcagtagatcagaccgccacacctatgttggatggtacttcactcgggatttgtaccggacagagcatggacaggggtaattcgcaaacgttcggcaatagtcaaaacataggagaacaggggtatagttccacgaactcctctgatagctccagccagcagttggtggcatctagcttgacctcatccagtacactgacagaaatcttggaagccatgaagcaccccagtactggcgttcagctgctatcagagcagaaaggcctctcaccctactgcttcatttctgccgaggttgtacactggctggtcaaccacgtggaggggattcaaacacaggcaatggcaatcgatatcatgcaaaaaatgctcgaagagcagctgatcactcacgccagcggcgaggcctggaggacattcatctatggattttatttctacaagatcgttacagacaaagaacccgaccgagtcgcaatgcagcagcccgcaaccacgtggcataccgcaggagtggatgactttgcaagttttcagcgcaaatggtttgaggtggcctttgtggcggaagagttggtgcacagcgagatacctgcattcttgttgccatggctgccgtcaaggccagcctcctacgcttctcggcatagctccttcagtagatctttcggaggacgcagtcaagcagccgcacttctggctgctacagtgccggaacagagaaccgtaactctagacgttgatgtcaataaccgcaccgaccgactcgagtggtgtagctgctattatcatgggaacttttcgcttaatgctgcgttcgaaatcaagcttcattggatggccgtgaccgccgctgtcctattcgaaatggtacaaggatggcaccgcaaggcaacttcctgcgggtttcttctggtgcccgttctcgaaggaccattcgccttaccaagctatctatacggagatcctctccgcgctcagctgtttatcccattgaacatatcatgcctcctgaaggaaggatccgaacacctcttcgactcatttgaaccagaaacatactgggacagaatgcacctgttccaagaggccatcgcacacagattcggcttcgttcaggataagtatagcgccagtgcattcaattttcccgcagaaaacaaaccacagtacatccacgtcacaggcaccgtgttcctgcagctgccatatagcaagaggaagttttcagggcagcagcgccgtcgacgaaattccacatccagtactaaccagaacatgttctgcgaagaacgagtcggatacaattgggcgtacaacaccatgctaactaagacgtggcgctcaagcgctacaggcgatgaaaagtttgcagataggttgctgaaggattttaccgatttctgcattaaccgagataatcggctcgtgaccttttggacatcatgtttggaaaaaatgcacgcctctgccccttag

SEQ ID NO: 220632 - DNA, 138 bp, synthetic construct
  misc_feature 1..138: note = Description of Artificial Sequence: Synthetic coding sequence
  source 1..138: mol_type = other DNA
atgcggacaacaaaggtttacaagctggtgattcacaaaaaaggcttcggcggatctgatgacgagttggtcgtgaaccctaaagttttccctcacatcaagctgggcgacatcgtcgaaatcgcccacccaaactag

SEQ ID NO: 220633 - DNA, 4512 bp, synthetic construct
  misc_feature 1..4512: note = Description of Artificial Sequence: Synthetic coding sequence
  source 1..4512: mol_type = other DNA
atgcgcactactaaagtgtacaagctcgtgattcataaaaaaggttttggtggcagcgatgatgagttagtggtcaatcctaaggtctttcctcatatcaagttaggtgacatcgttgaaatcgcacaccccaacgacgaatacagcccattgttgctgcaagtgaaaagcctcaaggaagatctgcagaaggaaaccatcagcgtagatcagaccgtcactcaggtctttagattacgcccttaccaggacgtgtacgtcaacgtggtggacccaaaggacgtgacactcgatcttgtagagctgacattcaaggaccagtacattggcaggggcgacatgtggagactcaaaaaatccctggtcagtacttgtgcgtacatcactcagaaagtcgagtttgctggaatccgtgctcaggccggagaattgtgggttaaaaacgagaaggttatgtgtgggtacattagcgaggatacgcgcgtcgttttccggtccacttcagccatggtttacattttcatacagatgtcatgtgagatgtgggacttcgacatctacggagacctatacttcgagaaagccgtaaacggatttctggctgacttattcactaagtggaaggaaaagaattgttcccatgaagttacagtggtgctgttttctcgtaccttctatgacgcaaagtcagtggacgaattcccagaaatcaaccgcgcttcgatcagacaggaccataaaggaagattttacgaagacttttataaagtcgtcgtgcagaacgagaggcgggaggagtggacttctcttttggtgactattaagaagctgttcatccaatacccggtgctagtgcgcctcgagcaggcggaggggtttccacaaggagacaattcaacatcagcacaaggcaattatctcgaggctatcaacctaagctttaacgtattcgataagcactatattaacaggaacttcgacagaacaggccagatgtcagtcgtgatcactcctggtgtgggggtattcgaggtcgatcggctactgatgatcctgacaaagcagagaatgattgataatggtattggcgttgatctcgtgtgcatgggcgagcagccactccacgctgtgccactgtttaagttacacaataggtcggccccaagggattcaagactaggcgacgattacaatatcccccattggattaaccactccttttacacctcaaagagccagctgttctgcaactcattcacaccaaggatcaagctggcaggcaagaagcctgcatccgaaaaggctaagaacggaagggacacatcactggggtcccccaaggaaagcgaaaatgctctacctattcaagttgattatgatgcctatgatgctcaggtttttcggctcccaggcccatccagggcccagtgcctgacaacttgtagatccgtaagagagcgcgaaagccactcacgtaagagtgctagttcctgtgatgtaagcagttccccttcattgcctagcaggactttacccacggaagaggtacggtcacaggcttccgatgactctagccttggcaagtccgccaatattttgatgatcccccacccccaccttcatcagtacgaggtcagcagttccctgggctacactagcacacgtgacgtgctggaaaatatgatggagccccctcagagagacagtagtgctcctggtcggttccacgttggatccgccgaatcaatgcttcacgtgagaccagggggatacacgcctcagcgagcacttatcaacccctttgctcctagtagaatgccgatgaaactcaccagcaaccggaggcggtggatgcacactttccctgtgggcatgaaccctcgtactcagaacaaggactccctggaagactccgtaagtacatctcccgaccccatcctcaccctctcggcccctcccgtggtcccaggcttctgctgtacagtcggtgtggactggaagtctcttactaccccggcatgcctgcctctgaccactgactacttcccggataggcagggtctccagaatgactatactgagggctgttacgaccttctgccagaggccgacatagatcggagagacgaagacggggtccagatgactgcacagcaggttttcgaagagttcatttgccagaggctgatgcaggggtaccagataattgtgcagcctaagacccagaagcccaacccagccgtgccaccacccttgtccagttcacccctctactctagagggcttgtttcacgtaaccggccagaagaagaggaccaatattggcttagtatgggacgaaccttccataaagttactctgaaagataaaatgataaccgtgactagatatctgcccaaatatccatacgaatccgcacagattcattatacttacagcctttgtccgtctcattcagattccgagtttgtgagctgctgggtagagttctctcacgaacgcctggaagagtataaatggaattacctggaccaatatatctgctctgcaggctccgaagatttttccttgatcgagagcctgaaattctggagaacacgcttcctcctgctcccagcctgtgtgactgccacaaaacgcattacagaaggcgaagcacactgtgacatctatggtgatcggcctagggcggatgaagacgagtggcagctgctcgacggcttcgtcagattcgtggaaggccttaacaggattcgacgtagacataggtctgataggatgatgcggaaggggacagcgatgaaggggctccaaatgaccggcccaatttccacccatagtctcgagtctacagcccctcccgtgggtaagaaagggacgtctgctctcagcgccctcctggagatggaagcaagtcaaaagtgtctaggcgaacaacaggctgccgtacacggagggaagagcagtgcacagtccgcagaatcctcttctgtcgcgatgactcccacctacatggattcgcccaggaaggtatctgtggaccagacggccacgcccatgcttgacgggacctctctggggatctgcaccggccagagcatggaccggggtaacagccagacttttggcaattctcagaacataggggagcaggggtattcgagcactaatagtagcgactcgtcttctcagcaactcgtggccagcagtttgacaagctcatcaacactgacagaaattctggaagctatgaaacacccttctacaggcgtacaactcctgagcgaacagaagggcctctctccatattgcttcatttccgcagaagttgtacattggctggtcaaccacgtcgaaggtattcagactcaggcgatggcaatcgatatcatgcagaagatgctcgaagagcagctgataacgcatgcttcaggagaggcctggcgtacatttatctatgggttctacttctacaagattgtgaccgacaaagaacctgatagagtggctatgcagcagcctgcaaccacctggcataccgccggagtggacgatttcgcgtctttccaacgcaagtggttcgaagtggcgttcgtggcggaggaacttgtgcattcagaaattcctgcctttctgttaccttggctgccgagccggcctgcctcctatgcaagtcgccactcgtccttttcacgaagcttcgggggaaggtcacaggccgctgcccttttagccgctactgtccctgaacagcggacagttaccctggacgtggatgtgaacaatcgaacagaccggcttgaatggtgttcatgctactaccacggtaacttcagcttgaatgctgcattcgagattaagcttcactggatggccgtgacagcagcagtcctgtttgaaatggttcaggggtggcacaggaaggccacaagctgtggatttttgctcgtgccggtcctggaggggcctttcgccttgcctagctacctgtatggggatcccctgcgtgcccagctgttcatcccactcaacataagttgtctgctgaaggaggggtccgagcacctcttcgactcatttgagcctgaaacgtattgggatcggatgcacctgtttcaggaggctatcgctcatagattcgggtttgtgcaggataagtacagtgcttcggctttcaatttcccagcggagaacaaacctcagtacattcacgtaacaggaacggtctttctgcagctcccttacagcaagcggaagtttagtgggcagcagaggcgcagacgaaattcaactagttccactaaccaaaacatgttttgcgaagaaagggtcggctataactgggcctacaacacaatgttaacgaagacttggcggagctccgccactggggatgagaagtttgcggatcggctgcttaaagacttcactgacttctgcatcaatcgagacaaccggctagtcaccttctggacctcctgcctggaaaagatgcacgccagcgccccttag

SEQ ID NO: 220634 - DNA, 1995 bp, synthetic construct
  misc_feature 1..1995: note = Description of Artificial Sequence: Synthetic coding sequence
  source 1..1995: mol_type = other DNA
atgcggacaaccaaagtgtataaactggtgattcacaagaagggcttcggcggttctgacgatgagctagtggtaaatccgaaggtttttccccacatcaagcttggcgatatcgttgagatagcccaccctaatgatgagtatagtccgttgctattgcaggtaaagtctttaaaggaggatctgcaaaaagagacaatcagtgtcgaccaaactgtaacccaggtgttccgactgaggccgtaccaggatgtgtatgtcaacgtagtggaccccaaagtgagcacttgtgcatacattacccagaaagtggaatttgctggcatccgcgcacaagccggagaattatgggtgaagaatgaaaaggttatgtgcggctacatttctgaagatactagagtggtgttccggagtacctctgccatggtgtacatatttatccagatgagttgtgagatgtgggacttcgacatttacggcgacctctattttgagaaggcagtcaatggattcctggccgatctgtttaccaaatggaaggaaaaaaattgtagccacgaagtgaccgtggttctttttagcagaactttttatgatgcaaaaagcgtggatgagttcccggagatcaaccgcgcatccattagacaggaccacaaagggagattctacgaggacttctacaaggtagttgttcagaatgaacgccgagaggagtggacatcattgttagtgacaattaaaaaactgttcattcaatatccagttctggtgaggctcgagcaggccgaagggtttccgcagggggataacagcaccagtgcccaagggaattatctggaagcgattaacctgtcctttaacgttttcgataagcactacataaataggaattttgatcggaccggacaaatgtcggtggttattacccccggtgtgggcgttttcgaggtcgaccgactcctaatgattctcaccaagcagagaatgattgataacggaatcggggtggatctggtgtgcatgggagagcaacccctgcatgccgtaccactctttaagctccacaaccgctccgctcccagagactcccggttgggggacgactacaacatcccgcattggattaaccattcattctacacatctaagtcccagctcttctgtaactctttcactccgcgaatcaagttggctggcaaaaagccagcttctgaaaaggccaagaacggtcgtgacacatcactggggtcgcccaaggaatcagagaatgccctgccaatccaggtggactacgacgcgtacgacgcgcaggtgtttaggcttccaggcccttccagggcacagtgcctgaccacatgtcgctcggttagggaaagagagagtcacagcagaaagtccgctagtagctgcgacgttagctcttcaccatcactgccctcccgtacgctcccaacagaagaggtacggtcccaggccagcgatgacagctccctcggcaagtcagcgaacattctgatgatcccccacccacatttgcatcaatacgaggttagttcctcgctgggttacacatcgaccagagacgttttagagaacatgatggaacccccacagcgggactcctccgcacccggtcgattccacgtcggctccgccgagagcatgctgcatgtgcgccctggaggctatactcctcagcgcgctttgattaatcctttcgctcccagccgcatgcctatgaagctcacctctaacagacggcgttggatgcatactttcccagtaggaatgaatccgaggacgcagaataaggatagcctagaagattccgtctctacgtcaccagacccatccaagcggggtcaacttactggagagcgcggacgccagggcgtgtggggaggacagtccatgcgcaaacaggaagaagctctgtgggaagtcagcggacccgaggtgcacatccctttaggatatggcaaagcaatgtggtag

SEQ ID NO: 220635 - DNA, 1263 bp, synthetic construct
  misc_feature 1..1263: note = Description of Artificial Sequence: Synthetic coding sequence
  source 1..1263: mol_type = other DNA
atgaaacacccctccacgggcgtccagctactgtccgagcagaagggcctgtccccctactgctttatcagcgctgaagtggtccactggctcgttaaccacgtcgagggcatccagacccaagcaatggcaattgacatcatgcagaaaatgctagaagagcagcttataacacacgcttccggcgaagcttggcgcaccttcatctatggattttatttctataagattgtcacagacaaagagcccgaccgcgtcgcgatgcagcagcccgcaacaacatggcatacagctggggtagacgattttgcgtccttccaacgcaagtggttcgaggtagcattcgtggcagaggaactggtgcactctgagatccctgcctttctgctgccttggctgcctagtcggccagcctcttacgcttcgcggcactcaagtttttctcggtcttttgggggacgctctcaggccgctgccctccttgctgccacagtgcctgagcagcggacagtgactctcgacgtagacgtaaacaacaggacagaccgcctcgagtggtgcagctgttactatcacgggaatttctccctaaatgccgcatttgagatcaaattgcactggatggctgtaactgctgctgttttgttcgaaatggtgcagggatggcatcgaaaggcaacatcttgcggctttttgctcgtccccgtgctggagggtcccttcgctctgcctagctacttatacggggacccattgcgcgcacagctcttcatccctctgaatattagctgcttgttgaaagaaggctcggagcacctcttcgatagtttcgagccagagacatactgggatagaatgcatctgttccaggaagcaatagcgcaccgctttgggttcgtccaggataagtacagcgcctcagcattcaactttcccgcagagaacaaacctcagtatattcacgtaacaggcacagtctttctgcagcttccctactccaagcggaagttcagtggacagcaacgcaggcggaggaatagcacgagctccaccaatcagaatatgttttgcgaagagagagtgggttacaactgggcctacaacacaatgctgactaaaacctggaggtcttctgcaactggcgacgagaaatttgcggaccggctcttgaaggacttcaccgacttctgcattaacagagataacaggctggtaacgttttggacgtcttgcctggagaaaatgcacgcctctgcaccgtag

SEQ ID NO: 220636 - DNA, 4785 bp, synthetic construct
  misc_feature 1..4785: note = Description of Artificial Sequence: Synthetic coding sequence
  source 1..4785: mol_type = other DNA
atgcgcaccactaaggtttataagcttgtgattcacaagaaaggctttggcggaagtgatgatgagctggtcgtgaatcctaaggtattcccacatataaaactcggggatatcgtggagatcgctcatcccaatgatgaatattcacccttactgctgcaggtaaaatctcttaaagaggacctgcagaaagagaccatatccgtggatcaaacagttacacaagtcttccgcctgcggccttaccaggacgtgtacgtgaacgttgtggatccaaaggatgtgactcttgacctggttgagcttactttcaaggaccagtacataggtaggggcgatatgtggcggttgaaaaaatccctggtgtcaacctgcgcctacattacccagaaggtggaatttgctggtatcagagctcaggctggtgagctctgggtgaaaaatgaaaaggtcatgtgcgggtatatctcagaagacactcgggtagttttcaggtcaacatcagctatggtgtatatttttatccaaatgagttgtgagatgtgggacttcgacatctacggagatctgtacttcgagaaggcagtgaacggcttcctggcggacctgttcaccaaatggaaggagaagaattgctctcatgaagtcaccgttgttctcttttcacgcactttttatgatgccaaaagcgtggatgagttcccagagattaatagggcgtcgattcgacaagaccacaaaggcaggttctatgaggatttctacaaggtcgtggtccagaatgaacgcagggaggagtggacatcacttctggtcacgatcaaaaaactttttattcaatatcctgtgctggtgagactcgagcaggccgaggggttcccgcagggcgacaattctaccagtgcccagggtaactacctcgaggcgataaatctgtcatttaatgtttttgataagcactacattaataggaattttgatagaaccggacaaatgagcgtcgttattactcccggtgtcggagtgttcgaggtcgaccgtctgctgatgatcttaaccaagcagaggatgatcgacaacgggattggagtagacttagtatgcatgggagagcagccgctgcatgccgtgcccctgttcaagctgcacaaccgcagcgcacctcgcgattcaaggttaggagacgactacaatatccctcactggatcaaccactccttctacacctctaagagccagctattttgcaatagctttaccccacggatcaagttggcaggcaaaaagcctgccagcgagaaagcaaaaaatggaagagatacaagcctgggttcccccaaagaatcagaaaacgcgctgccaatacaggtggattacgacgcttatgatgcgcaggtctttcggctgccaggaccaagcagagcacaatgtctgactacctgcaggagcgtgcgcgagcgtgaatcccacagcaggaaaagcgccagctcgtgcgatgtcagctcaagcccaagtctcccttcccggactctgccgacagaagaagttcgaagccaagcatccgatgactcctctttgggaaaatcagccaatattctgatgatcccccacccacacttacaccagtacgaagtttcctccagcctgggttatacatcaacccgagatgtgttggagaacatgatggagccccctcagagagattcttctgcccctggtcgattccacgtaggctctgctgagtccatgctgcacgtgaggcctggaggttacactcctcagcgagctttgatcaacccctttgcaccctccagaatgccaatgaaacttactagtaaccggcgaagatggatgcacacctttcccgtgggtccctccggcgaagccatccagattcaccaccaaactcggcagaatatggctgaattgcaggggagcgggcagagagacccaacacacagctccgctgaattactcgagctcgcctatcacgaggctgctggtcggcactcgaattctagacagcctggagatggaatgtcgttcctgaatttcagcggcactgaagagctgtccgtcggactcctttccaattctggtgcaggaatgaaccccaggacacaaaataaggacagcctggaggacagcgtgtccacctcaccagacccgatgcccggtttctgttgtacggtgggcgtggattggaagagcttaacaacacctgcatgcctgcccctgaccaccgattactttcccgacagacagggcctgcagaatgactataccgagggctgttatgatctgttacccgaggccgatatcgaccgtagagacgaagatggagtgcagatgacagcacagcaggtttttgaggagttcatatgccaacgtttgatgcaggggtatcaaatcattgttcagccaaagactcagaagcctaatcccgctgtacctccgccactgagctcaagcccactgtactccagagggctagtatcacgcaacagacctgaagaagaagaccagtattggttgtccatgggcaggacgtttcataaagttacgttgaaggataagatgatcactgtaacaaggtatctcccaaaatatccttatgaaagtgcccaaatccactacacatattcactctgcccctcacattccgactcggagtttgtgagctgctgggttgaattctcccacgagaggctcgaggagtacaaatggaattatttggaccagtatatctgctctgcgggttccgaagacttcagcctaatcgagtctttgaagttttggagaactcgttttctgcttctgcctgcttgcgtgacagccaccaagcgcatcacggaaggcgaggcccattgtgacatatacggagatcgccctagagccgacgaggatgagtggcagttgctggacgggttcgtgaggttcgtggaaggcctaaacaggatccgtcggaggcataggagtgatcggatgatgcggaaaggcactgccatgaaaggcctgcagatgacggggcctatttctacccactctcttgaaagcaccgctcctcctgtcggaaagaaaggaacctccgccctgtccgccctcctggagatggaggcatctcaaaaatgcctcggcgaacaacaagcggcagtgcatggcggtaagtcttccgctcagagcgccgaatccagctcagtagccatgacgccaacatacatggactccccacgaaaagatggagccttctttatggaatttgtgcggtccccacgtaccgcctcctctgccttctacccacaggttagtgtggatcagaccgcaactccaatgctggacgggacatcacttgggatctgcaccggtcagtctatggacaggggcaactcccaaaccttcggtaatagccaaaatatcggggaacaagggtactccagcactaacagtagcgattcatcttcccagcaattagtagcatctagcttgacgtccagctccacccttacagagattctcgaagcaatgaaacacccctccacaggagttcaacttctctctgaacagaagggcctgtctccatactgttttatttctgcagaagtggtccactggctggtcaatcatgttgaaggcatccagactcaggctatggccatagacatcatgcagaagatgctcgaggaacagctcattacccacgcgtctggcgaggcctggcggacgttcatctatggattctacttttacaagattgtgactgacaaggaaccagatcgagtggccatgcagcaaccagcaactacctggcataccgccggagttgacgattttgcgtcgttccagcggaaatggttcgaagtggccttcgttgcagaagagttggttcactccgagattcccgctttcctcctcccctggctgccatcaaggccagcttcctatgcgagcagacactcgtctttctcgcggagtttcggtgggcgaagtcaagcagctgcactgttggcagccactgtacccgaacagcgtactgtgactttagatgtggacgtgaacaacaggaccgacaggcttgaatggtgctcttgttattaccacggaaatttttctctgaatgcagcgttcgagattaaattgcactggatggcagtgaccgccgctgtcctgttcgagatggtgcaggggtggcaccggaaggccacctcatgcgggtttctgctggtccctgtgctggagggcccattcgccttaccctcttacctctacggcgacccactgcgtgcccaactgtttattcccctcaatatatcctgtctgctgaaggaagggtctgagcacctcttcgactcttttgagccagagacatattgggacagaatgcatctttttcaagaggctatagcacaccgctttgggtttgtacaggataagtactcagcttctgccttcaattttcctgccgaaaataaaccacagtatatacatgtgactgggacagtgtttcttcagctgccctatagcaaaagaaagttttcaggccagcagcggaggagacggaacagtacttcttctaccaaccaaaacatgttttgcgaggagcgggttggatacaattgggcttacaacacaatgctaaccaaaacatggcggagcagtgccacaggcgacgagaagttcgccgataggctgcttaaggattttactgatttttgcatcaatcgtgacaatcgcctcgtgacattttggacgagttgccttgaaaagatgcatgcatctgcaccatag

SEQ ID NO: 220637 - DNA, 1536 bp, synthetic construct
  misc_feature 1..1536: note = Description of Artificial Sequence: Synthetic coding sequence
  source 1..1536: mol_type = other DNA
atggctaccgtacaggagaaggccgctgccctgaacctcagcgccctgcactcaccggcacatagaccacccggattcagcgtggctcagaagccgttcggagccacctatgtttggtcaagcattattaatacactccaaactcaggtggaggtgaaaaagagacggcacaggctgaaacgacataacgactgcttcgttgggtccgaggctgtagacgtgattttctcacatctgatccagaacaagtactttggtgacgtggatattcccagagccaaggtcgtaagagtctgtcaggcattgatggattacaaagtgtttgaggccgtgcccaccaaagtgttcggtaaggacaagaagccaacctttgaggactcatcatgctcgctctacagatttacaaccatccctaaccaggattcccaactgggcaaggagaataaattgtactctcccgctagatatgcggacgccctcttcaagtcctcagatatacgttctgcaagcctggaggatttgtgggaaaacttaagcctaaaacccgctaactcgccgcacgtgaatatttctgcaacactcagcccccaggtcattaatgaggtctggcaggaggagaccattggaaggttgctacaactcgtggatcttcccctgctggatagcttactgaagcaacaagaagctgttccaaaaatccctcagccaaagagacagtccactatggtgaattccagtaattacctagatcgtgggatccttaaggcatattccgattcccaagaggacgagtggctgagtgctgcaattgattgcctggaatatctccctgaccagatggttgttgagatttcccgcagtttccctgagcagccagacagaacggaccttgtcaaagaactgctttttgacgccattggtcgctactactcatcacgcgagccccttctgaatcatctaagcgatgtgcacaacggaatagcagagttgctggtgaatggcaagactgaaatagcactggaggccacacagctcctgctgaaattacttgacttccagaacagggaggagtttcgcaggctgctctatttcatggcagtggccgctaatccctctgagtttaagctgcagaaggaatctgataatcgaatggtggtgaaaagaatctttagcaaggccatcgtggacaacaagaatctatccaagggtaagaccgatctgcttgtcctgtttctgatggatcaccagaaggatgtattcaaaattcccggaacactccataagatcgtctctgttaaactcatggccattcagaatgggagggacccaaacagggatgcagggtacatctattgtcagcggattgaccagcgggactacagtaataatacggagaagaccaccaaagatgagttactaaacttgctcaagaccttggacgaagacagcaaattgagtgccaaggagaagaagaagctgctgggccaattttataagtgccatcccgacatttttattgagcacttcggagactag

SEQ ID NO: 220638 - DNA, 1509 bp, synthetic construct
  misc_feature 1..1509: note = Description of Artificial Sequence: Synthetic coding sequence
  source 1..1509: mol_type = other DNA
atgcggggtctgtgtgagttctactggcaggaatttggtatcaaaggttttagcgtggcccaaaagccgtttggcgctacgtacgtttggtcctccatcattaacacactgcagacacaggttgaagtcaaaaaaagaaggcatcgcctgaagcgccacaatgattgttttgtcggctcagaagccgtggacgtgatcttttcacaccttatccagaacaagtacttcggggacgtggatatcccacgggcaaaggtggtgagagtttgccaggcgctaatggattacaaggtgtttgaagctgtacctacaaaggtgttcggcaaggacaagaaaccaacatttgaagattcatcttgttcactctatcgctttactacgatccctaaccaggactctcaattgggtaaggagaataaactctacagccctgccagatatgcagacgccctgtttaaatccagtgatataaggtccgcctcgctcgaggacctatgggaaaatcttagcctgaagccagccaattccccacatgtgaacattagtgccacactgagtccacaagtgataaacgaggtatggcaggaggaaaccattggcaggctgctgcaactggtggacctgccattgctagacagcctgctgaaacaacaggaagccgttccaaaaatccctcaaccaaaacgacaaagtaccatggtgaattcttccaactaccttgaccgaggaatcttgaaagcctatagtgacagccaggaagacgaatggttaagcgccgctatcgactgcctggaatacctacctgaccaaatggtcgtggagatcagtagatcttttcctgaacagcccgatcgcaccgatcttgtgaaggaactgcttttcgatgccatcggcagatactactcatctagagagcccctcctcaaccatttatctgacgtgcataatggaattgccgaattgttggtgaatggaaagacggaaattgccctagaagcaacacagttattgttgaagctgctggatttccagaatagggaagagtttagaagattactttatttcatggccgtggctgcaaacccatccgagttcaaacttcagaaagagagcgacaatcgcatggtcgtgaagcggatattcagcaaggcaatcgtagataacaagaatctgtcgaaagggaaaactgacctgctggtgctgttcctcatggatcatcagaaggacgtctttaaaattcccggtacactccataagatcgtatctgtcaaactcatggcaattcagaacgggcgtgacccaaaccgtgatgccggatatatctattgccagcgtatagatcagagagattacagcaacaacaccgagaaaaccactaaagatgagctactaaatttgctcaaaacccttgacgaagactctaagctgtcagccaaggagaagaagaaactcctcggtcaattctataagtgtcacccggatatttttattgaacactttggtgattag

SEQ ID NO: 220639 - DNA, 1230 bp, synthetic construct
  misc_feature 1..1230: note = Description of Artificial Sequence: Synthetic coding sequence
  source 1..1230: mol_type = other DNA
atggaagagggtggatctacgggatccgccggatcagattcttccacttctgggtctgggggtgctcaacagcgtgagctcgaaagaatggctgaggtcttggtgaccggtgaacagctgaggctgcgcctgcacgaggagaaggttataaaggatcggcgacaccacctcaaaacatatccaaactgcttcgtagccaaagagcttattgactggttaatcgagcataaagaggcaagcgatcgggagaccgctattaagttgatgcagaagcttgcagatagagggattattcatcacgtttgtgatgagcataaagaatttaaggacgtcaagctgttttaccgcttcagaaaagacgatggaaccttcccactggataatgaggtgaaggccttcatgagggggcagagactgtacgagaaactcatgtccccagaaaatacgctgctccagcctagggaggaagagggagtgaagtatgaaagaacatttatggcctcagagtttctcgattggctggtgcaggaaggggaggctacgacacgtaaagaagcggaacagctctgccaccgcctcatggagcatggtattatccagcacgtgagcaacaaacacccgttcgtggactccaacctgctgtaccaatttcgtatgaactttagaagaaggcgccgtctgatggagctgttaaacgagaagtccccttcctcccaggagactcacgacagccccttttgtctaaggaagcaatctcacgacaaccgaaagtccacctcgttcatgtctgttagtccaagtaaggaaatcaagatcgtgagcgcggtcagaaggagcagtatgtcctcttgcggcagttccggttacttttcctcgtcaccaacactgagcagctcacccccagtcctatgcaacccaaaatccgtgcttaaaagacctgtaacttctgaagagctccttactccaggggctccatatgcccgaaagactttcaccattgtcggagatgccgtgggttgggggtttgtggtgaggggttccaagccctgccatatccaggccgtggatccctcaggtcccgcagccgcagccggaatgaaagtgtgtcaatttgtcgtgtcagtcaatggtctcaatgtgctgcacgtcgactatcgcacagtgagtaacctgatactgactggacccagaaccatcgtgatggaggtcatggaagagctcgagtgctag

SEQ ID NO: 220640 - DNA, 2877 bp, synthetic construct
  misc_feature 1..2877: note = Description of Artificial Sequence: Synthetic coding sequence
  source 1..2877: mol_type = other DNA
atgaggacacacactaggggcgcacctagcgtgttctttatctacctcctgtgctttgttagcgcctacatcactgatgagaatcccgaagtgatgattccttttaccaatgctaattacgattcacacccgatgctctacttcagtcgcgctgaggttgcggagttgcaactacgtgctgctagttcccatgaacatattgccgctcgtttgactgaagctgtgcacaccatgttgtcctcccctctggagtatctgccgccatgggatccaaaagattatagtgcaagatggaatgagatttttggcaacaatttaggagcactcgctatgttctgtgtactgtatcccgaaaatattgaagcacgcgatatggccaaggactacatggagcggatggcagcccagccaagttggctggtgaaagatgcaccttgggatgaagtgccgctagcgcacagtcttgtcgggtttgcgaccgcatacgatttcctgtataactacttgtccaaaacccaacaggagaagttcttggaagtaatcgctaatgcttctgggtacatgtacgaaacgagttacaggcgcggatgggggtttcagtacctgcacaaccaccagcccactaattgcatggctttacttactgggtcattggtgctaatgaatcaggggtacctccaggaagcttacctgtggactaagcaggtgctgacaataatggagaagtcgctggtcctgttacgcgaagttacagacggtagtctgtacgagggcgttgcttatggctcttatactactagaagtcttttccagtacatgtttctggtgcagcgacactttaacatcaatcacttcgggcacccatggctgaaacagcatttcgccttcatgtacaggaccattctgccaggttttcaaagaacggtcgcgattgctgactccaactataactggttctacgggccagagtcccagctggtgttcctggataagttcgtcatgcgcaacgggtctggcaactggctagcggaccaaatcaggagaaatcgggtggtggaaggtcccggtactcccagcaaggggcagagatggtgtacgctgcacaccgagtttctatggtatgacgggtcattaaagagtgtgccccctccagacttcggcacacccacactacattattttgaagactggggcgttgttacctatggtagcgccctcccagccgaaatcaatcgctcttttctcagcttcaaatccggcaagttaggaggtagggccatttacgatatagtacaccggaacaagtacaaggattggatcaaagggtggaggaatttcaacgctggccacgagcatcctgatcagaacagctttacctttgcccctaatggagttccattcattactgaggctctttatgggcctaagtacacattctttaacaacgtcctcatgttcagtcccgcagtgtccaagtcttgtttctccccttgggttggacaggtcaccgaagactgctcaagtaagtggtcaaaatacaagcacgatctcgctgcctcctgtcagggaagagtagttgcggcagaggagaaaaacggcgtcgttttcatcaggggtgagggcgtcggagcttacaacccccaactgaacctcaagaacgttcagaggaacctgatcctgctccatccgcagctgctacttctagttgaccagatccatctcggagaagaatctcctctcgaaaccgccgcttcgttttttcacaacgttgacgttcctttcgaagagactgtcgtggatggcgtccacggcgctttcatccgacagcgagatggactgtataagatgtactggatggatgatactggttacagtgagaaagccacctttgcgagtgtgacgtatcccagaggctatccctacaacggcactaattatgtgaatgtcacaatgcatctgagatctcccattacaagggcggcatacctctttatcggcccaagcattgacgttcaaagtttcacggtgcacggtgatagccagcaactcgacgtgttcattgcaaccagtaagcacgcttacgccacttatctgtggaccggagaagctactggacagtccgccttcgcacaggtgattgcagacaggcacaaaatcctgtttgaccggaattccgctatcaaaagcagcattgtacctgaggtcaaggactatgccgcaatcgtagaacaaaaccttcagcactttaaacccgtttttcagctcctggagaaacagatcctttcaagggtgcggaacaccgcgagctttaggaagacagcggagcgcctgttacggttttccgataagagacagactgaggaggccattgaccggatttttgcaatctctcagcagcaacagcagcagtctaaaagcaaaaagaaccggagagccggaaagaggtacaagttcgttgatgctgttcccgacatctttgcgcagatagaagtgaatgaaaaaaagatccggcagaaggctcaaatactggctcaaaaagagcttccaattgacgaggacgaggagatgaaagatctcttagattttgctgatgtcacctacgagaaacacaagaatggaggcctgattaagggccgttttggccaggcccgtatggtgacaaccacccacagccgcgctccaagtttaagcgctagctatactaggctgtttcttatcctaaacattgccatcttcttcgtgatgctggccatgcaacttacgtatttccagcgggcacagagtctccatggtcagcgatgtctttatgccgtccttttgattgactcttgtattctgttatggttgtattcatcctgttcccagagccagtgctag

SEQ ID NO: 220641 - DNA, 2877 bp, synthetic construct
  misc_feature 1..2877: note = Description of Artificial Sequence: Synthetic coding sequence
  source 1..2877: mol_type = other DNA
atgagaactcatacacgcggagcgcctagcgtgttctttatatatctgctgtgcttcgtgtccgcatacataaccgatgaaaaccctgaagtgatgatcccatttactaatgcgaattacgactctcatcccatgttgtacttcagccgagccgaagtcgccgagctgcagctgcgcgcagcctcctcccacgagcatatcgcggctcgcctgaccgaagccgtgcataccatgctttccagtcccttagaatacctgccaccgtgggaccccaaagactactccgctcggtggaacgagatctttgggaataacttgggcgcactcgcaatgttctgtgttctgtaccctgagaatatagaagctcgcgatatggccaaggattacatggagcggatggccgctcaaccatcctggcttgtgaaagatgccccatgggacgaggtgccattggcccacagtctggtggggttcgcaactgcttatgatttcctgtacaattacttgtccaagacccagcaggagaagtttctggaagtgattgcaaacgcaagcggatatatgtatgaaacgtcttatcgccgagggtggggattccagtacctccacaaccaccagcctaccaattgtatggccctgctcacaggctcgttagtgctgatgaatcagggttatctgcaggaggcctatctgtggacaaaacaggtcctgacgattatggaaaaaagcctggtgctcttgagggaagttacggacggcagtttgtacgagggagtcgcatacggaagctatacaactcgctctctattccagtatatgtttctcgtccagaggcacttcaacatcaaccacttcggccatccctggttgaagcagcacttcgctttcatgtatcgaacaatactgcctggctttcaaaggacagtggctatcgccgactcgaactataattggttctatggcccagagagccagctcgtgtttctggacaagtttgtcatgcgcaacggaagcggaaattggctcgctgaccaaattcggaggaaccgggtggtggaaggcccaggcacgcccagcaaaggacaacgatggtgcacgctgcacaccgaattcctctggtatgacggttcactgaagtccgtacccccaccagattttggaactccgacactccattattttgaggattggggagtggttacgtatggttccgccctgcccgctgagataaaccgcagcttcttgagcttcaagtccgggaaactgggcggaagggccatttatgacattgtgcatcgtaacaaatacaaagattggatcaaagggtggaggaactttaatgcaggccatgaacacccagatcagaattcttttacctttgcaccaaacggagtgccctttattactgaggccttgtacggcccaaagtataccttcttcaacaatgtcctgatgtttagcccagccgtcagcaagtcttgcttcagcccatgggtaggccaggtgactgaagactgtagctcaaagtggtccaaatataaacacgatctcgccgctagttgccagggtcgggtagtggctgcagaggaaaaaaacggggttgtgttcatccgcggagagggggtgggagcatataatccccaactaaacctgaagaacgtgcagaggaacctcattttacttcatccacagctgttgttgctggtcgaccagatccacctcggggaggaaagccccctggaaaccgccgcaagttttttccataacgtcgatgtgcccttcgaggagactgttgtcgatggggtccacggggcatttatccggcagcgcgatggcctgtacaagatgtactggatggacgacaccggctatagcgagaaggccacttttgcttccgtaacatatcccagggggtacccctataatgggacaaattatgtgaatgtgaccatgcatctgagaagtcctattacgcgtgccgcttacctatttatcgggccatctatcgacgtgcagtcctttactgttcacggggactcacagcaactcgacgtgttcatcgccacaagcaagcacgcttacgccacttatctgtggacaggggaagccacaggccagtccgcattcgcacaggttattgccgaccgccacaagatcttgtttgacagaaactctgccattaagagtagtattgtcccggaagttaaagattacgctgcaatcgtcgagcagaatctccaacacttcaagccagtgttccagctccttgaaaagcagatactgagccgagtacgtaatactgctagcttcagaaagacagctgaacgactcctcagattctccgacaagagacaaaccgaggaggccatagatcgaatttttgccattagccagcagcagcaacagcaaagcaagagcaagaaaaataggcgggctggcaagaggtataaattcgtggatgccgttccggatatattcgctcagatcgaggtcaacgagaaaaaaattcggcagaaagctcaaatattggcccagaaggaattgcctatcgatgaagatgaggagatgaaggatctgctggacttcgcagacgttacatacgagaagcataagaacgggggactcattaaggggaggtttggccaggccagaatggttactaccacccattcaagggccccaagtttatcggcctcatatacacggctgttcctgattctgaatattgctatctttttcgtcatgctggctatgcagttgacatacttccagagagcccaatctctgcacggacagcggtgcctgtatgcagtgctgctaatagattcctgcatccttctgtggctgtatagttcttgcagccagagccagtgctag

SEQ ID NO: 220642 - DNA, 501 bp, synthetic construct
  misc_feature 1..501: note = Description of Artificial Sequence: Synthetic coding sequence
  source 1..501: mol_type = other DNA
atgagaacccacacccgcggagctccatcggtctttttcatatatctgctctgtttcgtatcggcctatataacagatgagaaccccgaagtgatgatcccattcaccaacgccaattacgacagtcatcctatgctctacttcagccgggctgaggttgccgaactgcagctgagggctgcttctagccacgagcacattgcagccaggctgaccgaagctgtgcatactatgctatccagcccacttgaatacctgcccccatgggacccaaaggattattctgcacgatggaacgaaatcttcggaaataatttgggtgcactggcaatgttctgtgtgctttaccccgaaaacattgaggcccgagacatggctaaggattatatggagcgcatggcagcccaacctagttggttggtgaaggatgctccctgggatgaggtacctcttgcacatagtttagtagggttcgcgacagcatacgactttttatactag

SEQ ID NO: 220643 - DNA, 2877 bp, synthetic construct
  misc_feature 1..2877: note = Description of Artificial Sequence: Synthetic coding sequence
  source 1..2877: mol_type = other DNA
atgcgtacgcatactaggggagctccctctgtcttttttatttacctgttgtgtttcgtctcagcatatattactgacgagaaccctgaagttatgattcctttcactaatgccaactacgacagtcatccaatgttgtactttagtcgtgctgaggtggctgaattgcagctgagggccgcatcctcccacgagcacatcgccgctcggctcacggaagccgttcacacaatgctgagttcaccattggaataccttcccccttgggacccaaaagattactctgcccgttggaacgagattttcggaaacaacctaggtgccttagccatgttctgtgttttatatcctgaaaacattgaggcaagggacatggcaaaagactacatggagcgcatggcagcccaaccaagctggctggtgaaggatgctccatgggacgaagtgccgctggctcacagcctggtgggctttgctactgcctatgactttctgtataactatcttagtaaaacccagcaggaaaagttcttagaggtcatagccaacgcctccggctatatgtatgaaacttcatatcggagggggtgggggtttcagtatctgcacaatcatcagccaaccaactgcatggcactcctgaccgggtcccttgtcctgatgaaccagggatatctgcaggaggcgtatctctggacaaagcaggtgttgacgattatggagaaatccctggttctactgcgagaggtgactgatggctccttatatgaaggggtggcctatggctcttacacaactcggtctctcttccagtatatgtttcttgtgcaacgccatttcaacatcaaccacttcggacacccatggctgaagcagcattttgcctttatgtacagaactatattaccgggatttcagcgtaccgtagcaattgccgattcaaactataattggttttacgggcctgagtcccaactggtctttttggataaattcgtgatgcgcaatggttccggaaattggctcgccgatcagatccgacgtaaccgagtcgtagagggcccaggtacgccaagtaaggggcagagatggtgcacattgcatacagagtttctgtggtacgatggtagcttgaagtccgtcccccctcccgattttggcacacctacattgcactactttgaggactggggggtggttacctatggatccgctctgcctgctgaaataaatcgtagttttctgtcctttaaatccggtaaactcggtggccgtgcaatatatgatatagtacatagaaacaaatacaaagactggataaagggttggagaaacttcaacgcagggcacgagcaccccgatcagaattcatttacatttgctccaaacggcgtcccctttattacagaagccctttacggacctaagtacacgttttttaataacgtactgatgttctctcccgctgtttcaaaaagttgctttagcccctgggtaggccaagtaaccgaggattgcagttctaagtggtctaaatacaaacacgatctcgccgcatcctgtcagggtcgggtcgttgcagccgaggagaagaacggggtggtatttattagaggcgagggagtaggtgcttataacccgcagctgaacctcaagaatgtgcagaggaatcttattttgctgcacccacaactcctgctgcttgttgaccagatccacctgggcgaagagagtcctctcgaaacggcagcctctttctttcataacgtcgacgtcccttttgaagaaaccgttgtggatggcgtgcacggtgcctttatccggcagcgggacggtttgtacaagatgtattggatggacgataccggttacagcgagaaagccaccttcgcatccgtgacatatccacgcggatacccttacaatggcacaaactatgtgaacgtgaccatgcacctccgatctcccattacacgggctgcctacttattcattggcccatccatcgacgtacagagctttacggtccatggtgatagtcagcagcttgatgtattcatcgccacaagcaagcacgcatatgccacttacctctggactggggaagctaccggacagtctgccttcgctcaggtcattgctgatcgccataagatactattcgaccgaaatagcgcaataaagagctccatcgttcctgaagtgaaggactacgccgcaatcgttgaacagaatctgcagcacttcaagcctgtgtttcagctgttggaaaagcagatccttagccgcgtgcgaaataccgcctctttccgcaaaaccgccgaacgattgctgcgcttcagcgataagaggcagactgaagaagctattgacagaatctttgcaatatctcaacagcagcagcagcaaagcaagtcgaagaagaatcgtcgcgcaggtaagagatacaaatttgtcgatgcggttccagatatattcgcacagatcgaggtgaatgagaagaaaatacggcaaaaagctcagatactggctcagaaagagttgcctatcgatgaagacgaagaaatgaaagatttgcttgatttcgcagacgtcacctatgagaaacataagaacggcggacttatcaaggggagattcgggcaagctagaatggtgacaactacccacagccgggctccctccctgagcgcaagctatacaaggttgttcctgattcttaatattgcaatatttttcgtgatgcttgcaatgcagctcacttactttcagcgcgcacagtccctgcatggacaaagatgtctgtatgctgtcctgctcatcgacagttgcattcttctgtggttatacagctcttgctctcagagccaatgctag

SEQ ID NO: 220644 - DNA, 2934 bp, synthetic construct
  misc_feature 1..2934: note = Description of Artificial Sequence: Synthetic coding sequence
  source 1..2934: mol_type = other DNA
atgggaagctttgaagatggactcgccgctctggagatctggagatccgatgccacgatgagaacacatactcggggagcgccaagtgttttcttcatttatctcctttgcttcgtgagcgcatatattacagatgaaaatccagaggtcatgatccctttcacaaacgcgaattatgactcccaccctatgttatactttagccgggcagaggttgccgaactgcagttacgcgctgcctcctcgcatgaacacatagccgcacgtttaaccgaggctgtgcacacaatgttgtcatctccgctagagtacctgccgccatgggatcctaaggattacagcgctaggtggaacgagatttttggcaacaatctgggggctctggccatgttttgcgtcttgtatccagaaaacatcgaggcgagagacatggcaaaggactacatggaacggatggccgcacagcccagctggctagtcaaagacgcaccttgggatgaggtgccacttgctcacagcctcgtgggtttcgctactgcctatgacttcctctataactatctatcgaagacccagcaggagaaatttctcgaagtcattgccaacgccagtggatacatgtacgagactagttacagacgaggctggggattccagtatttacacaatcaccagcccaccaactgtatggcgctcctgactggtagtctcgtcctgatgaatcagggctacttacaggaggcctatctctggacaaagcaagttctcactattatggagaagtctctggttcttttacgtgaagtgactgacggatccctgtacgaaggcgtggcatatggctcgtacactaccagatccctgttccagtacatgttcctcgtgcagcgccactttaatattaatcattttggtcacccatggctgaagcagcattttgcatttatgtacaggaccatactaccgggattccagcgcaccgttgctatcgctgactccaactataactggttctatggcccagagtcgcaactcgtctttttggataagttcgtaatgcgcaacgggtcaggaaactggctggccgatcaaatacgccgaaaccgggttgttgaaggacctggcacccctagcaagggtcagcggtggtgtactctccatactgaatttctatggtacgacgggagcctgaagtcagtgccaccccctgactttgggaccccaacattgcactatttcgaggattggggcgtggtgacctacggctctgccctacctgctgagattaaccgctctttcctgagcttcaagagtgggaaactcgggggacgagctatctacgatatcgtacacaggaataaatataaggactggataaaggggtggcgaaactttaatgccggacatgagcatcccgatcaaaacagctttacctttgctcccaacggtgtgccattcatcacagaggcactttatggcccaaaatatacattttttaataatgtgttgatgttcagtcccgctgttagtaagagttgcttctctccctgggtggggcaggtcactgaggactgtagtagcaagtggtcgaagtataaacacgatctggctgcgtcctgccaggggagggtggttgcagcggaagagaagaacggggtcgtctttattagaggcgaaggagtgggtgcttataacccgcagctcaatctcaagaacgttcagcgtaaccttatcctattgcatccccagttactgttgcttgtcgatcagattcatcttggtgaagagagcccactggagaccgcggcatcctttttccacaacgtagatgtgccttttgaggagaccgtcgtggacggagtgcatggggcatttatcaggcagcgtgacgggctctacaagatgtattggatggatgatacaggatatagcgaaaaggccacctttgcttcggtgacttatcccagaggctatccttacaatggaacaaactacgtcaatgtgacaatgcacctgcgctcacccatcactcgcgctgcatacttattcattggcccttcgattgatgtgcagagttttaccgtccacggagactctcaacagctggatgtgttcattgcgacttcgaagcacgcttacgcaacttacctgtggacaggcgaggccaccggtcagagtgcgttcgcccaggtcatcgcagatcgccacaaaatcctatttgatagaaatagcgccattaagtcttccattgtgcctgaggtgaaggactatgccgctatcgtggagcaaaatttacagcacttcaaacctgtatttcaactgctggagaagcagattctgtcaagggtccgcaacaccgcctcctttcgcaagaccgccgaacggttgttgcgtttctctgacaaacggcagaccgaggaggccatcgaccggatttttgccatctctcaacagcagcaacaacaaagcaaaagcaaaaagaatcgtcgggcaggcaagagatacaagtttgtggacgccgtcccggatatttttgcccagatcgaagtgaatgagaagaagatcaggcagaaagcgcaaatactggctcagaaagagctacctattgacgaggacgaggagatgaaggacctcctggatttcgctgatgtcacatacgaaaagcataagaacggcggacttattaagggacgctttggtcaggcacgcatggtgaccacaacccatagccgcgcaccttcgctgagtgccagctacactaggctgttcctgattcttaacattgctatattcttcgtcatgctagctatgcagctgacatatttccagagggctcagtccctgcacggacagcgctgtttgtacgcggtactgctcatcgattcttgtatactattgtggctttattcctcctgctcgcagagccaatgctag

SEQ ID NO: 220645 - DNA, 570 bp, synthetic construct
  misc_feature 1..570: note = Description of Artificial Sequence: Synthetic coding sequence
  source 1..570: mol_type = other DNA
atggctgcactaaaagggaggcaggtctattgggccaccgctggcaagatttccgggtggacttggccccacgcgcctcggaggcctcacgtcctgttgctgaatgggattggcgtcgggggagctctgggttccatcgacgaactgctgtgccaggctctgagcaacggactgaatgtgccagaaggaagcttgaccagcacctgcgcccaacaacctgacggtctcatacacactgccaagtggggccatgtgcacagccttagctcccattcgccaggagctccaaatgcatgcggtgtattacctggaactacagtggacgatggcgtgcaccaggacctgcaacgagtcttagcatgtgagcaggtttacgatctggagggcatgcttgacgacgcccattcccacgagttgctggcggtcgtcgccgcagtgcatcaccatggcgtgtctaaagccctacacaacggtacgttgtcatttgtggaggccttcggagggattccaccgtgtaccgtgcggatcttccgcaggtggtttgggtgcttgggagacctggagatttag

SEQ ID NO: 220646 - DNA, 3669 bp, synthetic construct
  misc_feature 1..3669: note = Description of Artificial Sequence: Synthetic coding sequence
  source 1..3669: mol_type = other DNA
atgccaaaaggtggtgcaccaccgtggattatggccttgatgttcaccgggcacctgttgtttctagcgctgctgatgtttgccttttcaaccttcgaagagagtgtgagtaactactctgagtgggctgtattcactgacgacatcgatcagtttaaaacccaaaaggtgcaggattttcggcctaatcagaagttgaaaaagtctatgctgcatcccagcctgtattttgacgcgggtgagatccaggcgatgagacagaagagtagggcatcccatctgcacttgttcagggccattcgctccgcagtgacagtgatgctgagcaaccctacctactatttgccccctcctaaacacgcagattttgccgctaagtggaatgagatctatggcaacaacctgccaccgctggccctgtactgtctcctatgccccgaagataaagtggcgttcgagtttgtgctggagtatatggaccggatggtgggctataaggactggctggtcgaaaatgcacctggtgatgaggtacctataggccacagcctgacaggattcgctacagcgtttgactttctatacaatctactggataatcatcgccgtcagaaatatcttgaaaaaatctgggtgataacggaggagatgtacgagtacagcaaggtgcgctcatggggaaaacagctactgcacaaccatcaagctacgaacatgatagcactgctcacaggtgctctggtcacaggggttgataaaggttctaaggctaatatatggaaacaggcagtcgtggatgtgatggaaaagacgatgtttctgctgaatcacatcgtggacggatccctcgacgaaggggtggcttatggtagctataccgcaaagagtgtgacgcagtacgtattcctcgcgcagagacatttcaatattaacaatctggacaacaattggcttaagatgcacttctggttttattatgcaactttacttcccggtttccagcgaacagtgggcattgccgactcgaattacaattggttctacggacccgagtctcagctcgtcttcctcgataagttcatcctgaagaatggagctgggaattggttggcacagcaaattcgcaagcataggcctaaggatggtcccatggtcccttctacagcccaaaggtggagtacactgcatactgaatacatatggtacgaccctcaactgacccctcaaccacccgcagactacgggaccgctaaaatccatactttcccaaattggggtgtcgtgacatatggggcaggcttgccaaatacccaaactaacaccttcgtgtcgttcaagagtggcaaactgggaggaagagctgtctacgacattgtacattttcagccttattcctggatcgatggatggcgctccttcaatcctggccacgaacatccagaccagaacagctttacattcgctcctaatgggcaggttttcgtgtctgaggctctgtatggaccgaagctctcgcatctcaataatgtcctggtgtttgcgccaagcccatcttcccaatgcaacaagccctgggaaggacagcttggagaatgcgcccagtggctgaagtggactggcgaggaagttggagacgccgctggcgagataattaccgccagccaacatggcgagatggtatttgtgagtggtgaggccgtgtccgcatactcatctgcaatgcggctgaagagtgtttatcgcgcattgttgctcttaaactcccagactctgctggtggtggatcacattgaacgccaagaagatagtccaattaactcggtaagcgctttcttccacaacctggatattgattttaagtatattccctataaattcatgaatcggtataatggggcaatgatggatgtgtgggatgcccattataaaatgttctggtttgatcaccacggaaattcccctatggcctcaatacaggaggcagaacaggctgcagagtttaagaagcgatggacccagtttgtgaatgtgacgttccagatggagccaaccattacaagaattgcctacgtgttctacggtccttacataaacgtgtcatcatgtcgattcattgactcaagtaatccagggctgcagatttcattaaacgtgaataataccgagcatgtggtgagtattgtaactgactaccacaacttgaaaacacggtttaattatctcgggtttgggggtttcgcaagcgtggcagatcagggccagatcaccagattcgggctgggaactcaggctattgtgaaacctgtcaggcacgataggataattttccccttcgggttcaagttcaatattgccgttggtcttattctgtgtattagcctggtgatcctaacattccagtggcgtttttacctgtcgttcaggaaacttatgagatggattctgatccttgtgatcgcgctctggttcattgagctgctcgatgtttggagcacgtgttcccagcctatctgcgctaagtggacgcgcactgaggcagagggaagcaaaaagtctttgagcagtgaagggcatcatatggacctgcccgacgtggtaattaccagtctcccgggatcgggcgctgagattctaaagcagctcttctttaacagttctgatttcctctacatcagagtgcccactgcctatatcgacattccggaaactgagctggagattgattcgttcgtggacgcctgcgagtggaaagtttccgacatcagaagcggacacttccgtctcctccgaggctggttacagtcactcgtccaagatacaaaactccacttacagaatatccacctccacgaaccaaatcggggaaaacttgctcaatactttgcgatgaacaaggataaaaagcgaaagtttaagcggagagagtccctgcccgaacagcgctcccagatgaaaggggcattcgacagagatgcagaatatattagggcgctgcggagacacctggtatactatcctagcgccaggcccgtgctctcactgtccagtgggagctggaccctcaaactgcacttctttcaagaagtgctgggagcaagcatgagagcgctttacattgtacgggaccccagggcctggatttattccatgctgtacaatagcaagcctagcctctacagcttaaaaaacgtgcccgagcatctagcgaagctgtttaaaattgaaggaggcaaaggcaagtgcaatctgaattctggctatgcctttgaatacgagcccttgaggaaagagctgagcaagtctaaaagtaatgctgtgtctctcctgagccatctgtggctggcaaatacagcagccgcacttcgaatcaacactgacctgttgccaaccagttatcagctggtaaagtttgaagatatcgtccactttcctcagaagacaactgaacggatcttcgccttccttggtataccattgagcccagcttccctaaatcaaatcctgtttgccaccagcacaaacctcttttatttgccttacgagggagaaatttctcccaccaacacaaatgtatggaagcagaatttgccccgtgatgaaatcaaactgattgagaacatctgttggacacttatggacaggttgggataccccaaatttatggactag

SEQ ID NO: 220647 - DNA, 3639 bp, synthetic construct
  misc_feature 1..3639: note = Description of Artificial Sequence: Synthetic coding sequence
  source 1..3639: mol_type = other DNA
atggcccttatgttcactggtcatcttctttttctagccttactaatgttcgccttctctactttcgaggagtccgtatcaaactattcagaatgggctgtttttactgacgatatagatcagtttaaaactcagaaagtgcaggatttcagacctaaccagaaactgaagaagagtatgctccacccaagtctgtacttcgacgcaggtgagatccaggccatgaggcagaaatccagggcatcacaccttcacttatttcgggcaatccgttctgcagtgactgtgatgctgagcaaccccacatactacttgccgccacctaaacatgccgattttgccgctaagtggaacgagatttacggaaataacctccctcctctcgctctttactgcttgctctgtccggaggataaggtagcgtttgagttcgtgctcgagtacatggatagaatggtgggatataaggactggctggtcgagaatgccccaggggacgaagtgcccattggccacagcctaaccggattcgccaccgcttttgactttctgtacaatctgctggataaccatcgccgacaaaaatatttggagaaaatctgggtaatcactgaagagatgtacgaatacagcaaggttcgatcatggggcaagcagctcctccataaccaccaggctacgaacatgatagcgcttctcaccggagcgctggttaccggcgtggataagggatctaaagcaaacatctggaaacaggccgtggtggatgtgatggaaaaaaccatgtttctcttgaatcatattgtggatggtagcctagatgaaggggtggcttatggatcttatactgccaaaagcgtgactcaatacgtattcctggcccagaggcactttaatatcaataacttagacaataactggctgaagatgcacttctggttctattacgctaccctgctgcctggatttcagcgcactgttggcatcgctgattccaactataattggttttatggccctgaatcacaactggtgttcctagacaaattcatcttaaaaaacggcgcaggtaactggttagcacaacagatccgcaaacaccgtcccaaagatgggccaatggtgccgtcgactgcccagaggtggtcaacactgcacaccgagtatatctggtatgatccacagctaactccccaaccccctgccgattatggtaccgcaaaaatccacactttccctaactggggggtggtgacctatggggcaggcttgccgaacacccagactaatacttttgtcagctttaaatccggcaagttgggtggcagagctgtttacgacatcgtgcacttccagccctactcatggattgatggctggcgcagcttcaaccctggtcatgaacaccctgaccagaactcatttactttcgccccaaacggccaggtgtttgtgagtgaagctttatacgggccaaaactttcccacctgaacaacgtcctcgtgttcgctccgtccccctctagccagtgcaacaaaccatgggaaggccagctcggggagtgcgcccaatggcttaaatggactggagaagaggttggtgacgccgctggcgaaattatcacagccagccagcacggagagatggtgttcgtttctggggaggccgtctcagcttacagctctgcaatgcggttgaagtctgtgtacagggccctgcttttactgaattctcagacactgctggtggtggaccacatagagaggcaggaggacagcccaataaatagcgtgagcgccttttttcacaacctggacattgactttaaatacatcccttacaaatttatgaacagatataacggtgccatgatggatgtgtgggatgcccactataagatgttctggttcgaccaccacggtaactctcccatggcttcgattcaggaggccgagcaggctgcggagttcaaaaaaagatggacacagttcgtaaatgtgaccttccagatggagccaactattacgcgtatcgcttacgtgttctacggaccctatattaacgtcagcagctgccgatttattgattcctcaaaccccggactgcagatttctctgaacgtcaacaacacagagcacgtggtgtcaatcgtcaccgactaccacaacttgaaaactcggttcaactatctgggcttcggcggattcgcttctgttgcagaccagggccagatcaccagattcggactcgggacccaggccatcgttaagccggtcaggcatgatagaatcatatttccttttggatttaagttcaatatcgccgtgggactgatcctctgtatctccctcgtgatcctcacatttcagtggagattttatctatcttttaggaaactgatgaggtggatactaattttggtgattgcactgtggtttatcgagctgcttgacgtgtggagcacttgctcacaacctatctgcgccaaatggaccaggaccgaggccgaagggtccaaaaagtcactgagcagtgaaggtcatcacatggacctgcccgatgtggttattacatctctgcccggatccggagctgagattcttaagcagctcttcttcaactctagcgacttcttgtatatcagggttcccactgcgtatattgacatccccgaaacagaactggagatcgacagttttgttgacgcctgcgagtggaaggtttccgatattaggtccgggcacttccggctactccggggatggttacagtctctagtacaggataccaagctccacctgcagaacatacacctgcatgagcctaacaggggcaagttggcccagtacttcgcaatgaacaaggataaaaagaggaaattcaagcgtcgtgagtccctgccggaacagagatcccaaatgaagggcgctttcgatagggatgccgaatatatccgcgcactacgcaggcacctggtgtattacccttcggcgagacccgttttgtccttaagctcgggttcttggactctcaaacttcatttcttccaggaagtcttgggagccagcatgagggccctgtacattgtgagggacccaagagcttggatctactcgatgctgtataattcaaagcccagcttatattcgcttaaaaacgtgcctgagcaccttgccaaactgtttaagatcgaaggcggaaaggggaaatgtaacctgaattcaggatacgcgtttgaatacgagcccctgcgcaaggagctaagtaaaagcaagtcgaatgcagtgagcctactgagccatctctggttggctaatactgctgctgctctgaggatcaacaccgacctgctgccgaccagctaccagctcgtcaagttcgaggacatcgtccactttccgcaaaagaccacagagcgaatctttgcttttctagggatccctctgtcaccagccagcctcaaccagatcctcttcgctaccagtactaatttattctatttgccatatgagggagaaattagccccactaataccaacgtctggaaacaaaatcttccaagagatgaaattaaattgatagagaatatttgctggaccctcatggatagactcggctatccgaagtttatggactag

SEQ ID NO: 220648 - DNA, 606 bp, synthetic construct
  misc_feature 1..606: note = Description of Artificial Sequence: Synthetic coding sequence
  source 1..606: mol_type = other DNA
atggacctgtctctcttgtgggtcctcctccccctcgttactatggcttgggggcagtacggagactacggctatccctaccaacaatatcatgactatagtgacgacggctgggttaacctgaataggcagggcttctcttaccagtgtccccagggccaggtgattgtagccgtgaggagtattttcagcaagaaggagggttctgacaggcagtggaactatgcttgcatgcccactccacaatcgttgggggaacccaccgaatgctggtgggaagagattaaccgtgccggaatggaatggtatcagacatgttccaataacggtctggtggccggatttcagtctcgatactttgagtccgtgctagatcgtgaatggcagttctactgttgccggtatagcaagcgctgcccatactcatgttggctgacaaccgagtaccctggccattacggggaagagatggatatgatctcatacaactacgactattatattcgtggcgcaaccacaaccttctcagcagtggagcgggaccgccagtggaaatttatcatgtgtcgcatgactgagtacgactgtgagttcgctaacgtttag

SEQ ID NO: 220649 - DNA, 333 bp, synthetic construct
  misc_feature 1..333: note = Description of Artificial Sequence: Synthetic coding sequence
  source 1..333: mol_type = other DNA
atgagattcatgacccttctattcctgacagctcttgccggtgccctggtctgtgcctatgatcctgaggccgctagcgcgccagggtccggaaacccgtgtcacgaggcatcagcggctcagaaggagaatgccggagaagacccagggctggcaaggcaagcacctaaaccacgaaagcagcgctccagtttactggaaaaaggactggatggcgcaaagaaggccgtggggggattagggaagctgggcaaagacgccgtggaagacctagagtccgtaggcaaaggagccgtgcacgatgtgaaagacgtccttgactccgttctctag

SEQ ID NO: 220650 - DNA, 1191 bp, synthetic construct
  misc_feature 1..1191: note = Description of Artificial Sequence: Synthetic coding sequence
  source 1..1191: mol_type = other DNA
atggcactgctaacaaacttacttccactatgttgcctggcgctgttggcactaccagcccagtcgtgcggtcctgggagaggacctgtgggccgaaggcgctacgctcgcaaacagctagtcccactgctttataaacagttcgtgccgggtgttccagagcgcactcttggggcttctggccctgctgaaggtagggtggcccgtggatccgaacggttccgggatttggttccgaactacaatcctgacatcatcttcaaggatgaggagaattccggagccgaccgcctgatgacagaacggtgcaaggagcgcgtgaatgcactggccattgccgtgatgaacatgtggcctggcgttcggctgcgggtaaccgaggggtgggatgaggatgggcaccacgcccaagattctttacactacgagggaagggcactggatatcactacatcagaccgcgatcgaaacaagtacggcctactggcgaggcttgccgtcgaggccggattcgactgggtttactacgagtctcgaaatcacgtgcatgtctccgtcaaggccgacaatagtctggctgtgagagcgggtggctgttttccagggaacgctaccgtccgtctgtggtctggcgagcggaagggcctccgagaacttcaccgtggcgactgggtgctcgcagctgacgcaagcgggagagtagtgcccacaccagttctgctgttcctggacagagaccttcagaggcgcgcatcgttcgtagctgtagaaacggaatggccaccgcgaaagttgctgctgaccccctggcacctggtctttgctgccagggggccagcgccagctccgggagattttgcgccagtttttgctaggcggcttcgcgctggcgattccgtactggcacctggcggtgatgccctgcggcctgcacgggtcgctcgggtggcccgagaagaggccgtcggggtttttgccccactgactgcacacggaacactcttggtaaatgatgtgctcgcttcttgttacgccgtgctggaatctcatcagtgggcccaccgggcatttgctcccctgaggctgctccacgctctgggggctctgttaccgggaggcgcagtgcagccgaccggaatgcattggtactcccgtcttctgtatcgactcgcagaggagctcctgggatag

SEQ ID NO: 220651 - DNA, 1413 bp, synthetic construct
  misc_feature 1..1413: note = Description of Artificial Sequence: Synthetic coding sequence
  source 1..1413: mol_type = other DNA
atgtctcaagcgtactctagcagccagcgcgtctcctcttataggcgaacctttggcggagccccagggtttcctcttggatcccctctgtcctctcctgtgtttccgagggcaggctttggtagtaaaggtagttcctccagcgtcacctcacgcgtgtatcaggtctctaggacttcaggaggtgcagggggactcggcagcctccgcgcatctcgcctagggactacaaggacaccctctagttatggagcaggcgaacttctggatttcagtcttgctgacgccgtcaaccaggagttcctgaccacacggacgaatgagaaggtggagctccaggaacttaatgatcggtttgcgaattatatcgaaaaggtgaggtttcttgagcagcagaacgccgcactggctgccgaggtgaatagactgaaaggaagggagccaacacgggttgctgagctctatgaggaagagctgcgtgaactgcgcaggcaagttgaggtcctgacaaaccaacgagccagggttgatgttgaaagagataacctgctagacgatctgcagcggctgaaagccaagctccaggaagaaatccaactgaaggaggaggccgaaaataacctggccgctttcagggccgacgtggatgcagctactctcgcacgtatcgacctggagcgcagaattgagtcactgaacgaagagattgcctttctaaagaaagtgcacgaggaagagatccgcgaactgcaggctcagctgcaggaacagcaggttcaggtagaaatggatatgtcaaagcccgacctcacagctgcgctgagggacatcagagctcagtacgagactatcgccgcaaagaacattagcgaggcagaggaatggtacaagagcaaggtatccgacctgactcaagctgctaacaagaacaacgacgcccttcgccaagcgaagcaagagatgatggagtaccggcaccagatacagtcgtacacgtgcgaaatcgacgccctgaaaggaacaaacgatagcctgatgagacagatgcgcgaattggaagatcgttttgcatcagaagcgagcggataccaggacaatatcgctagactcgaggaggagatcaggcacctgaaagacgaaatggcacggcatctacgagagtatcaggacctgcttaatgtaaagatggctctagatgtcgagattgcgacataccgaaagctcttagaaggcgaggaatcacggatcaacctgcccatccagacatattcagctctgaattttagagaaacctctccagaacagcgagggtctgaggtacatacgaagaagacggtgatgataaaaaccatcgagacacgcgatggagaagtagtgtccgaggctacacagcagcaacatgaagtcctgtag

SEQ ID NO: 220652 - DNA, 2523 bp, synthetic construct
  misc_feature 1..2523: note = Description of Artificial Sequence: Synthetic coding sequence
  source 1..2523: mol_type = other DNA
atggcgctggcctcggctgcccctggctctatattttgtaagcagctgcttttttcattgctggtattgacccttctatgtgacgcctgccagaaagtataccttagggtgcccagtcacctgcaggctgagactctggtcgggaaggtcaatttagaggagtgcctgaaaagcgcaagcttgattagaagctctgaccctgccttccgcattcttgaagatggatccatctatacgacccacgacttgattctgtcgtcagagcgcaagagcttcagcatttttctgagtgatggccagagaagggaacagcaggaaatcaaggtcgtactgagcgccagagagaataaatccccgaaaaagcgccatacaaaagatacagccctgaaacgaagcaagcggagatgggcaccaattcccgcaagcctcatggaaaactcactaggtccctttcctcagcacgtgcagcagatccagagcgatgccgctcaaaactataccatcttctactccatctccgggcctggagtggataaggaaccgttcaacctgttttacatagaaaaagataccggtgatatcttttgtacgaggagcatcgaccgagaaaagtatgagcagtttgccctctacggttatgcaactaccgcagacggttatgcgcctgaatatcccttaccgctaatcatcaagatcgaagatgataacgataatgctccctattttgaacatagggtgacaatttttacagtaccagaaaactgccgctccggtaccagcgtcggcaaggtcaccgctaccgatttagatgagcctgacactctgcatacccggctaaagtataaaattctgcaacagatcccagatcatcctaagcatttctccatccatcccgatacgggagtcatcactacaactacgccgtttttagaccgcgaaaagtgtgacacttaccagctgatcatggaggttcgcgacatgggagggcagccctttgggctgttcaatacgggaacaattacaattagtttggaggacgagaatgataaccctccttccttcaccgagacctcctatgtgactgaggtggaggaaaacaggatcgatgtggaaatattgcggatgaaggtgcaggatcaggatctgccaaacacacctcacagcaaagctgtatataaaattttacagggaaacgaaaacggtaatttcatcattagtaccgatcccaacaccaatgagggggtcctttgtgttgtaaagcctctcaactacgaggtcaataggcaggtgattctgcaagtaggtgtgattaacgaagcacagttctctaaagctgccagtagtcaaacaccaaccatgtgcacaacgactgtgactgtaaagattattgactctgacgagggccctgaatgtcacccacccgtgaaggtgattcaatcccaagacggcttccctgctggccaagaacttttagggtataaagctctcgaccccgagattagttcaggtgagggtctgaggtatcagaagctgggagacgaagataactggttcgagatcaatcagcataccggagatttgcgcacccttaaagttcttgaccgagagtctaagtttgtgaaaaacaaccaatataatatttcagtggtggctgtggatgctgttggtagatcctgtaccggcactctggtcgttcacctggatgattacaatgatcacgcccctcagattgacaaggaagtaaccatctgccaaaacaacgaggattttgccgtgctcaagcctgtcgatcccgatggccctgagaacgggcctccgttccaatttttcttggacaatagtgcctctaagaactggaatatagaggagaaggatggaaagactgctatcctgagacagaggcagaatttggattataattattacagtgtgccgatccagatcaaagatcgccacgggctcgttgccacacacatgcttactgtccgcgtctgcgactgtagcacgccatccgagtgtagaatgaaggataaatccacccgagatgtacggcctaatgtcattcttggaaggtgggccatattggctatggtcttagggtcggttctcctcctgtgtatcctgttcacgtgtttttgcgtcacagcaaagcgcacagtcaaaaaatgctttcctgaggacatcgctcaacagaacctgatcgtgagcaatactgaaggacccggagaggaagtcactgaggccaatataagactcccaatgcagactagtaacatatgtgatacctcgatgagcgttggcaccgttggcggtcagggcattaagactcaacaatccttcgagatggtgaagggcggttacacgctggactcaaacaagggagggggacatcagaccttggaatccgtgaagggtgtcgggcagggagataccggaagatatgcctatacggattggcagtcatttacccagcctcggttgggcgaggagtccattaggggccacacacttataaagaactag

SEQ ID NO: 220653 - DNA, 2685 bp, synthetic construct
  misc_feature 1..2685: note = Description of Artificial Sequence: Synthetic coding sequence
  source 1..2685: mol_type = other DNA
atggctctggccagcgctgccccaggttccatattttgcaagcagttgttattttccctgctcgtcctgaccttattatgcgatgcttgccaaaaagtctaccttcgggtgccaagccatctgcaagctgaaaccctcgtgggaaaggtgaacctggaagagtgtcttaaatccgcgtcactgatccggtccagtgatcctgcatttcggatactggaggatggctcaatatataccactcatgacctaattctgtcctctgagcgcaagtccttcagcatttttctctccgatggacagaggagggagcagcaggaaattaaagttgtcttgagtgccagggaaaacaaaagcccaaagaaaaggcacactaaagatacggctctgaagcgtagcaaacgacgatgggcccctatcccagccagtttgatggaaaactctctaggcccattcccccagcatgttcagcagatccagagtgacgccgcacagaattacaccatcttctactcaatctctggccctggcgtcgataaggaacctttcaatttgttctatatcgagaaagacacaggcgacattttctgtaccaggagtattgacagagagaaatatgaacagttcgccctgtacggatacgctaccaccgctgacggctatgccccagaataccccctgcctcttatcataaagatcgaagacgataatgacaatgccccttattttgaacatcgggtgactatattcaccgtgccagaaaattgcaggagcgggacgtctgtcgggaaggtcacggccacggatcttgatgaaccagacaccctccatacgagattaaagtataagatcctccagcagatcccagatcaccccaaacacttttcaatacaccctgataccggcgttatcaccacgacaactccctttctggatcgtgagaagtgtgatacttaccagcttatcatggaagtccgggatatgggcggacagcctttcgggctcttcaatacaggcaccattactatcagccttgaggacgagaacgataatcctccgagcttcactgagacttcatatgtcaccgaggtcgaggaaaatcgcattgatgttgagatactcagaatgaaagtacaggatcaagacttacccaataccccgcattctaaggcagtgtacaaaatcctgcagggtaacgagaatggaaattttatcatctccaccgaccccaacacaaatgagggagtgctctgtgtggtaaagcctctgaattacgaagtgaacagacaggttattctgcaagtcggtgtaattaacgaagcacagttttcgaaggctgctagctctcagacacctactatgtgtacaacaacagtcaccgtcaaaatcatcgactctgacgaagggcctgagtgccaccccccagtgaaagtgattcagtcccaggacggtttccctgctggacaagagctgctaggttataaggccctcgatccagaaatcagctccggggagggcctacgctaccaaaagctgggtgacgaggacaattggttcgagataaatcaacacaccggggacttgcgaactctcaaagtcctggatcgagaaagtaaatttgttaagaacaatcagtataatattagcgtggttgctgtagacgctgtcggacgaagttgcacaggcaccctagtggtgcacctcgacgactacaatgatcacgcacctcagatcgataaggaagtgaccatttgccagaacaacgaggactttgcagtgcttaagcccgtggaccccgatgggccagaaaatggccctccttttcagttttttctggacaattccgcttctaaaaattggaatattgaggagaaggacgggaagacggctatcctcagacaacgccagaaccttgattataattattatagtgttcccatccagataaaggaccggcacggtctggtggctacacacatgttgactgtccgggtgtgtgattgtagcactccatcggagtgtcgtatgaaggataagagcacaagagacgtaaggcctaacgttattctgggcaggtgggccattctggctatggtcctagggagcgttctcctgctttgcatcctgttcacctgtttttgtgtgaccgctaagaggaccgttaagaagtgctttcctgaagatatagcccagcagaacctgatagtgagtaatacagagggcccaggtgaggaagttactgaggcaaacattagactgcctatgcagacttccaatatatgtgatacgtctatgtctgtcggtactgtcggaggtcaaggcattaaaacgcagcaatcctttgagatggtcaagggcggttataccctggacagtaataaaggtgggggtcaccagacccttgagtctgtcaagggcgttggccaaggcgatacagggaggtacgcctacaccgactggcagagttttacccagcctagattaggggaaaaggtctacctgtgcggacaggatgaagaacataaacactgtgaagactacgtatgctcatataattacgagggcaaaggcagcttggccggatcagttggctgctgtagcgataggcaagaggaggaagggttggaatttctggatcacctggagcctaaattccgaacgctcgcaaagacgtgcatcaagaagtag

SEQ ID NO: 220654 - DNA, 2691 bp, synthetic construct
  misc_feature 1..2691: note = Description of Artificial Sequence: Synthetic coding sequence
  source 1..2691: mol_type = other DNA
atggcggctgccggacctcggagaagcgtgcgtggtgctgtgtgcttgcacctactgctaacactggttatcttttctagagctggcgaagcgtgtaaaaaggtgatcttaaacgttccgagcaaactcgaagcagacaaaatcatcggtcgtgtcaatctggaggagtgcttccgttccgcagaccttatcagatccagtgatccggactttcgtgtgttaaacgacgggtcagtatacacagccagagcagtcgccctctctgacaaaaaacggtcttttacaatctggctgtcagataagcgcaaacagacacagaaggaggtgacagtcctcctggagcaccaaaagaaagttagtaagaccagacacacaagggaaaccgtgctgcgacgggcaaagcgacgctgggccccaatcccttgttctatgcaagagaactccctagggccattcccgctctttctgcaacaggtggaatctgatgcagcccagaactatacagtgttctactcaatttccggacgtggagtggacaaagaacctctgaacttattttacattgagagggatactggaaatctgttctgcacccggccagttgatcgtgaggaatatgacgtatttgatctgattgcttacgctagcaccgcagatggatattcagcagacctcccccttccactgcctattcgggttgaggacgagaacgacaaccatcctgtgtttaccgaggccatttataacttcgaggtgttggagtcgtccagaccagggacaacagtaggcgtggtgtgtgcgacagatcgcgacgagccagatactatgcacaccaggttgaaatactcgatactgcagcaaactccccgaagccccggattgttttctgtgcacccatccacaggagtgataaccaccgtctcccactacctagatcgcgaggtggttgataagtacagtctcataatgaaagttcaggatatggacggccaattttttggactcatcggtacttccacctgcattatcactgtaactgactcaaacgataacgcacccactttcagacagaatgcttatgaagcctttgttgaggagaatgcattcaacgtagaaatcctccgcatacccattgaggataaagatcttatcaacaccgccaactggcgagtcaacttcaccatcctgaaaggaaatgaaaacggacattttaagatctctactgacaaagaaacaaacgaaggcgtccttagtgtcgtcaaaccacttaactacgaggaaaatcgccaggtgaatctggagattggggtgaacaacgaggccccattcgcacgagatatccctcgtgtgacagccttgaaccgagcactcgtaaccgtgcacgtacgcgatctggatgaaggaccagagtgcacacctgctgcccagtacgtgagaattaaggagaatctggcagttgggtcaaaaataaacggttacaaggcttacgaccctgaaaatcgaaatgggaacggcttgcgctacaagaagcttcatgacccaaaggggtggatcacgatcgatgagatttccggctcaattattacctccaagatactggacagagaagttgaaaccccaaagaatgagttatacaacataactgtcctggcgatcgacaaagatgatcgctcttgtacaggaaccctggcagttaacatcgaagacgtgaatgataacccaccggaaattcttcaggagtacgtggtgatttgtaagcctaaaatggggtatacagacattctggcagttgaccccgacgagcccgtccatggcgctcccttttacttctcattgccaaacacctcccccgaaataagccgcttgtggtctctgacgaaggtgaacgacaccgctgcaagattgagttatcagaagaacgccggatttcaggagtatactatcccaatcacagtgaaggatcgggcaggtcaggccgctaccaagctccttagggttaacctatgtgagtgcactcaccccacccagtgtagagcaacctcgagatcaaccggagtgatcttgggtaaatgggcaatattggcgattttgctgggcatagcattattattctctgttctactgaccttagtttgtggggtgttcggcgcaaccaaagggaaacggtttcccgaggacctggcccaacagaatctgataatcagtaataccgaggcaccaggggacgacagggtgtgttcagcgaacgggtttatgacgcagactaccaacaacagcagccagggcttctgcgggactatggggtccggcatgaaaaacgggggtcaggagacaatagaaatgatgaagggcggaaaccaaaccctggaaagctgtaggggggcaggccatcaccatactctcgatagttgtaggggtggccatacagaggtagacaactgccgctatacgtactctgaatggcatagtttcacacaacccagactgggagagaaattgcatagatgcaaccagaatgaggaccgaatgccctcccaggactatgtgctgacatacaactacgagggcagggggagcccggctggcagtgttgggtgctgcagcgaaaaacaggaggaagacggcctcgacttccttaataacctcgaaccaaagtttataactctagccgaggcttgtactaagcgctag

SEQ ID NO: 220655 - DNA, 2520 bp, synthetic construct
  misc_feature 1..2520: note = Description of Artificial Sequence: Synthetic coding sequence
  source 1..2520: mol_type = other DNA
atggccgctgccggtccaaggagatccgtgcgcggagccgtgtgtcttcatctgctgctgacactcgtgatcttttcacgggctggggaggcttgtaagaaggtgatcctgaatgttccctcaaagctggaagccgataaaatcatcggcagagtcaatctcgaagagtgcttccgaagcgcagacctcattaggtcgagcgatccagacttcagagtattgaacgacggatcagtgtacacggccagggcagtggccctgagtgataaaaaaaggtcatttacgatttggttgtctgataagcgcaagcaaactcagaaggaggtgaccgtgctgctagaacaccagaagaaggtgtcaaaaaccaggcacactcgggaaacagtcctgagacgagccaaacgtaggtgggcccctatcccttgcagtatgcaagaaaactcactgggacctttcccactatttttgcagcaggtagaatcggacgccgctcaaaactacacagtcttttattctatttctggaaggggggtggataaagagcccctcaaccttttttatatagagcgggacaccggaaacctcttctgcacccgacctgtggatagagaagaatatgacgtatttgacctgattgcttacgcgtccaccgcagacgggtattccgccgatctgcctcttccactaccaatcagggtagaagatgagaatgacaaccatcccgtcttcactgaggcaatatacaatttcgaagtcctggagtcaagccgccctggaacaacagtgggcgtcgtatgtgctaccgaccgggatgaaccagataccatgcacacccgcctcaagtactccattctgcagcagacacctcggtcacctggtctgtttagcgtgcaccctagcacaggagtaatcactacagtgtcccattatttagaccgcgaagtcgtggataagtattcactcattatgaaggttcaggacatggatggccaattctttggactgatcggaactagcacttgtatcattacagtgactgactccaatgataatgcacccacatttcgccagaatgcctacgaggccttcgtcgaggagaatgcatttaatgtggaaatcctgaggatacctatcgaggacaaggatctaatcaatacagccaattggcgagttaattttacgatcctcaaagggaacgagaacggccactttaagatctccacagataaggaaactaatgagggggtgttatcggtcgtgaaaccgctaaattatgaagagaataggcaggttaatttggaaattggtgtcaacaatgaggctccttttgctcgagacattcccagggtcaccgcccttaaccgggctttagtgacagtgcacgtgagagacctcgacgaaggacctgagtgtactccagcagcccagtacgtcaggatcaaggagaacttagccgtgggaagcaagattaacggttacaaggcttacgaccctgaaaaccgcaacggaaatgggctgcgctataaaaagctccacgatccaaaggggtggataacgatcgacgagattagcgggagtatcattacctccaagatcttggatcgggaagtggagaccccaaagaacgagctctataacattacagtcttggcgatcgataaagacgaccgctcttgcacaggaaccctcgctgtgaacatcgaggacgttaatgataatccccctgagatcttacaagagtacgtcgtgatctgcaagcccaaaatgggttatacagatatcctggcagtcgaccccgacgaacctgttcacggggctccgttttacttctcactgccgaatacttcaccagaaatttcccgactttggagtctcacaaaagtgaatgacactgctgctcgcctgtcctatcagaaaaatgcaggattccaggagtacaccatcccaatcacggtgaaagaccgcgcaggccaggccgctacaaagctgctccgcgttaacctgtgcgagtgtacgcacccaacgcaatgccgagccacctcgagatctaccggagtaatcctggggaaatgggccatcctggccatcctactgggcatagctctgctatttagcgtcctgctgacacttgtgtgcggggttttcggtgcaactaaagggaaacggtttcctgaagacctcgcccagcaaaatctgatcatttctaatacagaggcaccaggggatgacagagtgtgcagcgctaatggctttatgactcagaccacaaacaactctagccagggattttgtgggaccatgggttcgggcatgaagaacggcggacaggagactatcgagatgatgaagggtggtaatcagacgctggagtcttgtcgaggggctggccatcatcacaccctcgacagttgtcgtggaggccacaccgaggtcgataactgtcgctacacgtatagtgagtggcacagctttacacaacccaggctgggagaagaatccattaggggccacacagggtag

SEQ ID NO: 220656 - DNA, 3150 bp, synthetic construct
  misc_feature 1..3150: note = Description of Artificial Sequence: Synthetic coding sequence
  source 1..3150: mol_type = other DNA
atggactggtctttcttccgtgtagtggcgatgctgttcatcttcttggttgtggtcgaagtcaattctgaattccggatccaagtccgagattacaacactaagaatgggactattaagtggcactctattaggcgccagaagagagagtggattaaattcgccgctgcttgtagagagggcgaagacaattccaaaagaaatccaatcgctaagatccatagcgactgcgctgctaaccagcaagtgacctacaggatctctggggtgggaatcgatcagcccccatacggaatctttgtgataaaccagaaaactggcgagatcaatatcacttccattgtggaccgtgaagtgacacccttttttatcatctactgtcgagctctaaattctatgggccaggacctagagagaccactggagctcagggtgagagtgttggacatcaacgacaacccaccagtgttttctatggccacattcgcgggacaaatcgaggagaactccaacgccaataccctggtgatgatcctgaatgctaccgatgccgatgaacctaataatttgaactcaaagatagcgttcaagatcataagacaggagccatcagatagccccatgtttattattaatcggaatacaggcgagatccgaacaatgaataatttcctcgaccgcgagcagtacgggcagtacgcactagccgtgaggggtagcgacagggacgggggagccgacggaatgtcggcggagtgcgagtgtaacattaagattcttgatgtcaatgataatattccctacatggaacagagctcatacaccattgaaatccaggaaaataccctcaacagtaacctgttagaaatccgggttattgatttggacgaggaattctcggccaactggatggccgtcatcttctttatttccgggaacgagggcaattggtttgaaatcgaaatgaacgagcgcactaacgtgggtattctcaaggttgtcaaacctctcgattacgaggccatgcagtcccttcagctgagcattggcgtcaggaacaaagccgaattccatcattcaattatgagccagtacaagctgaaggcttctgctatcagtgtaactgttctgaatgtaattgaagggccagtcttcagacctgggtcgaaaacatacgttgtgacagggaatatgggtagcaacgacaaggtgggcgattttgtggccacagacttggacaccggcagaccaagtactaccgtcagatatgtgatgggcaacaaccccgctgatctgctcgccgtagattcccggacggggaaactcactctaaaaaataaggttaccaaagaacaatacaatatgcttggcggaaagtatcagggcacaatcttaagtatcgatgacaatctgcagagaacatgcaccggaacaatcaacatcaacatccagtcttttggcaacgacgatcgaaccaatactgaacccaataccaagatcaccactaacacgggcaggcaggaaagcacctcatcaactaactatgatacaagcacgacttcaaccgacagtagtcaggtctactcatctgaacctgggaacggcgctaaagacctattgtccgacaatgtccacttcggccctgcagggattgggttgctgattatggggtttctggtgctgggtcttgtccctttccttatgatctgttgcgactgcggaggggcacctagatctgccgctggcttcgaacccgtccctgagtgtagtgacggggctattcactcctgggcagtagaggggcctcagcctgagccacgagacatcactacagtgattccacagattccgcctgacaatgcaaatataattgagtgtattgataactctggcgtctacacgaatgaatacggcggtcgagagatgcaagacctcgggggaggagagcgcatgacaggattcgaactgacagagggagtaaagactagcggcatgcccgaaatctgtcaagaatacagtggaactctgagacggaattcaatgcgggagtgtagggagggaggcctgaacatgaacttcatggagtcctatttctgtcaaaaggcgtatgcttatgccgatgaggatgagggccgaccttctaatgactgcttgctgatctacgacatagaaggagttggcagtccagccggaagcgtgggttgctgtagtttcatcggggaggacctcgacgacagcttcctcgatacactgggcccaaagtttaagaaactcgctgatattagccttggcaaggaatcttatcccgaccttgatccctcgtggccgccacagtctactgagccagtttgtcttcctcaagaaactgagcccgtcgttagtggccaccccccaatttcgccccacttcgggacgacgaccgttattagtgagtctacatacccatccgggcctggtgtgctgcacccaaagcccatcttggatcccctggggtatggcaacgtgaccgtgaccgagtcatatactacatcagacacactaaagccatctgtgcacgtgcacgataaccggccagcgtcaaacgtcgtggtgaccgaaagggtagtcggacccatttctggggcagaccttcatgggatgctggaaatgcctgatttacgggatggtagcaatgttattgttaccgaacgggtgattgcaccatctagcagtctgccaactagtctcaccatccaccatcccagagaatcatctaacgtggtggttactgagagggttatacagcccacctctgggatgatcggcagcttatccatgcaccccgagcttgccaatgcccacaacgtcatcgtgacagagagggtggtctccggagctggcgtgaccggcatctcaggcaccaccggcatatctggtggtataggctcatctggattggtgggaacctcaatgggagccggttccggagcactgtctggcgcaggaatctcaggcggaggaatagggctctccagtctgggcggaactgccagtatcggccacatgcgaagctctagtgatcaccacttcaaccagaccatcggatccgctagcccctctaccgcccgtagcagaatcactaagtactcgacagtgcagtacagcaagtag

SEQ ID NO: 220657 - DNA, 3357 bp, synthetic construct
  misc_feature 1..3357: note = Description of Artificial Sequence: Synthetic coding sequence
  source 1..3357: mol_type = other DNA
atggcgaggtcgccaggtcgtgcatatgccttgttgcttctactgatctgtttcaacgtcgggagcggactgcacctgcaggtcctgagcacacgaaatgagaataaattgttacccaagcaccctcacctcgtacgtcagaagagggcctggattacagccccagtggcgctgagagaaggcgaggacctgtcaaaaaaaaatccgatcgcaaaaatccactcggacctcgcagaggagagggggttgaaaatcacttataagtacactggaaagggcatcacggaaccacctttcggtatctttgtttttaataaggacactggcgaattaaatgttactagcattctggatcgtgaagaaaccccgttttttctgcttacagggtacgcactggatgcccgtgggaacaatgttgagaaaccactggaattacgcatcaaggtgttggacattaatgataatgagccagtgtttacccaggatgtatttgtaggaagcgtggaagagctttctgccgcacatactcttgttatgaaaatcaatgctaccgatgctgacgagcctaacaccctgaacagcaaaatctcatacagaatcgtgtcactggagccagcctacccccctgtcttctatctgaacaaagacacgggggagatctacactacatctgtaaccctcgacagggaagaacattcaagctatacactgaccgtcgaggcaagagatggaaatggagaggttacagacaagcccgtcaagcaagcacaggtccaaatccgaattctcgatgtgaacgacaacattcctgtcgtggaaaacaaggttctggaaggaatggtggaagaaaatcaggtcaatgtggaagtgacccgcattaaagtcttcgatgctgacgagataggatctgacaactggctggctaatttcacctttgcttctggcaatgaaggaggctactttcatattgaaacggatgcccagacaaacgagggcatcgtcaccttaatcaaagaggttgactatgaggaaatgaaaaatctcgatttttctgtcatcgtagcaaataaggcggcatttcacaagagcattcgctctaaatacaagcctacacccattcctataaaggtgaaagtcaagaatgtgaaggaaggtatacacttcaaatcttcagtcatctctatctacgtaagcgaatccatggatagatcttcaaaaggccaaattataggtaacttccaagcttttgatgaggatactggacttccggctcacgctcgatacgttaaacttgaagatagagataactggatttcggtggactccgtgacatccgagataaagttggccaagctgcccgacttcgaatctagatacgtgcagaacggaacatataccgttaagatagtggcaatcagtgaggattacccacgtaagacaattactggtaccgttctcatcaacgtggaagatattaacgacaactgcccaacattgatagaacccgtgcagaccatctgccatgatgccgagtacgtcaatgtcacagcagaggatctcgacggacatccaaattccggacccttttcattctccgtcatcgataaaccccctggtatggccgaaaagtggaagattgcaagacaggagtctacatcagttttgcttcaacagagtgagaagaaactaggccgaagtgagatccagtttcttataagcgacaaccaggggttcagctgtcctgagaaacaggttctaaccctgacagtgtgtgaatgcctgcacggctccggctgcagggaagctcagcatgactcatatgtcggacttggacctgctgccattgctctgatgatcctggcatttctgctgctgttgctcgtccccctgctgctgttgatgtgtcattgtggaaagggggcaaaaggctttacgcctataccaggcactatcgagatgctccacccgtggaataatgagggagctcctccagaagataaggtagtgcctagcttcctgcctgtcgaccaagggggaagcctagtcggcaggaacggcgttgggggtatggctaaggaagcaacgatgaagggctcctcttctgccagtatcgtcaaaggccagcatgagatgtcggagatggacggaagatgggaagagcatcgatctctactgagtggtagagctacccagttcactggggcaaccggcgctatcatgactaccgagaccacaaagaccgcaagggccacaggcgcttctcgcgacatggcaggcgcacaggccgcagctgtggccctgaacgaggaattcttgcgtaattactttacggacaaagcggcatcatatacggaggaagatgagaatcacacggccaaggactgcttgctagtctactcgcaggaagagaccgagtcactcaacgcaagcattgggtgttgcagtttcatcgaaggcgaactggatgatcgattccttgacgatttgggcctgaagttcaagaccctcgcagaggtttgtttgggccagaagatcgacattaacaaggaaattgaacaaagacaaaagcccgctacagagacctcaatgaataccgcaagtcacagcctgtgcgaacagactatggtaaactcggaaaacacttacagttcagggtctagttttccagtgcccaagagtctgcaggaggccaatgccgagaaggtaactcaggagatcgtgactgaaaggtccgtctcctcacgccaggctcagaaagttgccactcctttgcctgaccccatggcctcccgcaacgtaatcgccactgagacatcctatgtgaccggctcaaccatgcccccaacgactgtgattctgggcccatcccagcctcagtccctgattgttaccgagcgagtctacgcccctgcgtccacactggtggaccagccttacgccaatgagggcaccgtggtcgtgacagagagggtaatacagccccatggcggaggcagtaaccccctggagggcactcagcatctgcaggatgtcccctacgtgatggtgagagagagggagtcatttctagccccttcttccggggtgcagcctacactggccatgcctaacatcgccgttggacagaatgtgaccgttaccgaaagggtgctggctcccgctagtacactgcaatcctcctatcagattccaacagagaactctatgacagcacggaatactactgtttctggagccggagtcccgggtccactgcctgacttcggcctggaggaatccggccactccaactctacaattaccacctccagcactcgagttactaaacactccacagttcagcactcatacagctag

SEQ ID NO: 220658 - DNA, 3123 bp, synthetic construct
  misc_feature 1..3123: note = Description of Artificial Sequence: Synthetic coding sequence
  source 1..3123: mol_type = other DNA
atggactggctcttttttcggaatatttgtctccttatcatactgatggtggtgatggaagttaattccgagttcattgttgaagtcaaagagtttgatatcgagaacggaaccacaaaatggcagacagtgcggcgacagaaaagggagtggattaaattcgctgccgcttgtcgtgagggggaggacaatagcaagcgtaaccccatcgctaaaatccgcagtgattgcgagagcaaccaaaagatcacatatagaatctctggggtaggaatagacaggccaccctacggcgttttcaccataaatcccaggacgggtgaaatcaacatcactagtgtagtggacagggagattactccgttatttctcatctattgtagagcactcaatagtaggggagaggacttggagaggccactggaactgagggtcaaagtgatggacataaatgataacgcaccagtgtttagtcagtctgtttacactgcaagtatcgaagagaattctgacgccaatactctcgtggtaaagctctgcgcgactgacgccgacgaagagaatcaccttaattcaaagattgcctacaagatagtgtctcaagagccttccggcgctcccatgttcatcctgaatcgctacaccggagaagtctgcactatgagttccttcctcgaccgtgaacagcactctatgtacaatctcgtggtaagaggtagcgatcgcgatggcgcagctgatgggctttcaagcgagtgcgattgtcggatcaaggtgctcgatgtgaacgacaacttcccaaccttagaaaagacctcatactctgcttcaatcgaggaaaattgcctcagttcagagctaatcaggctgcaggctattgacttagacgaagagggcaccgacaattggctggcccagtacttaatcctcagcggaaatgatggaaattggtttgacatccagaccgaccctcagactaacgagggcatacttaaagtggtgaaaatgcttgactatgaacaagctccaaatatccagttgtcaattggggtcaagaaccaggccgactttcattattctgtcgcatcacagtttcagatgcaccctacacccgtacgaatccaagtcgtggacgtgcgcgaagggcctgccttccacccgtccacaatggccttttccgttagggaaggcataaaagggagttctctgctgaattatgttctggggacttataccgcaatagacctggacaccggcaaccccgcaaccgatgtgcggtatatcattggccacgacgcaggtagctggttaaaaatcgactcacggactggggagatccagtttagtcgcgagttcgataaaaaaagtaagtatatcataaacgggatctatacagcagaaatcctggctatcgatgatggatcagggaagacggccacgggaactatttgcatcgaggtcccagacattaacgactattgccccaatatcttcccggagcggaggacgatttgtatcgactccccatcagtgctgattagtgtgaatgagcatagttatggatcaccttttacattctgcgttgttgatgagcctccaggaatcgcggatatgtgggacgtccgttcaaccaacgcaacatcggctatcttgacagcgaagcaggttctttcgcctggattttatgagatccccatccttgtgaaagatagctataacagggcctgcgagttagctcagatggtacagctttacgcatgtgactgcgacgacaaccacatgtgtttggatagcggagccgcaggcatctatacagaggacattacaggcgacacctacggcccagtgacagaagaccaggcaggcgtcagcaatgttggcctggggccagcaggcatcggaatgatggttctgggtatcttactgcttattctggcccctctcctccttcttctctgctgttgcaagcaacgccagcccgaaggacttggcacgcggtttgccccagtccctgagggtggggaaggcgtcatgcagtcttggaggatcgagggagctcatcccgaggaccgggatgtgtcaaatatctgcgcacccatgaccgcctccaacacacaggatagaatggattcttcagagatctacacaaacacctatgctgccggagggactgtggaggggggagtttctggcgttgaactgaatactgggatgggcactgccgttggccttatggccgcaggggcagccggagcatctggcgcagcccgaaagcggtctagcaccatgggcactttgagggactatgccgacgctgacattaacatggcctttctggactcctactttagcgaaaaggcgtacgcttatgcagacgaggacgaagggcgtcccgcaaacgactgtctgttgatttatgatcacgaaggagtcggaagcccagtgggcagtattgggtgttgtagttggatagttgatgacttggatgagagctgcatggagactctcgacccaaagttccggaccctcgccgagatctgtctcaatacggagattgagccattcccctcacaccaggcttgcataccaatatcaaccgacctgccccttttggggcctaattactttgtcaatgagtcaagtggcctgaccccaagtgaggttgaatttcaagaagagatggcagcctccgaacccgtcgttcacggcgacataatcgtgaccgaaacatacggcaatgcagacccttgcgtgcagcccactacaataatcttcgatccgcagctggcccctaatgtggtggtgactgaagcagtcatggcacctgtctacgacatccagggcaacatatgcgtaccagcggaacttgctgactataataatgtgatctacgccgagcgggttctggcttcgccgggtgttcccgatatgagcaactcttctaccaccgaggggtgcatgggccctgtgatgtcaggcaacattctggtcggacctgaaattcaggttatgcagatgatgtcgccagacttacccataggacagactgtggggagcactagtccaatgacctccaggcacagggtgactaggtactccaatattcattacacccagcagtag

SEQ ID NO: 220659 - DNA, 3180 bp, synthetic construct
  misc_feature 1..3180: note = Description of Artificial Sequence: Synthetic coding sequence
  source 1..3180: mol_type = other DNA
atggactggctgttctttaggaatatctgcctgctgattattctcatggtggtcatggaggttaacagtgagttcatcgttgaggtgaaggaatttgacattgagaatgggactacaaagtggcagaccgtgcggaggcagaagagggagtggattaaattcgccgctgcctgcagagagggcgaagataacagcaagaggaatccaatcgccaaaatacgaagtgactgcgagtccaaccaaaagatcacttaccgaataagtggcgttggaatcgatcgccctccatacggtgtgtttactatcaatcccaggaccggcgagatcaatatcacctccgttgtcgaccgagagattacgcctcttttcctcatctattgccgggcacttaattctcggggtgaggacctggagcgacctttggaacttagagtgaaagtgatggacatcaatgacaacgctccagtgtttagccagagcgtctacacggcctcaatcgaagagaattccgatgccaacacacttgtggttaaactctgtgccacagacgctgatgaagaaaatcacctcaattcaaagatagcttacaagatcgtcagccaagagccctctggagccccaatgtttatcctgaaccgatacaccggggaggtctgtaccatgtcttcattcttggatcgagagcagcactctatgtataatctcgttgtgagagggtccgatcgagacggagctgccgacggcctgtcctctgaatgtgactgccgcatcaaagtgctagacgtgaacgataatttcccaactcttgagaagacttcatatagcgcaagcatcgaggagaattgtctgtcctctgagctaataaggttgcaggcgattgacctagatgaggagggcaccgacaactggctcgctcagtatctcatcttgtctggaaatgacgggaactggttcgacatccagactgatccacagactaacgaaggcatcctgaaggtcgtgaaaatgctcgattacgagcaggccccaaatatccaactgtccattggagtgaagaaccaggccgatttccactacagtgtcgctagccagtttcaaatgcaccccactcctgtgcgcatccaggtggtcgatgtgcgggagggccctgccttccatcctagcacaatggccttctctgtacgcgagggtattaagggttccagtctcttgaactacgtccttggaacttacaccgccatcgacctcgataccgggaaccccgcaactgacgtgaggtacataatcggacatgatgctgggagctggttgaaaatcgatagccgcaccggtgaaattcagtttagcagagagttcgacaagaagtcgaagtacattatcaacggtatctatactgcggagattctggcaatagacgatgggtcgggcaaaaccgccacaggcactatctgcattgaagtgcccgacataaatgactactgtccaaacatattccccgagagacgaacaatttgcatagactctccttccgtcctaataagcgtgaacgagcacagctacgggtcccccttcaccttctgtgttgtcgacgagccccctggaattgctgatatgtgggacgtcagatctacaaacgccacatctgccattttgaccgccaaacaggtattatctcctggcttctacgagatacctattttggtcaaagacagctacaatagagcttgtgaattagcacagatggttcaactctacgcgtgcgattgcgatgacaaccatatgtgtttagactcaggagcagcaggaatttacaccgaagatatcaccggggacacatacggaccggtgacggaagatcaggcaggcgtgtcaaacgtgggcctgggcccagccggtatcggtatgatggtgctgggtatcctgctgcttatccttgcccctttactcctcctgttatgttgctgcaagcagcgacagccagagggcctggggaccaggttcgcgcctgtgccggaaggtggtgaaggcgtcatgcagagctggcgcattgaaggagcccatcccgaagaccgcctgtttagcgcctacgccctccccggaggcggagggaccgcggatgggggagggtccgttttagggcgttgcgcattgcaagcaaccccagcgttactcaaccagcatcctcccttttccgaaatttacaccaatacttacgctgccggtggaaccgttgaaggcggagtgagtggggtggagctgaatacagggatgggaacagctgtgggactaatggccgctggtgccgcaggcgcttcaggtgccgcacggaagcgatcttctactatgggcacacttagggattacgccgacgcagacatcaatatggctttcctagatagttattttagtgagaaggcctatgcatatgcggacgaggacgagggcaggcccgctaatgactgcctgttaatctatgatcacgagggtgtgggctcccccgtaggttcaattgggtgctgctcatggatcgtggatgacttggatgagtcctgcatggaaaccctagatcctaaattccggaccctggctgaaatctgtctgaataccgagatcgagccatttcccagccatcaggcttgcattcccatctcaacagacctgccattgttggggcctaattatttcgtcaatgaatcatctgggctgacccccagcgaagtagagtttcaggaagagatggccgctagcgaacctgtggtgcacggggacataattgtgaccgaaacctatgggaacgcagacccatgtgttcagccaaccaccattattttcgacccccagcttgctcctaacgtggtggtcactgaggcagtgatggcacccgtatatgacatccagggtaatatctgtgttcctgctgaactggccgactacaacaatgtcatttatgctgagagagtgctggcgtctccaggcgtccctgacatgtcgaattcgagtacgaccgagggctgcatggggcctgtgatgagcggcaatatcctggtgggtcccgagatccaggtgatgcaaatgatgtccccggacttgcccatcggtcagacagtcggttctacctccccgatgacctctaggcacagggtcacccgatactcaaacatccattacacccagcagtag

SEQ ID NO: 220660 - DNA, 498 bp, synthetic construct
  misc_feature 1..498: note = Description of Artificial Sequence: Synthetic coding sequence
  source 1..498: mol_type = other DNA
atggcatcaggcgtgcaggtggccgacgaggtttgcagaatcttctacgatatgaaggtgaggaagtgtagcacacctgaggagattaagaagcgaaagaaggctgtgatcttctgcctgtccgccgacaagaaatgtattatcgttgaggagggaaaggaaattctcgttggcgatgtgggagtgaccataactgacccctttaagcattttgtggggatgctccctgagaaggactgccggtatgccctgtacgacgcgtctttcgagactaaggagtcaaggaaggaagaactgatgttcttcctttgggctccagagttggcgccactcaagagtaagatgatctatgccagctccaaagatgcgattaagaaaaaattccaggggattaagcacgaatgtcaagccaatggacctgaagacttaaaccgggcttgcatcgccgagaagcttgggggatctctgattgtagcttttgagggatgccctgtttag

SEQ ID NO: 220661 - DNA, 447 bp, synthetic construct
  misc_feature 1..447: note = Description of Artificial Sequence: Synthetic coding sequence
  source 1..447: mol_type = other DNA
atgaaggtgaggaaatgctctacccccgaagaaataaagaagcgcaagaaggctgtgattttctgcttgtcagcagacaagaagtgcatcatcgtggaggaagggaaagagatactggtgggggacgtaggtgtgaccattactgaccccttcaagcatttcgttggaatgttacccgaaaaggactgcaggtacgcactctatgatgcctcttttgaaactaaggagagccgaaaagaagagctcatgttcttcctctgggccccagaactggcacccctgaagagtaagatgatctacgccagctccaaagacgcgatcaaaaaaaaatttcagggaatcaaacatgagtgtcaggccaatggtcctgaagatcttaatcgggcatgtatcgccgaaaaactgggcggatcactaatcgtggccttcgagggctgcccagtatag

SEQ ID NO: 220662 - DNA, 897 bp, synthetic construct
  misc_feature 1..897: note = Description of Artificial Sequence: Synthetic coding sequence
  source 1..897: mol_type = other DNA
atgtcggacgctaacctcgattcaagtaagaagaacttcctcgaaggggaagtagacgacgaggagagcgtcattctcacccttgtgcctgtcaaggacgatgcgaatatggaacagatggagccgtcagtgtcttctacatcagatgttaagctagaaaagccgaagaaatacaatccgggtcacttgctgcagactaatgagcagttcactgccccacaaaaagccagatgtaagattccagccctccctttacccaccatcctcccaccaatcaacaaggtttgccgtgatacactgcgggactggtgtcagcagctgggtctgtccaccaatggaaagaagatcgaggtgtacttaagactccaccggcacgcctaccctgagcagcggcaggatatgcctgagatgtcccaggagacccgactacaacggtgctctagaaaaagaaaggcagttactaaacgagccaggctgcagcggagctacgagatgaatgaacgcgcagaagagaccaacacggtggaagtcatcacaagcgccccaggggctatgctagctagttgggctcgtatcgctgcacgcgctgttcagcccaaggctctcaattcttgctccatccctgtcagtgttgaagcgtttctgatgcaggcttcaggtgttcggtggtgcgttgttcacggtagactcctgagtgctgacactaagggctgggtcagattacaattccacgccggtcaggcatgggtcccgaccactcacaggcgcatgatcagcctatttctcctgccggcttgcatctttccctcccccggaattgaagataacatgctgtgtccagattgcgcaaagcgcaataagaaaatgatgaagcggctgatgactgtcgaaaaatag

SEQ ID NO: 220663 - DNA, 480 bp, synthetic construct
  misc_feature 1..480: note = Description of Artificial Sequence: Synthetic coding sequence
  source 1..480: mol_type = other DNA
atggacccgtcgcagtttaatcccacttatatccccggatcccctcaaatgctcactgaagaaaacagcagagatgactcaggagcgtctcaaatttccagtgagactctgatcaagaatctcagtaacttgaccataaacgcttcttccgagagcgttagcccactgagcgaggccctgctgagaagggagtcggtgggcgcagctgtgctccgcgaaattgaggatgaatggctatactcgagacggggtgtgaggacgctcctcagtgttcagcgcgaaaaaatggctagactgcggtacatgctcctaggcggtgtgagaacgcacgagcggagacctaccaacaaagagcctaagggtgttaagaaggagagtcgtccttttaaatgcccatgtagcttctgtgtcagcaacggttgggatccttccgaaaatgccagaatcggcaatcaagatactaagcccctgcagccatag

SEQ ID NO: 220664 - DNA, 915 bp, synthetic construct
  misc_feature 1..915: note = Description of Artificial Sequence: Synthetic coding sequence
  source 1..915: mol_type = other DNA
atgctgcgcggttctgcatccagcacaagcatggagaaggccaaggggaaggaatggacctcaactgaaaaaagtcgggaggaagatcagcaggcttcgaatcagcccaactcaatcgcattacctggtacatctgctaaaaggaccaaagaaaagatgtcaattaaaggctccaaggtcctgtgtcccaagaagaaggccgaacatactgacaatcctcgcccacagaaaaaaattccaatccctcccctgcctagcaagctgccacccgtgaacctcatccaccgagatatcctgagggcctggtgccagcagctgaagttatcttccaagggccaaaagctcgatgcatataaaagattatgtgcatttgcctaccctaatcagaaagattttccctcaacagctaaagaggcaaaaattaggaagtctctgcagaaaaagttaaaggtggagaagggcgagacatctctgcagtcttcagagacacacccccctgaggttgccctgccccctgttggcgagcctccagccttagagaattccactgccttgctggaaggcgtgaatacagtcgtggtcaccacttcagcacctgaggcattgctagcttcatgggcccgaattagtgccagggctcgcacccctgaagctgtggagagtccgcaggaggcctcaggcgtccgatggtgcgtggttcacggcaagtctctgcctgctgatactgacggctgggtacacctccaattccacgcaggtcaggcatgggtgcccgagaagcaggaaggcagagtgagtgccctttttctcctgcccgcaagcaacttcccaccccctcatctggaagataatatgctgtgtcctaagtgcgtgcatagaaacaaggtgctcatcaaatccctccaatgggaatag

SEQ ID NO: 220665 - DNA, 351 bp, synthetic construct
  misc_feature 1..351: note = Description of Artificial Sequence: Synthetic coding sequence
  source 1..351: mol_type = other DNA
atggggaccctgccagcccgtaggcacatacctccatgggtcaaagtgcccgaagacctaaaagatccagaagtctttcaggtacaaactcgcctcctgaaggccattttcgggccagacggtagtcgaatcccctatattgagcaggtgtcaaaagcgatgcttgagctaaaggcactggaaagcagtgatttgaccgaagtagttgtgtatggctcttacctgtataaactgaggaccaagtggatgttgcagtccatggccgaatggcatcgacaacggcaggagagaggcatgctaaagctggccgaagcaatgaatgccctggaattaggaccatggatgaaatag

SEQ ID NO: 220666 - DNA, 1104 bp, synthetic construct
  misc_feature 1..1104: note = Description of Artificial Sequence: Synthetic coding sequence
  source 1..1104: mol_type = other DNA
atgagttcaaccctagctaagattgccgaaattgaagccgaaatggcaagaactcagaaaaataaagccactgcccaccacctcggcctgttaaaggccaggctggcaaagctgcgccgtgaactgatcacccccaagggcggtgggggtgggggacccggagaaggctttgacgttgccaaaacaggggacgcgaggattggtttcgtgggcttcccatccgttgggaaatcgacactgcttagtaacctagctggagtgtactccgaggtggcagcttacgaatttaccacactgacaacagttcccggtgttatccgctataagggagcaaagattcaattgctcgacctcccagggattattgagggagcgaaggacgggaaggggagagggagacaggtgattgctgttgcaaggacctgcaacctgatactcatagtgctggacgtgctaaagcctctggggcataagaaaatcattgaaaacgaactcgagggcttcggcatcaggctgaattctaaaccacctaacatcggatttaaaaagaaagacaagggcggaattaatctgaccgccacttgccctcagtcggagctagacgcagagacagtaaaatctattcttgcagaatacaagatccacaatgccgacgtgacgctgcgctccgatgccaccgccgacgatctcattgacgtggtcgagggaaacagagtctacattccctgcatctatgtcctgaacaagatagatcaaatcagcatcgaggagcttgacatcatctacaaggtaccccattgcgtcccaatcagtgcgcatcaccggtggaattttgatgatttgctggagaaaatctgggactatctgaaacttgtacggatttacacaaaaccgaaaggccagctgcctgactacacctctccggtcgtgcttccatattcccgaaccactgtcgaagacttctgcatgaagatccacaaaaatctaattaaagagtttaagtatgccctcgtttggggcctcagcgtcaaacacaacccccagaaggtgggtaaggatcatacattagaggacgaagacgttattcagattgtgaaaaaatag

SEQ ID NO: 220667 - DNA, 396 bp, synthetic construct
  misc_feature 1..396: note = Description of Artificial Sequence: Synthetic coding sequence
  source 1..396: mol_type = other DNA
atggctgcagcggtggccatggagactgatgatgccggaaaccggctgaggttccaattggaacttgagttcgttcagtgccttgccaaccctaactatttaaacttcctcgcacaaaggggttacttcaaggataaggccttcgttaattacctgaagtatttgctgtactggaaggaccccgaatatgcaaagtatctgaagtacccgcagtgcttacatatgttggagttgttgcagtatgaacattttcgcaaggagctggtcaatgctcagtgcgccaaattcatcgacgagcaacaaattcttcattggcaacactacagtagaaaacgcatgaggttgcagcaggcccttgcggagcaacaacagcaaaacaatacttcgggaaagtag

SEQ ID NO: 220668 - DNA, 1032 bp, synthetic construct
  misc_feature 1..1032: note = Description of Artificial Sequence: Synthetic coding sequence
  source 1..1032: mol_type = other DNA
atgggcatcctcgaaaagattagcgagatcgagaaggagatcgctcggacacagaagaataaagcgactgaataccatctgggtctactgaaagcaaaattggctaaatacagggcgcagctgctcgagccaagtaagagtgcatcatctaaaggagaaggattcgatgttatgaaatcaggagacgcacgggtggccctgattggatttccatcagtcggaaaaagtacatttctgagcttaatgacctcgactgccagcgaggctgcatcctacgagtttacaacccttacatgtatacccggagtgattgagtacaagggtgccaacattcagttgcttgacttgccaggaattatcgaaggcgctgcgcaaggaaaaggacggggtcggcaggtgattgccgttgcaaggactgctgatgtcatcattatgatgttagacgccacgaagggggaagtgcaaagatcacttctggagaaagagttggagtcggtcggaatccgcctcaacaagcataaaccgaatatttactttaagccgaaaaagggcggtggaatttcatttaattccacagttacgctaacgcagtgctctgaaaagcttgtgcaactgattctgcacgagtataaaatcttcaacgcagaggtcctcttccgcgaggactgtagtcccgacgaattcatcgacgttatagtggggaatcgggtgtatatgccgtgtctgtatgtgtacaacaaaatcgaccagatcagcatggaagaggtagatcggctggcgaggaagcctaatagcgtcgtgattagttgtgggatgaagctgaacctggactatcttctggaaatgctgtgggagtacctcgccctcacttgtatttataccaaaaagcgaggtcaaaggccagactttacagatgccattatcctgcgaaaaggcgcatccgttgagcacgtgtgtcaccgcatccatcggtcgctggcttcgcagttcaaggcgccagcccctagcactgtgaggtccggatgggcctag

SEQ ID NO: 220669 - DNA, 2037 bp, synthetic construct
  misc_feature 1..2037: note = Description of Artificial Sequence: Synthetic coding sequence
  source 1..2037: mol_type = other DNA
atggaactgcgctcctatcagtgggaggtgattatgcctgctctggagggaaagaatatcattatatggcttccaacaggagccggtaaaactcgcgcagccgcatacgttgccaagaggcaccttgagaccgtggatggagccaaggtcgtggtcttggtaaatcgagttcacttggtgactcagcacggagaagagtttcgcagaatgctggacggtcgttggactgtaaccactctcagtggcgacatgggtcccagggctggtttcggacacctagcgaggtgtcatgatcttctaatctgtaccgcagagctgctacaaatggccctgacaagcccggaggaggaggaacacgtggagctgaccgtcttctctttgatagtggtggacgagtgtcaccacacccataaagatacagtatacaatgttatcatgagccagtacttggagttgaagctgcagagagcgcaacccctgccccaggtactgggcctgacagcatcgccgggaaccgggggtgcgagtaaattggacggtgctattaatcatgtcctccagctgtgtgccaacctagacacctggtgtatcatgagtccgcagaactgttgccctcaattgcaggaacatagccaacagccatgcaaacaatacaacctctgccataggcgcagccaggatcctttcggagatctgctaaaaaaactgatggatcagattcacgatcatctagagatgcccgagttgagccggaagtttggtacccagatgtatgagcagcaagtggtaaagctgagtgaggccgcagctttagcaggcctacaggagcagcgggtgtatgccctgcacctgcggagatacaacgatgcactcctgatacacgatacagtgagagcagttgacgcactggccgctctgcaggacttctatcacagagagcacgtcacgaaaacacagattctctgtgcggagagacgcctgttggctctctttgacgatagaaagaatgagctggctcacctggccacgcacggcccagaaaatcctaagctggagatgctcgaaaaaattcttcagcgccagttttcctcgtcaaacagccctcggggtatcattttcacacggacaagacagtctgcccactccctgctcttatggctacaacaacagcagggtctccagaccgtcgacatcagagctcagctcttaataggggctggtaatagcagccagtcaacccacatgacccaacgcgatcagcaagaagtgatccagaagttccaggatggcactcttaatttgctcgttgctaccagcgtcgctgaggagggcttggacattccccactgcaacgtggttgtgagatacggacttcttaccaatgaaataagtatggtgcaggcacggggacgtgcacgagctgaccagagtgtgtatgcctttgtggccacagaaggatccagggagctcaagcgggaactcattaatgaggctctcgaaacactcatggagcaagcagtggctgccgtgcagaaaatggaccaagcagagtatcaagctaagatcagggatctacagcaagccgctctgactaagagggccgcacaggcggctcagagggagaaccagcgacaacaattccctgttgagcacgtccagctgttgtgcatcaattgcatggtggctgtaggccatggttccgacctgcggaaggtcgagggaactcatcacgtgaacgtgaaccctaatttctccaattactataacgtttctcgagaccccgtggtgatcaacaaagttttcaaggactggaagccgggaggcgtaattagctgtcggaactgtggcgaagtatgggggctgcagatgatctacaagtctgtgaaacttcccgtactgaaggtgcgaagcatgctcttagagactcctcagggacggatacaggccaagaagtggtctagggtccccttttcagttcccgactttgacttcttgcagcactgcgccgaaaacttgtcggacctctccttagattag

SEQ ID NO: 220670 - DNA, 909 bp, synthetic construct
  misc_feature 1..909: note = Description of Artificial Sequence: Synthetic coding sequence
  source 1..909: mol_type = other DNA
atggagctgcgttcctatcagtgggaggtgatcatgcccgcactggagggaaagaacattattatctggctgcctaccggcgcaggaaaaacgcgtgccgcagcatatgtcgcaaagcgccatctggagaccgtggacggagccaaggtcgtggtgctggtgaaccgtgtgcatctcgtgactcagcacggggaggagttccgccgaatgttggacgggaggtggaccgtcacaaccctcagcggcgatatgggcccacgggcaggcttcggccacctggccaggtgtcatgacttattgatttgcaccgccgagctgcttcagatggccctgacctcgcctgaagaggaagaacatgtcgaattaacagtgttttccttgatcgtagtggacgagtgccaccacacccacaaagacactgtgtataacgtgatcatgtcccagtatcttgagctgaaactgcagcgagcgcagcctctcccccaggtgttggggctaacggccagtcctgggacaggtggggcaagcaaactggacggagctattaatcacgtactacagctgtgtgcaaatctggatacttggtgcatcatgtcccctcagaattgctgcccacaactgcaagagcattctcagcagccatgcaagcaatacaacctctgccacaggcgaagccaggacccctttggggacttacttaagaagcttatggatcaaatccatgaccacctggagatgcctgaactctctcgcaaatttggcacccagatgtatgagcagcaggtggttaaactgtcggaggccgcagccttggctggcctgcaggaacagagagtctacgctctgcatcttagacgttataacgacgccttactgatccacgacaccgttcgtgcagtggatgcatag

SEQ ID NO: 220671 - DNA, 1464 bp, synthetic construct
  misc_feature 1..1464: note = Description of Artificial Sequence: Synthetic coding sequence
  source 1..1464: mol_type = other DNA
atggagctaagatcgtaccagtgggaagtgattatgcctgccctggaggggaagaacataatcatatggctacccaccggggcaggcaaaaccagggccgctgcctacgtagctaagcgccatctggagacagtggacggcgctaaagtggtggtgttagtcaaccgggttcacctggtgacgcagcacggggaggaatttcgcagaatgctggacgggaggtggacggttactaccctctccggggacatgggcccaagagcgggattcggtcaccttgccaggtgtcatcatacacataaagataccgtatataacgtgattatgagccaatatcttgaactcaagttgcagagagcgcagccactcccgcaagttttgggtctgacggcctctccaggtactggaggagcttccaagctggacggcgcaatcaaccatgtacttcagctttgcgccaacctggacacctggtgcatcatgtcaccccagaactgttgtccacagctgcaagagcactctcagcagccctgcaaacagtacaacctctgccacaggcgcagtcaagatccttttggggacctgctgaagaaactgatggaccagattcacgatcatctggagatgccggagctttcaaggaaattcggcacacagatgtatgaacaacaggttgtcaagttgtccgaggccgcagcccttgctggactgcaggagcaacgcgtgtatgccctgcaccttcgcaggtataacgacgcccttctgatccacgatacagtcagagctgtcgacgccttggcggcactccaggacttttatcaccgtgagcatgtcacgaagacgcagatcttgtgcgcggaaagacgacttttggccctcttcgatgatcgaaagaatgagcttgcccatttagcaacccacggtcctgagaaccccaaattagaaatgctggaaaagatcttgcagaggcaattttctagttctaacagccccaggggaatcatatttacccgaactaggcagagcgcccactccttgctgctgtggctccagcagcaacagggactgcagaccgtcgatatccgagcccagctgctgattggtgccggtaactcttctcagtctacccacatgacgcagagagaccagcaagaggtgatccaaaaattccaagatggcacacttaacctactggtggcaacttcagtcgccgaggaaggtctcgatatacctcactgtaacgtggtcgtgagatacggcctcctgacaaacgaaattagcatggtgcaggccagaggtcgagcacgtgccgaccagtcagtctatgccttcgtcgctaccgaaggctcgcgagaactcaagcgggaattgatcaacgaggccctggagaccctgatggaacaggcagttgcagccgttcagaaaatggaccaggccgagtaccaagccaaagaattgctctag

SEQ ID NO: 220672 - DNA, 471 bp, synthetic construct
  misc_feature 1..471: note = Description of Artificial Sequence: Synthetic coding sequence
  source 1..471: mol_type = other DNA
atggaattgagatcctaccagtgggaagtgattatgcctgcactggaggggaaaaatattatcatctggcttcctacaggagccggaaagacccgagccgcagcttatgtggccaagcggcacttagaaaccgtcgatggagcaaaggtagtggtgctcgtgaaccgagtgcatctcgtaacgcagcacggcgaagagtttcgacgaatgctagacggaaggtggaccgtcacaaccctcagcggtgacatgggtccgagggcaggatttggtcatctagccaggtgccacgatctgctgatctgcacagcggagctactgcaaatggccctaacatcccccgaggaggaagagcacgttgaactgacagtgttcagcctgatagtcgtagacgagtgccatcacacccataaggatactgtctacaatgtgattatgagccagtatctagagctaaaactgcaaagatag

SEQ ID NO: 220673 - DNA, 2208 bp, synthetic construct
  misc_feature 1..2208: note = Description of Artificial Sequence: Synthetic coding sequence
  source 1..2208: mol_type = other DNA
atggctaaggaacggggtctgatatcgccctcagattttgcccaattgcaaaagtacatggagtactcaaccaaaaaggtcagcgacgtgctgaagctcttcgaggatggcgaaatggcaaagtacgtacagggagacgccatcggatatgagggtttccaacagtttctgaagatctatctggaggtggataacgttccacggcacctgtccctggcactcttccagagctttgagaccgggcattgcctgaatgagactaacgtgacaaaggatgtcgtctgcctcaatgatgtcagttgctacttttcactacttgaaggaggacggccagaagataagctcgaatttacctttaaactctatgatactgaccggaacgggattctcgattcttctgaagtcgacaaaatcatcctccagatgatgagagtggccgagtacctcgattgggacgtgtctgagttgcgtccaatcctgcaggagatgatgaaggagatcgattatgacggtagcggcagcgtctcacaggcagaatgggttagggctggtgccaccacggttcctctactggtgttgctcggcctggagatgactttaaaggatgacggccagcatatgtggagaccgaagcggttccctcgcccagtgtactgcaacctgtgcgagagcagtattggtctagggaaacaaggcttgagctgtaatctctgtaagtatactgttcacgatcaatgtgccatgaaggccctgccttgcgaagttagcacttacgcgaagagcaggaaagatattggtgtgcagtcccacgtatgggttcgaggcggttgcgagtctgggaggtgcgatcgatgtcagaaaaaaatcaggatttaccactccttaacgggcctccactgtgtgtggtgccacctggaaatccacgatgactgtttgcaagccgtgggtcatgagtgcgactgtgggctgttgagggatcacatattaccgccatcttccatatatccgtcggtgcttgcctctggccctgacaggaagaacagtaagactagccagaagaccatggatgacctcaatctgagcacatcagaggcactccgtatagatcccgtgcctaacacacatcccctgttggtatttgttaatccaaaaagtgggggtaagcagggacagcgggtcctgtggaagtttcaatacatattgaatcccaggcaggttttcaatctgcttaaggacggcccagaaatcgggctgaggctattcaaggacgtccccgattcaaggatcctggtgtgtggaggcgacggcaccgttggttggatattggagaccatcgacaaagcgaatttaccagttctgcctcccgttgccgtgctccctctgggtacaggcaatgatctggcccgatgtctgaggtggggaggtgggtatgaaggtcagaacctcgccaagatcctgaaggacctggaaatgtctaaggtggttcatatggaccgctggagcgtggaagtgattccacagcagacagaggagaagagtgatccagtgccttttcagatcattaataattatttctctatcggcgttgacgcctcaatcgcccacagattccacatcatgcgggagaaatacccagagaagttcaattcccggatgaaaaataaactatggtactttgagtttgcaacttccgagtccatttttagcacctgcaagaagctggaagagtctctgaccgtggagatttgcgggaaaccactcgacctttctaacctcagcttggagggtatagccgtgctgaacatccctagtatgcacggcggttctaacctatggggtgacaccagacgaccacacggagatatctatggcatcaaccaggctcttggggctaccgcaaaagtaattaccgatcccgatattctcaagacatgtgtgccagatctctcagataaaagacttgaagtggtgggacttgagggcgctatcgagatgggacaaatatatacaaaactgaagaacgctggcagacgtttggccaagtgcagtgagatcaccttccacaccacaaaaacacttcctatgcaaatagatggcgagccttggatgcagactccctgtaccattaagattactcacaagaatcaaatgccaatgttgatgggacccccacctcgatcgactaacttcttcggttttctctcctag

SEQ ID NO: 220674 - DNA, 2208 bp, synthetic construct
  misc_feature 1..2208: note = Description of Artificial Sequence: Synthetic coding sequence
  source 1..2208: mol_type = other DNA
atggctaaagaaagggggttgatctccccatctgatttcgctcagttacagaagtacatggagtactccactaaaaaagtgagcgatgtgttgaaactgttcgaagatggcgagatggcgaagtatgttcaaggagatgcgatcggttatgaggggtttcagcagttcttgaaaatatatctcgaagttgacaatgtgccccgtcatttgtcactggctctgttccagtcatttgaaaccggacactgcctcaacgagaccaatgtgaccaaagatgtagtctgtctcaatgacgttagctgctacttttctcttctcgagggtgggaggcctgaagacaagttagagttcacgttcaaactttatgataccgaccgaaatggaatcctagatagcagcgaggtggataaaattatactgcagatgatgagggtagcagagtatctcgattgggacgtgagtgagctacggccaatcctgcaagagatgatgaaggaaatcgattacgacggttccggtagcgtgagtcaggcagaatgggttcgggcaggcgctacaacggtgcctttactcgtcctgttgggcctggaaatgacgctgaaagatgacggccagcatatgtggcgtcctaagcggttccccagacctgtctactgtaatctgtgtgaatcttcaatcggtttgggtaagcagggcctttcctgcaatctctgcaagtacacagtgcatgaccaatgcgcaatgaaagcactgccatgtgaagtctcaacgtatgccaaatctcggaaagacatcggggtgcagagtcacgtgtgggttaggggcggttgcgaatctgggaggtgcgaccgttgtcagaagaagatccgtatttaccattcacttaccgggctccactgtgtttggtgccacctcgaaatccacgacgactgcttacaggctgtaggacatgagtgtgactgcggactcctccgtgaccatatcctgcccccatccagtatctacccatcggtattagctagcgggcctgatcgtaagaattccaagaccagccagaaaactatggatgatctgaacctctccacctcagaggcattgcggattgacccggttcccaacacgcatcctctccttgtgtttgttaatcctaaaagtggcggaaaacaggggcaaagggtgctatggaaattccagtacattctgaaccccagacaggtattcaacttgctcaaggacgggcctgaaatcggtctgagattatttaaagacgttccagatagccgaatactggtgtgtgggggtgatggtactgtgggctggattcttgaaacaatcgacaaggccaatctacctgtcctgccaccagtggcggtattaccgctgggcaccggtaacgacctggccagatgcctgaggtggggaggcggatacgaaggccagaatctagctaagatcctgaaggatcttgaaatgagtaaggtggtgcatatggacaggtggtcagtcgaggttattcctcaacaaacagaggaaaagagcgaccccgtgccctttcaaatcatcaacaattacttctcaattggagtggacgcatccatagcccaccgcttccacatcatgagggaaaaatacccagagaaatttaactctagaatgaagaacaaactgtggtacttcgagttcgccacgagcgagtctatcttcagcacctgtaaaaagttggaggaatccctcaccgtggagatctgcgggaagccgctcgatctgtccaacctgagcctggaagggattgcagtgctcaatattccctccatgcatgggggatcgaacctgtggggagataccaggcgaccgcacggagacatttatggtatcaatcaagcactcggggcaacagccaaggtgatcaccgatccagatatactgaagacttgtgtgcctgatctgtctgacaagcgattggaagtggtgggcctggagggggcaatagaaatggggcaaatctacactaagctcaagaatgccggacgccgactggctaagtgcagcgagattacttttcacacaactaaaaccttaccaatgcagatcgatggggagccgtggatgcaaactccttgcaccataaagataacccacaagaaccagatgcctatgttgatggggccacccccaaggtccaccaacttctttggtttcttaagttag

SEQ ID NO: 220675 - DNA, 744 bp, synthetic construct
  misc_feature 1..744: note = Description of Artificial Sequence: Synthetic coding sequence
  source 1..744: mol_type = other DNA
atggctaaagagcggggactgatctcgccctccgacttcgcacagttacagaaatatatggaatattctactaagaaagtgtcagacgtgctcaagctttttgaggatggagagatggcaaaatacgtgcagggcgatgcgatcggctacgaaggtttccaacagttcctgaagatctatttggaggtggataatgtccctcgacacctgtcactagcattgttccagagcttcgagactgggcattgtttgaatgagaccaacgtaacaaaggacgtggtatgcctaaacgacgtttcatgctacttctccctgctggaggggggaaggcccgaagacaagcttgagttcacattcaagctgtatgacacagaccggaacggtattttggacagtagtgaggtagacaagatcatcctgcagatgatgagggttgctgagtacctcgattgggatgtgtccgagttgagacctatcctgcaggagatgatgaaggaaatcgattatgacggatctggcagcgtttcccaagctgagtgggtcagggcaggagcaactaccgtccccctgctagtactgctggggttagagatgacccttaaggatgatggccagcacatgtggaggccaaaaaggtttccacgcccagtgtattgtaacctctgcgaatcttcgataggcctgggcaagcagggtctttcttgcaatcgccctataacgtgcgttggggctagacgcctttag

SEQ ID NO: 220676 - DNA, 351 bp, synthetic construct
  misc_feature 1..351: note = Description of Artificial Sequence: Synthetic coding sequence
  source 1..351: mol_type = other DNA
atggctaaagaacggggacttatcagccccagcgactttgcccaacttcagaagtatatggaatacagcaccaaaaaagtgagtgacgtcctaaaattgtttgaggatggtgagatggccaaatacgtgcagggggatgcgataggctatgaggggttccagcagttcctcaaaatttatcttgaggtggacaatgtgccacgccatttgagtctcgctctcttccaatcctttgagactggtcactgcctcaacgagactaatgtaacaaaggacgtggtgtgtctaaacgatgttagttgttacttcagcctcctcgagggcggacggccagaggataagctggagtag

SEQ ID NO: 220677 - DNA, 177 bp, synthetic construct
  misc_feature 1..177: note = Description of Artificial Sequence: Synthetic coding sequence
  source 1..177: mol_type = other DNA
atggcgaaggaacgaggcttgataagcccctcggacttcgcccagctgcaaaaatacatggaatactctaccaagaaagtatctgatgttcttaagctgtttgaggacggagaaatggccaagtacgtgcagggcgatgctattggatatgagggctttcagcagtttctgaaatag

SEQ ID NO: 220678 - DNA, 66 bp, synthetic construct
  misc_feature 1..66: note = Description of Artificial Sequence: Synthetic coding sequence
  source 1..66: mol_type = other DNA
atggccaaagagcgcggtctcataagcccgagtgacttcgctcaactccagaagtacatggaatag

SEQ ID NO: 220679 - DNA, 444 bp, synthetic construct
  misc_feature 1..444: note = Description of Artificial Sequence: Synthetic coding sequence
  source 1..444: mol_type = other DNA
atggctaaagagcgtgggctaatttcaccttccgattttgcccagctccagaaatacatggaatactccaccaaaaaggtctccgacgtacttaagttgtttgaggatggtgaaatggcgaaatacgtgcagggggatgccatcggatatgaagggtttcagcaatttctgaagatttatctggaggtcgacaatgtgcccagacatttgagcttggcgctatttcagtccttcgagacaggacactgtcttaacgaaacgaacgtgaccaaggacgtggtctgcttgaacgacgtgagttgttacttctcactgctggaaggaggtcgtcccgaagataagctcgagttcacctttaaattgtatgatacagacaggaacggtattctcgatagcagtgaggttgataaaatcatcctgcagatgatgcgcgttgcagagtag

SEQ ID NO: 220680 - DNA, 2208 bp, synthetic construct
  misc_feature 1..2208: note = Description of Artificial Sequence: Synthetic coding sequence
  source 1..2208: mol_type = other DNA
atggcgaaggaaagaggtctgatctccccatccgatttcgcacagctgcagaagtacatggagtatagtactaagaaagtttccgacgtactgaagctattcgaagatggggagatggcaaagtatgtccaaggcgacgcaatcggatatgaaggatttcagcagtttttgaagatttaccttgaggtcgacaacgtccctagacaccttagtttagctctgttccagagcttcgagaccggccactgtctcaacgaaacaaacgtgacaaaggatgtagtctgtctgaatgatgtgtcctgttacttctccttactggaggggggaagaccagaagataaactcgaatttacattcaaactgtacgataccgacagaaatgggatcctggacagttcggaggttgacaaaatcatcctccaaatgatgcgcgtcgccgagtatctggattgggatgtgtcagagctccgccctattctgcaagaaatgatgaaggagatagattacgacggttctgggtccgtgtctcaggctgaatgggtaagggctggagccacaaccgtacctctcctcgtgcttttaggcctcgaaatgaccctgaaggatgatgggcagcacatgtggagacccaaaaggtttcctcgcccagtgtattgcaatctctgcgagagctccatcggcctgggaaagcagggattgtcttgtaatttgtgtaagtacaccgtacacgaccagtgcgccatgaaagctttaccctgcgaagtgtccacttatgcaaagtcacggaaggatattggtgtccagagccacgtgtgggtaaggggcggttgcgaatccgggcgatgcgaccggtgtcagaagaaaattaggatctatcacagtctgaccggcctgcactgtgtctggtgccatttagaaatccacgatgactgcctgcaggccgtgggccacgaatgcgactgtggtctcctgcgggatcatatcctgcccccatcctcaatttaccctagtgtcttagcttcagggccagatagaaaaaatagtaagacctctcaaaaaaccatggatgacctgaacttgagcacctccgaggcactgagaatcgaccctgtccccaatacccaccccctgctcgtgttcgtcaacccaaaatccggcggtaagcaaggacagcgggtcttgtggaagtttcagtatatactgaatccacgtcaggtttttaaccttctgaaagacggacctgagatcggccttcgtctattcaaagacgttcccgactccagaattctcgtgtgtggcggagatgggacagttggctggatcctcgaaacaattgataaggccaatctgcccgtcttgcctcccgttgcggtgctgccactggggaccggaaatgacctggctcgctgtctgcgttggggcggtggttacgaagggcagaacctggcgaaaattttgaaagatttggagatgagcaaagtggtgcacatggacagatggagcgtggaagttattccccaacaaacagaggaaaagagcgatccggtgccatttcagatcatcaacaattacttctccatcggagtcgatgcctctatagctcacaggttccacataatgcgtgaaaaataccctgaaaagttcaacagccgcatgaagaacaaactttggtacttcgaattcgcaacgagcgaaagcatcttcagtacatgtaagaagctggaggagtcactgacagtcgagatttgcgggaagcccctggacctcagcaatctctccctggaggggatcgcagtgttaaacatcccctctatgcacggaggttctaatctttggggagatacaagacggccacacggggatatctacggaataaaccaagcgctgggcgcaaccgctaaggtaataaccgatccagacattctgaaaacttgcgtcccagacctttcagacaagcgcctcgaagtggtgggactggagggggcaattgagatgggacaaatctataccaaactgaagaacgcgggtcggcgacttgccaagtgctccgaaatcacttttcacactacgaagaccttgcctatgcagatcgacggcgagccttggatgcaaactccctgcacaattaaaatcacgcataagaatcaaatgccaatgctgatgggcccacccccacgatcaacaaattttttcgggttcctttcctag

SEQ ID NO: 220681 - DNA, 402 bp, synthetic construct
  misc_feature 1..402: note = Description of Artificial Sequence: Synthetic coding sequence
  source 1..402: mol_type = other DNA
atggccaaagagcgaggcttgatatccccatccgacttcgcccaactgcagaaatacatggaatatagcactaaaaaggtgtctgacgtcctgaagttgttcgaggacggtgagatggctaagtacgttcagggtgatgctatcgggtacgaggggtttcagcagttcttaaaaatttacctggaggtggacaacgtgcctcgtcacctgtctctggcactgttccaaagtttcgaaactggacattgcctgaacgaaactaatgtgaccaaggacgttgtgtgcctcaatgacgtttcatgctactttagcttgctagagggcggacgaccagaagacaaactggagtttacttttaagctgtatgatacagaccgcaacggaatccttgactcgagctag

SEQ ID NO: 220682 - DNA, 324 bp, synthetic construct
  misc_feature 1..324: note = Description of Artificial Sequence: Synthetic coding sequence
  source 1..324: mol_type = other DNA
atggccaaagaaagaggcctgatatcaccatccgacttcgcccagctgcaaaaatacatggagtacagcacaaaaaaggtcagcgatgttctgaagctgtttgaggatggtgagatggccaagtatgtccaaggggatgccatagggtatgagggttttcagcaattcctgaagatctaccttgaggtcgataacgttccaagacacttgagcttggccctgtttcagtctttcgaaacgggccactgtctaaacgagacaaacgtgacgaaagatgttgtgtgtctgaacgacgtgagctgttacttttctctcctggagtag

SEQ ID NO: 220683 - DNA, 135 bp, synthetic construct
  misc_feature 1..135: note = Description of Artificial Sequence: Synthetic coding sequence
  source 1..135: mol_type = other DNA
atggccaaagagcgcggactgatttccccctctgactttgctcagctgcagaagtatatggagtatagcactaaaaaggtgtccgatgtccttaaactgttcgaggatggagaaatggccaaatatgtacagtag

SEQ ID NO: 220684 - DNA, 135 bp, synthetic construct
  misc_feature 1..135: note = Description of Artificial Sequence: Synthetic coding sequence
  source 1..135: mol_type = other DNA
atggcgaaagagcggggtcttatttctccttctgactttgcacagctccaaaagtacatggagtacagtacgaaaaaggttagcgacgtactgaagctgttcgaggatggcgaaatggccaaatatgtccaatag

SEQ ID NO: 220685 - DNA, 402 bp, synthetic construct
  misc_feature 1..402: note = Description of Artificial Sequence: Synthetic coding sequence
  source 1..402: mol_type = other DNA
atggccaaagagcgcggactcatcagcccgagcgattttgcccagctccaaaagtatatggagtactccacaaagaaggtgtctgacgtcctgaagctgtttgaggacggggagatggctaaatacgtgcaaggggacgctatcggctacgagggcttccaacaattcctgaagatctatctcgaagtcgacaacgtccccaggcacctgtctctcgcattattccagtcctttgagactggacattgcctgaatgagactaacgtgaccaaagatgtggtttgcctgaatgatgtttcatgttacttcagtctcctcgaaggcggtcgtcccgaggataaactggagttcacatttaagctttacgatacagaccgtaacggaatactggatagttcctag

SEQ ID NO: 220686 - DNA, 135 bp, synthetic construct
  misc_feature 1..135: note = Description of Artificial Sequence: Synthetic coding sequence
  source 1..135: mol_type = other DNA
atggcaaaagaacgaggactgataagtccctcagattttgcccagctgcagaaatacatggaatattcgaccaagaaagtgtccgacgtgctgaaactgttcgaggatggcgaaatggctaaatatgtgcaatag

SEQ ID NO: 220687 - DNA, 2415 bp, synthetic construct
  misc_feature 1..2415: note = Description of Artificial Sequence: Synthetic coding sequence
  source 1..2415: mol_type = other DNA
atgacaaaccaggagaagtgggcacacttgagcccgtcagaattttctcagcttcaaaaatatgccgagtattccactaaaaaacttaaggatgtgctggaggagttccacggcaatggggtgctggcaaagtacaatcctgagggaaaactggttgtgctcggaaataccatcgattttgagggctttaagctgtttatgaagacatttctggaagctgagctacctgacgactttacagcacatctgttcatgtcttttagtaacaagtttccacacagttcccctatggtgaagagcaagcccgcactgctcagcggtggtctgcgaatgaataaaggcgcaattactcccccaaggaccaccagccccgctaatacctgctcccctgaggtcattcacttgaaggatatcgtgtgctatctgagtctgctggagcggggacgcccagaagacaagctggagttcatgtttcggctctacgatacagatgggaatgggttcctggacagtagtgagttggaaaatattatctcacagatgatgcatgtggcggaatatctggagtgggacgtcactgaattaaaccctattcttcatgaaatgatggaagagattgactatgaccacgatgggactgtttccctggaggagtggattcagggcggaatgaccactattcctctcctcgtgctcctagggctcgaaaataacgtaaaagacgacgggcagcatgtctggcggctcaaacatttcaataagcccgcttactgcaatctgtgcttgaatatgctgattggcgtgggaaaacaagggctgtgctgcagtttttgcaaatatactgtccacgagagatgtgttgccagagccccaccaagttgcattaagacctatgtgaagtcaaagcggaacaccgacgtcatgcatcattactgggtggaggggaactgtcctactaagtgtgacaagtgccacaaaacagttaaatgttaccagggtctaaccggtctccattgcgtgtggtgccagatcactttgcacaacaagtgcgcttcacatcttaaacctgaatgtgattgcggaccacttaaagaccatatcctgcctcccactaccatttgccccgtggttctccaaacactgcccacctctggagtgtccgttcccgaagaacggcaatccactgttaagaaggaaaagtccggctcccagcaacctaataaggtgatcgacaagaataagatgcagagggctaactcggttaccgtggacggacaaggcctgcaagtgacccccgttcccggaactcatccgctactcgtctttgtgaaccccaagagcgggggtaaacaaggggaacgcatctatcggaagtttcagtacctgctgaaccccaggcaggtgtactcgttgtcgggaaacgggcctatgcctgggctgaacttcttcagggatgttcctgacttccgagtactggcctgcggcggagatggtactgtgggctgggttcttgattgcatcgaaaaagccaatgtggggaaacatcccccagtggcgatcctacccttaggcaccggaaacgacctggccaggtgcctgcgatggggcggagggtatgaaggggagaacctgatgaaaatcctgaaggacatcgagaatagcacagaaataatgctggatagatggaaattcgaggtaatcccaaacgacaaggacgagaaaggggaccctgtgccctattctatcattaacaattacttttcgatcggcgtcgacgcatccattgcgcatcggttccacatcatgagggagaagcatccggaaaagttcaattcccgcatgaagaataagttttggtactttgaatttgggactagcgagacatttagcgctacgtgcaagaaattacacgagtctgttgagattgagtgcgacggcgtgcagatcgatcttatcaatatatccctggagggaatcgcaatattgaacatccccagcatgcacggcggatctaacctgtggggcgaatctaagaagcgcaggtcccacagaaggatcgagaaaaaaggttctgacaagcgcacaacagtcaccgatgcaaaggagcttaagtttgccagtcaggacctaagcgaccagcttctagaagttgtgggactcgagggtgcaatggaaatggggcagatttatactggcctgaagagcgcaggcaggaggctagctcagtgctcttgcgtggttatccgcacgtcaaaatcacttccaatgcagatcgacggggagccgtggatgcagacgccgtgtacaattaaaattactcacaagaatcaggcccctatgctgatgggccctccacctaagactggtctgttctgctctctcgtgaaacgcaccagaaatcgctccaaggagtag

SEQ ID NO: 220688 - DNA, 2415 bp, synthetic construct
  misc_feature 1..2415: note = Description of Artificial Sequence: Synthetic coding sequence
  source 1..2415: mol_type = other DNA
atgacaaatcaggaaaagtgggcccacctatccccaagtgagttcagtcagttgcaaaaatacgcagaatattctaccaagaaactgaaggatgtgctggaggagtttcacggaaacggcgttctggccaagtataatcccgagggaaagcaggacattcttaaccagacaatagacttcgagggtttcaagcttttcatgaagaccttcctcgaagctgagctccccgatgattttacagcgcacctgttcatgtctttttctaacaaatttcctcatagtagtcctatggtgaaaagtaaaccagcgcttcttagtggcggactgaggatgaacaagggagcgatcactccccctaggaccactagtcctgccaacacctgtagtcccgaagttatacatctgaaagatatagtgtgttatctttcactgctggagcggggtcgccctgaggataaactcgaattcatgtttcggctatacgatactgatggcaatggttttctggactcaagtgaactggaaaacatcattagccagatgatgcatgtcgcggaatacctcgagtgggatgtgaccgagctgaacccgatacttcacgaaatgatggaggagatcgactatgatcacgatgggaccgtgagcctggaagagtggatacagggcggaatgacaaccatcccactgctcgtattgctgggcctcgagaacaacgtgaaagatgatggccagcatgtgtggcgcttgaagcatttcaataaaccagcatattgtaatctctgcctgaacatgctgattggcgtggggaaacaaggcctctgctgctccttctgtaaatatacagtccacgaacggtgcgtggcccgagctcctccctcttgtatcaagacttatgtaaagtcaaaaaggaataccgacgtcatgcaccactattgggtagaagggaactgcccaactaaatgtgataagtgtcacaagactgtgaaatgttatcaaggactgacaggactccactgcgtttggtgtcagatcaccctccacaataaatgcgcctcacacctgaagcctgagtgcgattgcggccctttgaaagaccacattctgccgcctactaccatctgccccgtggtgcttcagacactgcccacctctggcgtgagtgtgcccgaggagcggcaatctacagttaaaaaggaaaaaagtggcagccaacagcctaataaagtaatcgataagaataagatgcaacgcgcaaacagcgttacggttgacggtcagggtctgcaggtgactcctgtgcctggtacgcacccactcttggtgttcgtaaaccccaagtccgggggtaaacagggtgaaaggatttatagaaagtttcagtacctcctcaaccctagacaggtgtacagcctgagcggaaacgggccaatgcccggactaaacttttttcgagacgtacctgattttagggtgctggcatgtggtggtgatggcaccgtcgggtgggtgttagattgcatagaaaaggcaaacgtagggaaacacccaccagtggccatcctgcctctcggaaccggaaatgatttggcacgctgtttgcgttggggtggtggctacgaaggcgagaatctcatgaagattctcaaagacatcgagaactcaacggaaattatgctggacagatggaagttcgaggttattcccaatgataaggacgagaaaggagaccctgtgccttactctataatcaataactatttctcaattggggtggacgcctccatcgcccatagattccatatcatgcgagagaaacatcccgaaaaatttaactcacgaatgaagaacaagttctggtatttcgaatttgggacttccgagaccttttcagcaacctgtaaaaagctgcacgagtcagttgaaatcgagtgcgacggggtgcagattgatctaatcaatatctccctggagggaattgctattttgaacattccttccatgcatgggggttcgaatctgtggggggagtcaaagaagcgcaggagccacaggcgcatcgagaaaaaagggagcgacaaacgaaccaccgttactgatgccaaggagttaaagttcgcctcccaggatctctcagatcagctcctggaggttgtgggactggagggcgctatggagatgggtcagatctacaccggcctgaagtcagctggaaggcggctggcccagtgcagctgcgtggtcatacggacaagcaagagcctgcctatgcagatcgacggtgagccgtggatgcaaaccccctgcaccataaagattacacacaaaaaccaggctccgatgctcatggggcctccccctaagactggactcttctgctccttggtgaagcggacccgtaacaggtccaaggagtag

SEQ ID NO: 220689 - DNA, 2412 bp, synthetic construct
  misc_feature 1..2412: note = Description of Artificial Sequence: Synthetic coding sequence
  source 1..2412: mol_type = other DNA
atgaccaatcaggagaaatgggcacacctctcccccagcgagttttctcagttgcagaagtatgctgaatactcgactaagaagctgaaggacgtcctagaagagttccacggtaatggggtgctggcaaagtacaatcccgagggtaagcaggacattctgaaccagaccattgatttcgagggcttcaagctattcatgaagacatttctcgaagccgagctgcctgatgacttcactgctcacctctttatgtcattttccaataagttccctcacagttccccgatggttaagtccaagcccgctctgctcagtgggggtctgaggatgaataaaggggcaatcacaccaccgcgaacaacttcaccagcgaacacctgcagccctgaagtgattcacctgaaagatatcgtgtgttatcttagtttacttgagagaggcaggcccgaagataagttggagtttatgttcagactttacgacaccgacggaaatggattcctagactcttccgagctggagaatattatatcccagatgatgcacgtcgcagagtatcttgagtgggacgttaccgagctcaatccaatcctccatgagatgatggaggagattgactacgaccatgacggcacggtctccctggaagagtggatccagggaggaatgacgacaattccattgctggtgttacttgggctggagaacaacgtcaaggatgacgggcagcacgtttggcgcttgaaacatttcaataaacccgcatactgtaatttatgtctcaatatgctgataggcgtcggtaagcaagggctgtgttgtagcttctgcaagtacacggttcacgagcggtgcgtggctagagccccaccgtcttgcattaaaacctatgtgaaaagtaagcggaatactgacgtcatgcaccactattgggtcgagggcaactgccctacaaaatgcgataagtgccataagacggtgaaatgttaccagggcctcaccggattgcattgcgtgtggtgccagatcacgttgcataacaagtgcgcatctcacctgaagccagaatgcgactgcgggccactaaaggaccacatcctcccccctactacaatctgccccgtcgtgcttacactaccaacctccggagtatccgttcccgaggaacgccagtctacagtgaagaaagaaaaatcagggtcgcagcagcccaataaggtcatagacaaaaacaaaatgcagagggccaattctgtgactgttgacgggcagggcctgcaggtcactccggttcctggcactcacccactgttggttttcgtgaatccaaagtccgggggaaaacaaggagagaggatttatagaaaatttcaatacctcttaaatcctagacaggtttattccctatctggcaatggccctatgcctggcctcaacttctttcgggatgtccctgacttcagggtgctggcctgcgggggagatggcaccgtaggttgggtgctcgattgtattgagaaagctaacgtcggcaagcaccctcccgtagcaattctcccgcttggcactggaaatgatctggccaggtgtctacgctggggaggcggatacgaaggcgagaacctgatgaagatcctgaaagacattgagaactcaacagagatcatgttagaccggtggaagttcgaagtaatacctaacgacaaagacgagaagggtgacccagtgccgtattccattataaacaattattttagtattggtgtggacgcttcaatagcacaccgatttcatatcatgcgcgaaaagcacccagagaagttcaatagccgcatgaagaacaagttttggtacttcgagttcggtacttccgaaactttctcagctacctgtaagaaactgcacgagagcgtggagatcgaatgcgacggtgtgcagatcgatctgattaacatctctcttgagggtattgcgatcctgaacattccatcgatgcatgggggttcaaatctctggggcgagagtaaaaaacgtaggtctcatagacgaattgaaaaaaaaggatctgataagagaactactgtgaccgatgcgaaggaactcaaatttgctagtcaagacttgtccgaccaactgctcgaggttgttggcctcgagggggcaatggaaatgggccagatttatacagggctcaagagcgctggaagacgacttgcccagtgcagctgtgtggttatccgcactagtaaaagccttccgatgcaaattgacggagaaccatggatgcaaaccccatgcacaattaagataacccataaaaatcaggctccaatgttaatgggacctcctccaaaaactggactattttgctctctcgtgaagagaacaagaaatcggagcaaggagtag

SEQ ID NO: 220690 - DNA, 2415 bp, synthetic construct
  misc_feature 1..2415: note = Description of Artificial Sequence: Synthetic coding sequence
  source 1..2415: mol_type = other DNA
atgactaaccaggagaagtgggcacacctgagcccgagcgagttcagtcagttgcagaagtatgccgagtacagtactaagaaattaaaagacgtgctcgaggagtttcatggaaacggagtgcttgctaagtacaaccctgagggcaaacaggatatcttgaaccagaccatcgatttcgaggggtttaagttgtttatgaagaccttcctggaggcagagctgcccgacgactttacagctcacctgtttatgtcatttagcaataagttcccccacagctcaccaatggttaaatctaagccagcactgctttctggcggtctacggatgaacaagggcgctatcacaccccctcggactacaagtcccgcaaacacctgctcccccgaagtgattcacctcaaagacatagtgtgttaccttagcctcttggagcggggacgccctgaggacaaactggagtttatgttcagactgtacgatacggacggaaacggattcctggatagcagtgaactggagaatattatttcacagatgatgcacgtcgccgagtatcttgagtgggatgttacagagctgaatccaattctccatgagatgatggaagagattgattatgatcacgacggcactgtcagtcttgaagagtggatacaggggggtatgacaacgatcccactgcttgtgttgctgggacttgaaaacaatgtgaaggacgacggccaacacgtctggcggctcaagcattttaataagccagcctattgtaacctctgtcttaacatgctgattggcgtcggtaagcagggcttgtgttgcagtttttgcaaatatacagtacacgagaggtgcgtggcccgtgctcccccatcttgcattaagacatacgtcaagagtaaaagaaatactgatgttatgcaccattactgggtggaaggcaattgccccacaaagtgcgataagtgtcacaagacagttaagtgctaccaaggcttgaccggcttgcattgcgtatggtgtcagataacacttcataacaaatgtgcatcccacttgaagccagagtgcgactgcgggccactgaaggatcacatccttccgcctacgactatttgtccagtcgtgctgcagacccttccaacctcaggagtgagcgtgccggaagagcggcagagtaccgtgaagaaggaaaaatcaggcagtcaacaacctaacaaggtcatagacaaaaacaaaatgcagcgcgctaactctgtcacagtggacggtcagggtcttcaagttacgccagtgcctggcacccatcccttgctggtgtttgtcaatcccaagagcggaggtaagcagggagaacgtatttatcggaagttccagtatctgttaaacccccgtcaggtgtactcactgagtggcaatgggcctatgccgggtctgaatttttttagagatgtccccgatttcagggtgctggcttgtggtggagacggaaccgttggttgggttctcgactgtatagagaaggcgaacgtggggaaacatccccctgtagctatacttcccctgggaaccggaaatgatctggccaggtgtttgcgatgggggggtgggtacgagggagaaaacctgatgaaaatactcaaggacatcgaaaattccacagagatcatgctggaccgctggaagttcgaagtaatccctaatgacaaagatgagaaaggcgaccccgtgccttactctattataaacaactacttctccattggcgtggatgcgtccattgcccacaggttccatatcatgcgggaaaagcacccggagaaattcaactcacgtatgaaaaacaaattctggtatttcgaattcggcaccagcgagaccttctccgccacctgtaaaaaactacatgaaagcgtggagatcgagtgcgacggagttcagatagacctgatcaacatttccttggagggtatcgccatcctcaacataccgtccatgcacggaggctcaaacctctggggagagtctaaaaagaggaggtcgcatcgccgaatagaaaagaaagggtctgataagagaacaacagtcaccgacgccaaagaactgaagtttgccagtcaggatctgagtgaccaattactggaagtggtaggcttggaaggtgccatggaaatgggacagatatacactggattgaagagcgcagggagacggcttgctcagtgcagctgcgtggttataagaacaagtaaatcactgccgatgcagattgacggagagccctggatgcagaccccttgcacaatcaagatcacccacaagaaccaggcaccgatgctgatgggccctccacctaagacagggctcttttgttctctggtgaagagaacgcggaatcgctccaaggaatag

SEQ ID NO: 220691 - DNA, 2322 bp, synthetic construct
  misc_feature 1..2322: note = Description of Artificial Sequence: Synthetic coding sequence
  source 1..2322: mol_type = other DNA
atgactaaccaagaaaaatgggcgcatctgtctccttctgagtttagccagttgcagaagtatgccgaatactcaacgaagaaactcaaggatgtactcgaagaatttcacgggaatggagtactcgccaagtacaaccccgagggtaagcaggatatcctgaaccaaacgatagacttcgagggctttaaactgtttatgaaaacctttctcgaggccgagctccctgacgacttcacagcccacctgtttatgtcattctcaaataagttcccgcattcttcacccatggttaagtctaagcccgctcttcttagcggaggattgagaatgaacaaaggcgctatcaccccgcctcggaccacctctcccgcaaatacctgctcacctgaagtgatacatctcaaggacatcgtatgctacctctctcttctggaacgaggacgcccagaagacaagctcgagttcatgttcagattatacgacaccgatggcaatggattcctcgactccagcgagttggagaatatcataagccagatgatgcatgttgcagagtatttagaatgggatgtgacagagctaaatcctatcttgcatgagatgatggaagaaatagactatgatcacgatggaactgtgtccctagaggagtggattcaaggaggcatgacaactattcctctcctcgtcttattagggctggaaaacaatgtcaaggatgacggccagcatgtctggcgactgaagcactttaataagcctgcatattgcaacctctgtctcaatatgctgataggagttgggaaacagggattatgctgtagcttttgcaagtacacggtccacgagagatgtgtggcccgtgcacctcccagttgcatcaaaacatacgtgaaaagtaagcgaaacactgacgtcatgcatcactactgggtggagggaaattgtcccaccaaatgtgacaagtgccacaagactgttaagtgttaccagggactgactggactgcactgtgtctggtgtcagattaccctccataacaaatgcgcatcacacctgaagcccgaatgcgactgcggcccactcaaagatcacattctccctccaacaactatttgtcccgtggtgctgcagacactaccaaccagtggagtatctgtgccagaggaaagacagagcactgttaagaaagagaagagcggcagtcaacagccaaacaaagtcatcgacaaaaacaagatgcaaagagctaattcggtgacagtcgacggccaaggtcttcaggtgacccccgttccagggacccacccattactggtgtttgtgaacccaaaatccgggggaaagcagggagaacggatttatagaaagttccagtatcttttgaacccacgccaggtatactctctgtctggcaatggccctatgccgggactgaattttttcagggatgtaccagattttcgggttcttgcttgtggaggtgacgggaccgtgggctgggtgctcgactgcattgagaaggctaatgtgggcaaacatccacctgttgcaattctcccactcgggacaggcaacgatctggcacgatgtctacgatgggggggaggatacgagggagaaaacctgatgaaaattttgaaagacattgagaattctactgagataatgctggatcgctggaagtttgaggtcatccccaacgataaagatgagaagggtgatcccgttccatattctattataaataactatttcagtatcggagtggatgcctctatcgcgcacagatttcacattatgagggaaaagcaccccgaaaagttcaattcccgaatgaagaacaagttctggtatttcgagttcgggacatccgagaccttctccgccacctgcaaaaaactgcacgaatccgttgaaatcgagtgtgacggtgttcagattgacctcattaacatatccctggagggtattgccatcttgaatattcccagtatgcatggaggctccaacctgtggggagagagtaagaaaagacgctctcatcgcaggatagagaaaaagggaagcgacaagagaaccaccgtgacagacgcaaaggagctgaagtttgcctcacaggatctctccgaccagctcttagaagtggtcggcctggagggggctatggagatgggccagatctacacaggcctgaagagcgccggtagacgtttggctcagtgttcatgtgtggtgatccggacgtccaaatccttgcccatgcagatcgatggagagccttggatgcagacaccctgtactgtgtctactgagtag

SEQ ID NO: 220692 - DNA, 2391 bp, synthetic construct
  misc_feature 1..2391: note = Description of Artificial Sequence: Synthetic coding sequence
  source 1..2391: mol_type = other DNA
atgactaatcaggagaagtgggcacatcttagcccatccgagttcagccagcttcagaagtatgccgaatattccacgaaaaagctgaaggacgtgttagaggaatttcacggaaatggggtcctagcaaagtataatcccgaaggcacaatagacttcgaaggattcaaactgttcatgaaaacatttctggaggctgagctccccgatgatttcacagcccacctgtttatgtcattcagtaataaatttccacattccagccctatggtgaaaagtaagccagcccttctgtccggcggactccgtatgaataagggggctataacccctccccgaaccacaagccctgccaacacatgctctccagaagtgatccatctcaaagacattgtttgttatctgtctctcctcgaacgagggcgtcctgaagataagctggagtttatgtttcgtttatatgatacggacggaaatggttttctggactcctcggagctggagaacattatctctcagatgatgcatgtggcggagtatctcgagtgggatgtgactgagctcaacccaattctgcacgagatgatggaggagattgattacgaccatgacggtactgtgagcttggaagagtggatccagggcggtatgaccacaatcccgctattagtgctactggggcttgagaacaacgtgaaggatgacggccagcacgtgtggcggctgaagcacttcaacaaacccgcttactgcaacctctgcttgaatatgctgattggtgtggggaaacagggactgtgctgttcgttctgcaaatacacggtgcacgagaggtgcgtggctcgcgcacccccaagctgcatcaagacctacgtgaagagtaaaagaaataccgatgttatgcatcactactgggtggaaggcaattgtcctacaaagtgcgacaaatgccacaaaaccgtgaaatgttaccagggactcacaggcttgcactgcgtttggtgccagattaccctccataacaaatgtgcctcacacctaaaacccgagtgtgattgtgggccactgaaggaccacattctccctcctacaactatatgtccagtggtgctcacactacctacatcaggcgtgtccgtgcccgaagagagacagtctacagtgaaaaaggaaaagtccggcagtcagcaacccaacaaagtgattgataagaacaagatgcagagagccaacagcgtcaccgtggatggccaggggttgcaggtgacccctgtccctggcacccatcccttactggtgtttgtaaacccaaagtccggcggaaagcaaggcgagaggatctaccgcaagttccagtacttattgaacccaagacaggtctactcgttgtccggtaacggccctatgcccggattgaacttcttccgcgacgtgccggatttccgcgtgcttgcatgtggcggagacggcaccgtcggatgggttctggattgcatcgagaaggcaaacgtgggcaagcatcccccagtagctatcttgccccttggtacaggtaacgacctggcaaggtgtcttaggtggggtggcggttatgagggcgagaatctgatgaagattttgaaggatatcgaaaacagtacggaaatcatgttggatagatggaaatttgaagtgatacctaatgacaaagacgagaaaggcgacccggttccgtactccatcatcaacaattacttctctattggtgtcgacgcctcgatcgctcatagattccacatcatgagggagaagcatcctgagaagttcaattcacggatgaagaataagttttggtatttcgagtttggaacttccgaaacgtttagtgccacctgcaagaagcttcacgagtccgtggaaatcgagtgcgacggcgtacagattgatctgattaacatcagcctggaagggatagccatcctgaatatcccctctatgcatggcggatccaacctgtggggggagtcaaagaaaagacgcagccaccggaggattgagaaaaaggggtctgacaagagaacaaccgtcactgatgctaaggaactgaagttcgccagtcaggacctttccgatcagctcctagaagtggtgggtctggaaggggctatggagatgggccagatttataccgggctgaaatctgctggacgcagactagctcagtgcagttgtgtggtaattaggacaagcaagagcctgccaatgcagattgacggcgagccatggatgcaaacgccgtgcacaataaaaattacacataagaatcaggcacctatgctcatgggccctcccccaaagactgggctgttttgcagccttgtaaagaggacacggaataggagcaaagaatag

SEQ ID NO: 220693 - DNA, 228 bp, synthetic construct
  misc_feature 1..228: note = Description of Artificial Sequence: Synthetic coding sequence
  source 1..228: mol_type = other DNA
atgacaaaccaggaaaagtgggcccacctgtctccctctgaatttagtcagttgcagaaatacgcggaatatagcaccaagaagctgaaggatgttctcgaagagtttcacggaaatggggtcctggccaagtataatccagaggggaagcaggacatccttaatcagacgatagattttgaaggatttaagctgttcatgaagacattcttggaagcagagctctag

SEQ ID NO: 220694 - DNA, 2358 bp, synthetic construct
  misc_feature 1..2358: note = Description of Artificial Sequence: Synthetic coding sequence
  source 1..2358: mol_type = other DNA
atgacaaatcaggaaaagtgggctcacctgagcccatctgagttcagccagctccagaaatatgctgagtactcaaccaaaaaacttaaagacgtactcgaggagttccatggaaacggcgtgcttgctaaatataaccctgaggggactattgatttcgagggtttcaagctctttatgaaaacattcctcgaagcagagctccccgatgactttacagctcacctgtttatgagcttttcaaataaatttccccatagttctcctatggtgaagagtaagccggcactcttgtctgggggtcttcgcatgaataagggtgcaatcactccccctcgaacaacatcccctgccaatacatgttcacccgaggttattcacctaaaggacattgtctgctatctgagtcttcttgagagagggaggcctgaggacaagctagaattcatgtttcgattgtacgacaccgatggcaatgggttcctcgattcatccgaactggagaacattatctctcaaatgatgcacgtcgccgaatacttagagtgggatgtaacagagttgaatcccattcttcacgagatgatggaagagatcgattacgatcacgatggaactgtgtcgctggaggagtggattcaagggggaatgaccacaatcccccttcttgtacttctgggcctggagaacaatgttaaggacgacgggcagcacgtttggaggctcaagcactttaataagcccgcttattgtaatctttgcctcaacatgctcatcggggtgggtaagcaagggttgtgctgttccttttgtaaatataccgtgcacgaacgctgcgttgcaagagctcccccatcttgcatcaaaacatatgtgaaatccaagcggaatacagatgtcatgcatcactactgggtggaaggtaattgccccacaaaatgcgacaagtgccacaagaccgtgaagtgctaccagggactcactggacttcattgcgtgtggtgccaaatcaccttgcacaataaatgcgccagccacctgaagcccgagtgtgactgcgggcctctgaaagaccatatcctgccccctaccacaatctgcccggtcgtgctggagaggcagagcaccgtgaagaaggagaagtcagggtcccagcagcccaacaaggtcatagacaagaacaagatgcagcgcgcaaactccgttaccgtcgacggacagggcctccaagtgacaccagtgccaggaacacatccgttgctggtgtttgttaatcctaagagcggtggaaagcagggggagagaatttaccggaagttccagtatctgcttaacccacgacaggtgtattcactctctggcaatgggccaatgcccggactgaacttctttagagacgtaccagacttcagagtgctcgcctgcgggggagatggcacggtggggtgggtgcttgattgcatcgaaaaagccaacgtaggcaagcacccccctgttgctattctgccactcggaaccggcaatgacctcgctcggtgccttcggtgggggggtggttacgagggtgagaacttaatgaaaatcttgaaagacatagaaaatagtaccgaaatcatgcttgaccggtggaaattcgaggtgatccccaacgacaaggacgagaagggtgacccagttccctactccatcatcaataattatttcagtataggtgttgacgcgagcattgctcaccgattccatataatgcgagaaaaacatccagaaaagttcaacagccggatgaagaacaaattttggtactttgaatttggcacatccgagaccttcagcgctacctgtaaaaaactacatgaaagtgtagagatcgagtgcgatggcgttcagatagatctgattaacatctccttggaggggattgctatcctcaatatcccaagcatgcatggaggatccaacctgtggggggagagtaaaaagcgccgatctcacaggaggattgaaaagaaaggctctgataagaggacaacagtgacagatgccaaggagttaaagtttgccagccaggacctgagcgatcagctgctagaggtggtgggactggaaggagcgatggaaatgggtcagatctacaccggcctgaagtctgccggtaggagactggcccagtgctcctgtgtggtaataagaaccagcaaatccctgccaatgcagattgacggcgaaccctggatgcagaccccatgtaccattaagatcactcataaaaaccaggccccaatgctcatgggaccacccccaaagaccggcctgttttgttcgctggtgaagaggactcgaaataggtctaaagaatag

SEQ ID NO: 220695 - DNA, 3645 bp, synthetic construct
  misc_feature 1..3645: note = Description of Artificial Sequence: Synthetic coding sequence
  source 1..3645: mol_type = other DNA
atggccgcagccgcaggagcacctccccctggtcccccacagccacctcccccacctcctccagaggaaagttctgacagcgagccagaagcagagcccggaagtccccagaaactcatccggaaggtgagtacatcaggccagatccgccagaaaacaatcataaaggagggcatgctgaccaagcagaataattcatttcagagatccaagcggcgatatttcaagctgagagggagaacactgtactacgcgaaaaccgctaaatcaatcatcttcgacgaagtcgacctaacagacgcctccgttgccgaatcctcaactaagaatgtcaataatagctttactgtgattaccccgtgtaggaagctgattctgtgtgctgataatcgcaaggaaatggaggactggattgcggcattgaaaaccgttcagaacagggagcattttgaaccaacccagtattctatggaccacttctccggaatgcataattggtacgcctgcagtcatgcacgacccacatactgtaacgtgtgtagggaggcactgagtggcgtaacaagtcacggtcttagttgtgaggtgtgtaagtttaaagctcacaaacgctgtgccgtccgcgcaaccaataattgtaagtggacaaccttggcctcaattgggaaagatattatagaggatgctgacggaatcgccatgcctcaccaatggctagagggtaatctaccagtgtccgccaagtgcacggtatgtgataagacctgtggctccgtactgagactgcaagactggcgatgtctttggtgcaaagccatggtgcatacttcatgtaaagaaagcttgctaacaaaatgccctctaggactgtgcaaggtgagcgtgatcccaccgactgccctcaactcgattgattctgacgggttctggaaggcatcatgtcctccatcttgcacaagtcccttgctggtctttgtaaactctaaatccggggacaatcagggtgtgaaatttctccgacggtttaagcagcttctcaatcccgctcaggtcttcgatttgatgaacggagggcctcatctgggcctgaggcttttccagaaattcgacacgtttaggattctcgtatgcggcggagatgggtccgtggggtgggtgctgagtgagatcgactctctaaatctccacaaacagtgtcaactgggtgtcctacccttgggcacaggaaatgatttggcccgtgtactcgggtggggctctgcctgcgacgatgatacccaattgcctcagatcctggagaagctcgagcgggcttccaccaaaatgctcgatagatggagcgtgatggcctacgaggccaagttgccccgtcaggcttccagctcaacagtgaccgaggatttctcggaagactccgaagtgcagcagatactcttttatgaagactccgtcgccgctcatttatcaaaaattttgacgagcgatcagcattccgtggtgatcagctctgccaaagttctctgtgagactgtgaaagacttcgttgccagagtgggcaaagcctatgagaagaccaccgaatcttcggaggagagcgaagtcatggccaaaaaatgtagtgtgttaaaggagaagttggacagcctactcaaaacactggatgacgagagccaggcatcttcttctctgcctaaccccccacccaccatcgcggaggaagccgaagacggcgatggcagcggatccatatgcgggtctaccggggaccggcttgtggcttctgcatgtccggctcgaccacagatttttaggccacgggagcagctcatgctgcgagctaactccctaaaaaaggctattcgacagattattgagcacaccgaaaaggccgttgacgagcagaacgcacaaacccaagaacaggaaggctttgttctggggctatctgagtccgaggagaaaatggatcaccgggtttgccccccacttagccactctgagtcttttggcgtccctaagggcagatctcaacggaaagtaagcaaaagcccttgtgagaaattgatctccaagggtagcctgagtcttggaagcagcgcatctctgccgcctcagcctggttcccgtgatggccttcccgcactgaacaccaaaatcctgtaccctaacgtacgagcaggaatgtccggatcactgcctggcggatcagttatctcccgactgcttattaatgccgatcctttcaacagcgagccagagaccctcgagtactataccgagaagtgcgtgatgaacaactacttcgggattgggttagacgcgaagatctccctcgacttcaacaataaaagggacgaacaccctgaaaagtgccgatcaagaactaagaacatgatgtggtatggcgtgctgggcacgaaggagttactccatcgtacttacaagaacctggagcaaaaggtactgttggagtgtgacggacgccctatccccctaccaagcctgcaggggatagcggtgctgaacattccctcgtacgctgggggaaccaatttttggggcggtaccaaagaggacgataccttcgctgccccatcgttcgacgacaaaatcctcgaggtggttgccgtctttggatcaatgcagatggccgtttccagggtgatccgacttcagcaccaccgtatcgcacagtgtcggaccgtgaaaattagcatactgggagatgaaggggtgccagtgcaggtcgatggggaggcatgggtccagcctcccggttacatccgtatcgttcataaaaacagagcccagacattaacccgagatagggcttttgagtctacacttaagtcctgggaagataagcagaaatgcgagcttcctcgccctcccagttgcagcttgcaccccgaaatgttatcagaagaggaagccactcagatggatcagttcggccaggctgccggagtcctgattcactctattcgagagattgcccaatctcacagagatatggagcaagaattggcccacgccgtgaatgccagctccaaatccatggacagagtatatggaaaacctagaactactgaagggttgaattgcagctttgtattggagatggtgaacaactttcgggcactccgctctgagacagaattgttactgtccgggaagatggcattacagctggaccctccccagaaggagcagctgggatctgccctggccgaaatggatcggcagcttcgacgtctggctgacacaccctggctttgccaatcagccgagcctggggatgaagaatcagttatgctggacctcgctaagcggtctcgatcgggcaagtttagacttgtaaccaagttcaaaaaggaaaaaaataataaaaataaggaggcacactcctcattgggtgcgccagtgcacctttggggtaccgaagaggtggcagcttggctagagcatctctccctatgtgaatacaaagacatcttcacaagacatgatattcgcggatccgagctgttgcacctagaacgtagggatctgaaagacctcggagttacgaaagtcggccacatgaagaggatcttgtgcggtatcaaggagctgtcaaggtctgcccctgcggtggaggcatag

SEQ ID NO: 220696 - DNA, 3513 bp, synthetic construct
  misc_feature 1..3513: note = Description of Artificial Sequence: Synthetic coding sequence
  source 1..3513: mol_type = other DNA
atgaatatgttcctctactttcaaaccattattaaagagggtatgctaacaaaacagaataactcttttcagagatctaaacgtcggtacttcaaactcaggggcagaaccctctactacgcaaaaaccgccaagtcaattattttcgacgaggtggatctgacagacgccagcgttgccgagtcttccacaaaaaacgtgaataactcttttacggtaatcactccatgtaggaagctcatcctgtgcgcagataacagaaaggaaatggaggattggatcgccgctttgaagacggtgcagaatagggaacactttgagcccacccaatactcaatggatcacttttcaggaatgcacaattggtacgcctgtagccatgcaaggcccacgtattgtaacgtctgtagagaggcactgagcggtgtgacttcacacgggctttcatgtgaggtgtgtaaatttaaggctcacaagagatgtgcggtcagagccacaaacaactgtaagtggacaaccttggcttccatcggaaaagacattatagaagatgcagacggcattgccatgcctcaccagtggttagaggggaatctcccagtgagcgcaaaatgcacggtatgtgacaagacctgtgggtccgtcctgaggctccaggattggcggtgtttgtggtgtaaagcaatggtgcacaccagctgtaaggaaagtctgctcacaaagtgcccactaggcctttgtaaagtctctgttattccgccaactgccctgaattcaatcgatagtgatggtttttggaaagccagctgtccgccttcatgtacgagcccactgttagtcttcgtgaattcaaaaagtggggacaaccaaggggtcaaattccttcgccgttttaagcagctgcttaaccctgcccaggtgtttgatctgatgaatggcggtccacatcttggcttacgtctctttcagaagttcgacacttttaggatcctggtatgtggaggtgacggctctgtgggttgggtcctgtcagagatcgatagcctgaaccttcacaagcaatgccagttaggcgtgctgccgcttggcaccggcaatgacctagctcgagtattgggctgggggtcagcttgcgatgacgatacacaattgccacagattctagagaaactggagcgtgccagcactaagatgctggataggtggtcagttatggcttacgaggcaaagttgcccagacaggcatcatctagcaccgttactgaggacttcagcgaggacagtgaggtgcaacagattctgttctatgaagactccgtcgccgctcacctctctaagatcctgacctcagaccagcactcagtggtgatttcatccgctaaggtactttgcgagactgtcaaggattttgtcgcccgtgtgggaaaagcctatgaaaagacaacggaatcgtctgaagagagcgaagtcatggccaagaagtgttccgtgctgaaggagaagctggacagccttttaaagacactggacgacgaaagtcaggctagcagctccctgccaaatccccctcctaccattgccgaggaggctgaagacggagatggtagcggttctatatgcggcagcactggcgatcgactggtagcatcagcttgccccgctcgtcctcagatctttaggcctcgggagcaactgatgctgcgcgcaaattctctgaagaaggccatccgccagattatcgagcacacagagaaggcggtggacgagcaaaatgcgcagactcaggagcaggaaggcttcgtgctgggtctgtctgagtccgaggaaaagatggatcaccgtgtatgtcctcctttgtctcatagtgagagctttggcgtgccaaaaggcagatcccagagaaaagtatctaaaagcccctgtgaaaagctgatctctaaaggcagcctctcacttggaagcagtgcctctctgccaccacagccagggagcagggatggcctgcccgctctgaataccaagatcctgtatcccaatgtgcgagccggtatgtcagggtccctgcccggaggcagcgtcatttcaaggctcctgattaatgctgaccctttcaactcagaacctgagacgctagaatattacacggaaaagtgcgtgatgaacaactatttcggcatcggactagacgccaaaatttccctcgattttaataataagagagatgagcaccctgaaaaatgtagatcccgcaccaaaaatatgatgtggtatggcgtgctggggaccaaagaactcctgcacaggacttacaagaatcttgagcaaaaggttcttttagaatgcgacgggaggcctatacccctcccatccctgcaggggattgcagtgctaaacatcccttcttatgctggcggaactaatttttggggcggtacaaaggaggatgacactttcgcagctccaagcttcgacgataaaatacttgaagtggtggccgtctttggctccatgcagatggccgtgagtagagtgatccgactccagcaccacagaatcgctcaatgtaggaccgtcaaaataagcatacttggggatgagggggtgccggtgcaggtggatggcgaggcctgggttcaacctccaggatacattaggatagtgcataagaacagagcacagacactgaccagggatcgggcatttgaaagtaccctcaagagctgggaggataaacagaagtgtgagcttccgagaccccctagctgttccctgcacccagaaatgttgtcggaggaggaagcgacccaaatggatcagttcgggcaggccgcaggagtactcattcactcaattcgagagattgcacaatcacatcgcgacatggaacaagaactggctcatgcggtgaacgcatcatccaagtctatggacagagtgtacggcaaaccacggaccaccgagggcctcaactgtagcttcgtcttagagatggtcaataacttcagggccctccgctctgagaccgaactgctgctctcagggaaaatggctctccagctggatcctccacagaaagagcagctgggcagcgccctggcagaaatggaccgccagctccgccgtctggccgacaccccgtggttatgccagagcgccgagcctggcgacgaagaaagcgttatgcttgaccttgccaagcggtcacgatctggaaaattccggctggttacaaagtttaagaaggagaagaacaacaaaaacaaagaggcccacagtagtcttggagcaccagtgcacttgtggggtactgaagaagttgctgcttggctcgaacatctcagcctgtgtgaatataaggacatctttaccaggcacgacattaggggcagtgagcttttgcacttggaaagacgggacttaaaagaccttggcgtgacaaaagtcggccacatgaagaggattctgtgtgggatcaaagagctgagtaggtcagctcccgcagtggaagcttag

SEQ ID NO: 220697 - DNA, 1704 bp, synthetic construct
  misc_feature 1..1704: note = Description of Artificial Sequence: Synthetic coding sequence
  source 1..1704: mol_type = other DNA
atggaggctgagagacgcccagcccctggcagtccctctgagggactgtttgccgacggtcacttgattctatggactctgtgctctgttttgttacccgtgttcatcacattctggtgtagcttacagaggtcccgacggcagctccatagaagggacatttttagaaagtcaaaacacggttggcgagacacggacctgttttcgcagcccacttactgttgtgtatgcgcgcaacatatcctacagggggctttttgcgattgctgtgggttgcgcgtggacgagggttgccttcggaaggcggataagcggttccaatgtaaggaaataatgctgaaaaatgatacaaaagtgttggatgcaatgccacaccattggattaggggaaatgtccctctatgcagttactgtatggtgtgtaagcaacagtgtggctgccagccaaagttatgcgactacagatgtatatggtgccagaagacagtgcacgacgagtgcatgaaaaattccctgaagaatgagaagtgtgattttggtgaatttaagaatctcataatacctcccagctatctcacctcgattaaccagatgagaaaggataagaagacggactacgaggttctggcgtctaaactgggcaagcagtggaccccccttattatccttgcaaactctagaagcggaaccaacatgggcgaggggcttctgggcgagttcagaatcctgctcaaccccgttcaggtgtttgacgtgaccaaaacacctccaatcaaggccctgcagttgtgtactctccttccttattatagcgcaagggtactggtctgtggcggagatgggacagtcgggtgggtattggatgccgtggacgatatgaagattaagggtcaggaaaagtacattccacaggtggcagtcctgcctctcggaacagggaacgatctgtccaacactctaggatggggcacaggctacgcaggggaaattcctgtggcccaggtgctgcgaaacgtgatggaagctgatgggattaaactggataggtggaaggtacaagtgacaaataagggctactataacctgcggaaacctaaggaattcacgatgaataactatttttctgttggaccagacgccctcatggccctgaacttccacgcgcatcgtgaaaaggccccttcccttttctcttctagaattctcaataaggcagtgtatctgttttacggcactaaagactgccttgtgcaggagtgcaaggacctgaacaaaaaggttgaactggagctggatggggagcgggtggcgctcccgtctcttgaaggaattatcgtcctgaacatcggatattggggcggtggctgccgcctgtgggagggaatgggagatgagacttaccctctcgcacgacatgatgatggtctgctggaagtcgtcggcgtctacggctctttccactgcgcccagatccaagtgaaactggccaacccttttcggatcgggcaggcccatacggtgagacttattctgaagtgctcaatgatgcccatgcaggtggacggagaaccttgggcccagggtccctgtaccgtcaccatcactcacaaaacacacgcgatgatgctctacttctccggcgaacagaccgatgacgatattagctctaccagcgaccaggaagatataaaggccactgaatag

SEQ ID NO: 220698 - DNA, 2376 bp, synthetic construct
  misc_feature 1..2376: note = Description of Artificial Sequence: Synthetic coding sequence
  source 1..2376: mol_type = other DNA
atgggggaggaacgctgggtcagcctgactcccgaagagtttgaccagctccagaagtatagtgagtactccagcaaaaagattaaggatgccttgacagagtttaatgaggggggatccctgaagcagtatgatccacacgaacccatctcctacgatgtgtttaagctgttcatgcgtgcatatctcgaggttgacctaccccagccactgagtacacatctcttcctggctttcagccagaagcctagacatgagaccagcgatcatcctaccgaaggggcaagtaattctgaggccaacagcgccgatactaatatccagaacgccgataacgccactaaagccgatgaagcgtgcgcaccagacacagagtcaaatatggcagagaaacaagcacccgctgaggaccaagttgccgcaacacctctcgaaccaccagtgcctaggtcctcttcctccgagtctccagttgtgtacctgaaggacgtggtgtgttatctttctcttctagagacaggtcgccctcaggacaagctggaatttatgttcaggttgtacgactctgatgaaaatggcctgcttgatcaagctgagatggattgtatcgtgaaccaaatgctgcacattgcacagtacctcgaatgggacccgactgaacttcgcccaattctaaaggagatgcttcaaggaatggattacgaccgggacggattcgtttctttacaggaatgggtgcacggcggaatgaccaccattccgctgctagtgctgctggggatggatgactcaggcagcaaaggagatggacgacatgcctggaccatgaagcactttaaaaagccgacatactgcaacttttgccacatcatgctcatgggcgtacgcaaacaaggactgtgctgcacttactgtaagtatactgtgcatgaaaggtgcgtgtctagaaacattcccggttgtgtgaaaacatactccaaggcaaagcgctccggggaagttatgcagcacgcctgggttgagggtaacagctctgtgaaatgcgatcggtgtcacaaaagcataaagtgttaccagtcagttacggctaggcactgtgtgtggtgtcgcatgacatttcacagaaaatgtgagttgtccacactgtgtgacggcggtgaacttcgggatcatatattgctgcctactagcatctgtcctatcacccgtgaccgacccggagagaaatccgacggctgtgtgtccgcaaagggcgagctggtgatgcagtacaagatcatcccaactcccggaacccacccactgctggtgttagtcaaccccaagagcggtggcaggcaaggcgagaggattttgcgaaaatttcattacttattaaaccctaagcaggtgtttaatctggacaatggcggacccacccctgggctcaatttcttccgcgatacaccggactttcgggtcctggcttgtggaggagatggaacagtgggctggatcctcgactgcatcgacaaagccaactttgccaaacatccacctgttgcagtgctccccttgggaacgggcaatgacctggctcgttgcctgcgatgggggggaggttacgaggggggaagtctgacgaaaattctgaaggacatcgaacaatctccgctggtgatgctggatcgatggcacttggaagtcatcccacgcgaggaagtggagaatggagatcaggtgccatacagcataatgaacaactacttcagcattggggttgatgcctcaatcgcacatcggtttcacgtgatgcgtgaaaagcatcctgagaagttcaacagccggatgaagaacaagctgtggtacttcgaatttggtacttccgagaccttcgcagccacgtgcaaaaagctgcatgaccacattgagctggagtgtgatggtgtgggggttgacctgtcaaacatttttcttgaaggaattgctattttaaacatcccaagcatgtacggcggtactaacttgtggggggagaataaaaagaatagagcggtgatcagggagtctaggaagggtgtcacagacccaaaggagctgaagttttgtgtgcaggacctgtccgaccagttgctggaagtggtgggcctggaaggggcaatggaaatgggccagatatataccggtcttaaaagcgcaggacgtaggcttgcacaatgtgctagcgtcactatcagaaccaacaagctccttcccatgcaagtggatggcgaaccatggatgcagccctgttgcacaatcaaaatcactcataagaatcaagctcctatgatgatgggcccacctcagaagtccagcttcttctccctccgaagaaaatcgaggagtaaggattag

SEQ ID NO: 220699 - DNA, 2301 bp, synthetic construct
  misc_feature 1..2301: note = Description of Artificial Sequence: Synthetic coding sequence
  source 1..2301: mol_type = other DNA
atgggggaagagcgatgggtgtccttgacccccgaggaattcgatcagctgcaaaagtactctgaatactcttctaaaaagatcaaggacgccctgaccgaattcaacgagggtggcagcttaaagcagtacgacccccacgagcccatcagctatgatgtgttcaaactgtttatgcgagcctacctggaggtcgacttaccgcaaccattatcgactcatttattccttgctttttcccagaagcctaggcacgagactagcgaccatccaaccgagggcgcaagcaattctgaagcaaattctgctgacaccaacatccagaacgctgacaacgccacaaaagccgatgaagcttgcgcacctgacaccgagtctaatatggctgagaaacaggcccctgctgaggaccaagtggccgctactcccctcgaacccccagtgccaagaagctcttcatcagagtcgccggtcgtgtacctgaaagacgtcgtttgttacctgtcactactggagacggggaggccccaggacaaactcgaattcatgttccgattgtacgactcagacgaaaatggacttctggaccaggccgaaatggactgtatagtgaaccagatgctccacatcgctcagtacctcgagtgggatccgacagaactgcgacctatcctcaaggaaatgctgcaaggcatggactatgatagggacggcttcgtttccctgcaagagtgggtccacgggggaatgacaactatccccttgctggtcctgttgggcatggatgatagcggaagtaagggagacggccgtcacgcctggacaatgaagcatttcaagaaaccaacctactgtaacttctgccacattatgttgatgggcgtccggaagcaagggttgtgttgtacttactgcaagtatacagtgcacgagcgatgcgtctctcggaatatccccggatgtgttaagacctatagcaaggctaagcgatctggcgaagttatgcagcacgcctgggtggaggggaacagtagtgtcaaatgcgaccgttgccataaatctatcaagtgttaccagtcggtgaccgcaagacattgtgtttggtgtcgcatgacgttccatcgaaaatgcgagcttagcacattatgtgatggcggtgaactgcgggatcacattctgctgccaacgtctatctgtccaatcacccgcgaccggccaggcgagaagtctgatggttgtgtgtcggccaagggcgagctcgttatgcaatataagattattcctacccccggaactcatcctctacttgtgctggtgaacccaaaatccgggggacgtcagggtgagcgcctgaatttcttcagagatacccctgattttagggtattggcctgtggcggagatgggaccgtcggatggatcctggactgcatcgataaggctaacttcgccaaacatccccctgtcgctgtcttgccactgggaactggcaacgatttggccaggtgcctacgatggggcggtgggtatgaggggggtagccttaccaaaatcttgaaggatatagagcagtctcctctcgtcatgttggatagatggcacctcgaggtcatacctcgtgaggaagtggagaacggtgatcaggtgccctactctattatgaataattacttcagcatcggagtggatgcctctatcgcccatcgattccatgttatgcgcgaaaagcacccggagaagtttaatagcaggatgaaaaataagctgtggtactttgaattcggcacctccgagacgttcgctgcaacatgcaagaagctacacgaccacattgagcttgagtgtgacggcgtgggcgtcgatttgagcaacatttttctggaggggatcgctattcttaatattccctccatgtatggtgggaccaacctgtggggggaaaacaaaaagaaccgcgctgtgatccgggagtctaggaagggggtgaccgaccctaaagagctaaagttctgcgtgcaagacttatccgaccaactgctggaggtggtcggactggaaggcgcaatggagatgggtcaaatctacacaggccttaagtcagcagggagaagactcgcccaatgcgcctccgttaccattaggaccaacaaacttctgcccatgcaggtggatggggaaccatggatgcagccgtgctgtacaattaagatcacccataaaaaccaggcacctatgatgatgggacccccacaaaagagtagcttcttttccctgcgccgaaagagcagatccaaggactag

SEQ ID NO: 220700 - DNA, 2259 bp, synthetic construct
  misc_feature 1..2259: note = Description of Artificial Sequence: Synthetic coding sequence
  source 1..2259: mol_type = other DNA
atgggagaagaacgttgggtctcccttactcctgaggagttcgaccaactgcagaagtatagtgagtatagttcaaagaagatcaaggacgccctgacggaatttaatgaggggggaagtcttaaacaatacgacccacatgagcccattagctatgatgtctttaaactgttcatgcgggcatacctcgaggtcgatctgccacaaccactgtccactcacctgtttctggctttttcccagaagcctagacatgaaaccagcgatcaccctactgaaggtgcaagtaactccgaagctaacagcgcggacacaaacattcagaatgccgacaacgccacaaaagctgatgaggcttgcgcccctgacactgagagcaatatggctgagaagcaggctcccgcagaggaccaggtggccgcaacgccacttgagcccccagtgcccagatcaagttcaagtgagagcccagtggtgtatttgaaagacgtcgtgtgctatctgagcttgctcgaaactggcaggcctcaggataaactagagtttatgtttcgactttatgactcagacgagaacggtctgcttgaccaggcagagatggactgcatagttaaccaaatgctgcacattgcccagtatctggagtgggatccaaccgaactacgtcccatcctgaaggaaatgctccagggaatggattacgatagggatgggttcgtgtctctccaagagtgggtgcatggaggcatgaccacaatccctcttttggtgctcctggggatggacgatagcggcagtaagggagatggtcgtcatgcatggacgatgaagcactttaagaaacccacgtattgcaatttctgtcatattatgctgatgggcgtgcgcaaacaggggctgtgttgcacctattgtaagtatactgttcatgagaggtgtgtgagtaggaatataccaggctgcgtgaagacatattctaaggcgaaaaggtcaggggagttccaccgcaaatgtgagctgtcaaccctctgtgacggaggagagctgcgcgatcacatcctcctgcccaccagcatctgcccaattactcgggacaggccaggcgaaaagtcggacggctgtgtgtctgcaaaaggagagttagtgatgcagtataagattattccaacccctggcacccacccactcttggtgcttgtgaaccctaagagcggtggtaggcagggggaacggattctccgaaagttccattatttgctcaaccccaagcaggtgtttaatctggacaatgggggtcctaccccgggactgaatttctttcgcgatactcctgacttccgggtcctggcctgcggcggagatggaacagtcggctggattctagactgtatagataaagcgaactttgcaaagcacccccctgttgcagtcctcccccttggcaccgggaatgacctggcaaggtgcctgcgctggggcggtgggtacgagggcggatctctgactaagatactcaaagacatagaacagtctcccttggttatgctcgacagatggcaccttgaggtgatccctcgcgaggaagtcgaaaacggagaccaagtgccctacagtataatgaataactacttttccatcggagtcgacgcatctatagcacaccggttccacgtcatgagggagaagcatccagagaaattcaactcaagaatgaagaacaaactgtggtacttcgagttcggcacctctgaaacattcgccgcaacttgcaaaaaactgcacgatcacatcgagttggaatgcgacggcgtgggggtggatctgtccaacattttcctggaggggatagccattcttaacatcccgagtatgtacggaggaacaaatctctggggagagaacaaaaagaaccgcgctgtcatccgggagtcaaggaaaggagtaacagatcccaaggagctcaaattctgtgtgcaggacttgtccgatcagctgctggaagtggtgggccttgaaggagccatggagatggggcaaatctatacggggctcaagtcggcaggcagaagactggctcagtgtgcttcagtgaccattcgcactaataagctactgccgatgcaagtcgatggcgaaccttggatgcagccctgttgcactatcaagatcactcataagaaccaggctccaatgatgatgggtccaccacagaaatcctcctttttctcactcaggcgaaaatcaaggtcgaaggactag

SEQ ID NO: 220701 - DNA, 1818 bp, synthetic construct
  misc_feature 1..1818: note = Description of Artificial Sequence: Synthetic coding sequence
  source 1..1818: mol_type = other DNA
agcctgaaaatgggggaagagagatgggtgtcacttacacctgaggaatttgatcaactccagaaatactctgagtattcttctaagaagattaaagacgccctgactgaattcaacgagggaggttcactgaagcaatatgatccgcacgagcccatctcttatgacgtcttcaagctgtttatgagggcatacttggaagtggatctccctcaacccctgagtactcatctcttcctggcgttctcgcagaagccacggcatgagacttccgaccatccaactgagggcgctagcaattccgaggctaactcggcagacacaaacatccagaacgccgataacgctactaaggccgatgaagcctgcgcccctgacaccgagtctaacatggcagaaaaacaggcacccgctgaagaccaggtggccgcaaccccactagagcccccagttcccagatcctccagcagtgagtcaccggtggtgtacctcaaggatgtagtatgttatctgtcactgctcgaaacaggcagaccacaggacaaacttgagttcatgtttcggctgtatgattcagacgaaaacggtctactggaccaggcggaaatggattgtattgtgaaccaaatgctccatatcgctcaatacttggagtgggacccaactgaactccggccaatcctcaaggaaatgctccagggcatggattatgatagagatggattcgtgagcctgcaggaatgggtccatggaggtatgaccaccattcccctgctggtactgctcggaatggacgactccggtagcaagggagacggtcgacatgcatggacgatgaagcactttaaaaagcccacttattgcaatttttgccacattatgctgatgggcgtgcgaaagcagggtctctgttgcacatattgcaagtacacagtgcacgagagatgcgtgtctcggaacataccaggctgcgtgaaaacctactccaaagctaagagatctggcgaatttcacaggaagtgtgagctgagcactctgtgtgacgggggtgagctgcgcgaccacatccttctgcctacttcaatctgccctatcactcgagaccggcctggggaaaaatcagatggctgcgtgtccgccaaaggagagctggtgatgcagtacaagatcattcctacgccgggtactcaccccctgcttgtcttggtaaacccaaagagtgggggtagacagggcgaacggatcctgcgcaagttccactacttgctaaacccaaagcaggtgttcaatctggacaacgggggtcctacccccggactgaatttctttcgcgacacgccagactttcgggtgttggcctgcggaggtgacggaactgtgggatggattttggattgtatcgataaagccaactttgccaaacacccgccagtcgcagtgctgcccctcggtaccgggaatgatctggcaaggtgcctaaggtgggggggtggatatgaagggggaagccttaccaagatccttaaggacatcgagcaaagccctctggtcatgctggacagatggcacttggaagtcatccctcgggaagaggttgaaaatggcgatcaggtcccatattctataatgaataattatttcagcatcggagtggatgctagcatcgcccatcggttccatgtgatgagggagaagcaccctgagaagttcaactccagaatgaaaaacaagctgtggtattttgagtttgggacctcagagacctttgctgccacttgtaaaaaactccacgaccatattgagctggagtggtgttag

SEQ ID NO: 220702 - DNA, 2199 bp, synthetic construct
  misc_feature 1..2199: note = Description of Artificial Sequence: Synthetic coding sequence
  source 1..2199: mol_type = other DNA
atgggggaggaacgctgggtaagtttgactccggaggaattcgaccagttacagaagtacagcgaatactcaagtaaaaaaattaaagacgcgctaacagaatttaacgagggagggtccctcaaacagtatgatccccatgaacctatcagctatgatgtgtttaagctttttatgcgtgcttacctggaagtggacctgccccaacccctgagcacccacctatttcttgcgttcagccagaagccaaggcatgaaacaagcgatcatcccacagagggggcatctaactccgaggcgaattccgccgataccaatatacagaatgcggacaacgccactaaagccgatgaagcttgcgcgccagacacggaatctaacatggctgaaaaacaggccccagctgaagatcaggtggccgctacacctctcgaacctcctgtcccacggagttccagttctgaatcccccgtggtatatttaaaggacgtcgtgtgttacctctctctcctggagaccggtcggcctcaagacaaacttgaattcatgttcagactctatgactcagacgagaacggactcctcgatcaggctgagatggattgcatcgtgaaccagatgctacatattgcccagtacttagagtgggacccaacggagctacggcctattctcaaggagatgttgcagggcatggattacgatcgagatggttttgtaagcctacaggagtgggtgcacgggggtatgactacaattcccctgcttgtcctgttaggtatggacgacagtggatctaaaggtgacggacggcacgcctggacaatgaagcacttcaaaaaacctacgtactgtaatttctgccacattatgctaatgggagtcagaaaacaggggctgtgctgcacctattgcaaatataccgtgcacgagcgttgcgtgtccaggaacatcccaggatgtgtaaagacctacagtaaggctaaacgctcgggcgaattccacagaaagtgcgaacttagtactctgtgcgatgggggagagctccgggaccatatcctcctgccaacgtctatatgtcctatcacccggtataaaattatccctacccctggaactcatcccctcctcgtgctggtgaatccgaagagcggtggtcgccagggtgaacggatcctaaggaagttccactatctccttaatccgaagcaggtgtttaacctggacaatgggggaccaacgcctggcttaaacttcttccgcgatacgccagacttccgcgtcctggcctgcggaggcgatgggaccgtgggatggattcttgactgcatcgacaaagccaattttgccaaacacccaccagtcgccgtgctgcctctcggtaccggcaatgacttggcccgatgtctgcggtggggcggtggttatgagggcggaagcctcaccaagatccttaaagatatcgagcaaagtcccctcgttatgctcgaccggtggcaccttgaggtcatccctagagaggaagtcgagaacggagaccaggtgccttactccatcatgaacaattacttttcaattggcgtcgacgcctcaatcgcccatcgttttcatgtcatgagagaaaaacatccggagaagtttaacagccgaatgaagaacaaactttggtatttcgagttcgggacctcagagactttcgcagccacctgtaagaagctccacgatcatattgaacttgagtgtgacggagtcggggtagacctctccaacatcttcctggagggcatcgctatcctcaacatcccaagtatgtacggaggcacaaacctctggggcgaaaacaagaagaacagagccgtgattagggagtccaggaaaggtgtaactgaccctaaggagctcaagttctgcgttcaggatctaagcgaccaacttctggaagtggtcggcttagaaggcgctatggagatgggacagatctatacagggttaaagagcgctgggagaaggctggcacagtgtgcaagtgtgacaatcagaacaaataaactgctgccaatgcaggtggacggtgagccttggatgcagccctgctgcacaataaaaatcacgcacaaaaatcaggcgcctatgatgatgggtcctccccaaaaatccagcttcttctcccttcgccgaaagtctaggagcaaagactag

SEQ ID NO: 220703 - DNA, 3198 bp, synthetic construct
  misc_feature 1..3198: note = Description of Artificial Sequence: Synthetic coding sequence
  source 1..3198: mol_type = other DNA
atggatgccgctggtcgcggttgccatctcctgccactgcccgctgccagaggccctgccagagctccagctgcagccgcagctgctgctgcttcccccccaggcccttgtagtggagcagcatgcgcgcctagtgccgcagccggagccggagccatgaacccctctagttccgcaggggaggagaaaggcgctacggggggatcctctagtagcggcagtggagccggatcctgttgtctgggcgctgaaggcggtgcagaccctaggggagcaggttccgctgctgcagccggagcagcagcactggatgaaccagctgcagccggacagaaggagaaagacgaagctctcgaagaaaagctacgcaacctcacgttcaggaagcaagtgagttaccggaaggccatcagtcgagcgggtctgcagcatctggcacctgcacaccccctatccctcccagttgctaacggccctgccaaggaaccaagagcaacacttgattggagtgaaaatgcagtaaatggagagcacctgtggttagaaaccaacgtctccggggacctatgttatttgggagaggagaactgccaagtccggttcgctaagagtgctctgaggcggaagtgtgccgtatgtaagatagtggtgcatacagcgtgtattgaacagctcgagaaaattaactttcgatgcaaacccacatttagggagggtgggagccggtcccctcgggagaacttcgtcaggcaccattgggtccacagacgcagacaggagggaaaatgtaaacagtgtgggaagggctttcagcagaagttctctttccactcaaaagaaatcgtggcaatcagctgtagctggtgcaaacaagcctttcacaacaaagtcacatgctttatgcttcaccatatcgaagaaccctgtagccttggagcccacgccgctgtgatcgttccacccacttggattattaaagtcaaaaagcctcagaattctctgaaggccagtaatcgtaagaagaagcgaacctcttttaagagaaaagccagcaagagggggatggaacaggaaaacaagggcaggcctttcgtgatcaagcccataagttctcccctcatgaagcccctgttagtgttcgtgaatccaaaatcaggagggaaccaggggacaaaggtgctgcaaatgttcatgtggtacttgaatcctcgccaggtatttgatctgtcacaggagggccctaaagatgcgctggagctttaccgtaaagtgcccaacttgcgcattctggcttgcggaggggacgggacagtcggctggatcctcagtattctggatgagctacagctgagcccccagccccctgttggcgtgttgccacttggaaccggcaacgatttggcaaggaccctgaactggggcggtgggtatactgatgagcctgtttctaaaattttatgccaggtcgaggatggcacagtggtccaactcgacagatggaatctgcacgtggagagaaaccccgaccttccacccgaagagctggaggacggagtctgtaaattgcctctgaacgtgttcaacaattatttcagcctcggcttcgacgctcacgtgacactggagtttcatgagtcccgcgaggcaaacccagagaaatttaacagccgcttcagaaacaaaatgttctacgccggtgctgcgttttcagatttcctccagcgatctagtagagacttgtccaagcacgttaaagttgtgtgtgacgggacagatctgacgccgaagattcaggagctgaagtttcaatgcatagtgtttttgaacatcccacgctattgtgccggtacaatgccttggggcaaccctggtgatcatcatgactttgaaccacagaggcatgatgatgggtatattgaagtgatcggctttactatggcatctctggccgctttgcaggtcgggggacacggggagaggctccatcaatgccgggaagtgatgctcctcacatacaagtcgattccaatgcaggtggacggcgagccatgccgactggcacccgcaatgatacggatcagcctccggaaccaggcgaacatggtgcagaagtctaaacggaggacatccatgcccctcctgaatgacccacagagtgtgcccgaccgacttcggatacgggtgaacaaaatttcactacaggactatgagggctttcactacgataaggagaaacttagagaagccagtatctctgactggctccgaaccatcgctggagaactagtgcagagttttggggcaatcccgttgggcattcttgtggtgcggggagattgcgacctggagacatgtagaatgtatattgacagattgcaggaagatcttcagtcagttagctctggaagccagcgcgtacactaccaggatcacgaaacaagcttcccacgggctttatcagcacagcgcttatcacccaggtggtgctttctggatgatcggtcacaggaacatctccattttgtgatggaaatctctcaggacgaaatttttatactggatccggacatggttgtgagtcaaccagctggtaccccaccgggtatgccagatctggtggtagaacaggcctcaggaatcagcgactggtggaacccagcactgaggaagagaatgctatccgactctggtctcggcatgatagcaccatattatgaagactccgacctgaaagacctgtcccactctagagtgctccagtcccctgtgtcctctgaggaccacgccatcctccaggcagtaatcgctggcgacctgatgaagctgatcgagtcctacaagaatggcggttcactgctcattcagggacctgaccactgctctctcctgcactacgctgccaagaccgggaatggtgaaattgtcaaatatatccttgatcacgggccttcagagctgctggacatggcagatagtgagacgggcgagacagctctacataaagctgcatgtcaaaggaacagggctgtctgccagctgttggttgacgccggtgcctctctcagaaagaccgatagcaagggaaagactccccaggaaagggctcaacaagctggtgatcctgacctggctgcatatctggaatcccggcaaaattataaagtcattggccacgaagacctggagacagccgtatag

SEQ ID NO: 220704 - DNA, 3207 bp, synthetic construct
  misc_feature 1..3207: note = Description of Artificial Sequence: Synthetic coding sequence
  source 1..3207: mol_type = other DNA
atggacgcagccggacggggttgccacctactccccttacctgcagcaagagggcctgctcgggcaccagccgcagccgcagctgccgcagcctcccccccagggccttgctccggcgctgcttgcgcgccatccgctgccgcaggtgccggagccatgaaccctagtagtagtgcaggggaggagaagggggctactggaggcagctcatccagtggttctggagctgggagttgctgtttgggggctgagggcggagctgaccccaggggagctggcagcgcggctgcagcgggagcagctgccttggacgaacctgccgcagcgggtcagaaggagaaagacgaagctctcgaggagaaactgagaaacctgaccttcagaaaacaggtgtcttataggaaggccatttcgcgcgctggactacagcacctggcccctgcgcatcccctgagcctacccgtggccaatgggcctgcgaaagagccaagagctacgctcgattggagcgagaatgccgtcaacggggagcacctgtggctcgaaacgaacgtcagcggcgacttgtgctacttaggcgaagagaactgccaggtgaggttcgcaaaaagtgccctcaggagaaaatgtgcagtatgcaagatcgtggttcacacagcatgcattgagcagcttgagaaaatcaacttcaggtgtaagccaacattccgggaaggaggatctcgctcacccagagagaattttgtgcgccaccactgggtgcaccgaaggcgccaggaaggcaagtgtaaacagtgtggtaaggggttccaacagaagttcagcttccactccaaggaaatcgtggcaataagttgttcctggtgcaagcaggctttccataacaaggtcacatgttttatgctgcatcacattgaggagccatgcagccttggggctcatgcagcagtgatcgtgcctcccacatggatcattaaagtcaagaagccgcagaatagtttgaaggcaagtaatcgaaagaagaagagaacatcgtttaaacgcaaagcctctaaaagggggatggagcaggagaacaagggccgtcccttcgtgattaaaccaatttcgagcccacttatgaaaccgctattggtgttcgtcaatccaaagtctggaggaaaccaaggcacgaaggtcttacagatgtttatgtggtatctcaaccctcggcaggtgtttgacctcagccaggaagggccaaaagacgctctggagctgtataggaaggtgcctaatctgcgtatccttgcctgcgggggagatggcacagttggctggatattgtcaatacttgatgagctgcagctctcaccccagccacccgttggagtactgccactaggcacaggcaatgacttggctcgcactctcaattgggggggaggatatacagacgagcccgtgtccaaaatcctgtgccaggtggaggatggcaccgtcgtgcagctggaccggtggaacctgcacgtggaacgtaatccggatctgccaccagaagagcttgaggatggcgtctgtaaacttcctctcaatgtctttaacaactactttagcctgggatttgatgcgcatgtcaccctggaatttcacgagtcccgggaggctaatcctgaaaaattcaatagcagatttagaaacaagatgttctatgctggggctgccttctcagatttcttgcagcgcagttcacgtgatctgagcaagcatgtcaaggtcgtgtgtgatggaacggatctgactcccaagattcaggaactaaaattccaatgtattgtgtttctgaacatacctcgctactgcgcaggaacaatgccgtggggcaatccgggtgaccaccacgactttgagcctcaacgtcacgatgacgggtatatcgaggtgattggctttaccatggcttcacttgcggctctgcaggttggcggacacggtgaaagactgcatcagtgccgagaggttatgctgctcacgtataaatcaatcccgatgcaggtcgacggggagccatgtcgtcttgcacctgctatgatacgcatatctttgaggaatcaggcaaacatggtgcagaagtcgaaacggagaacatccatgccactacttaacgatatccaccaggtacagaccgccgatcttcgacgagtgtcagcacctccaggatcgtttaccatacctcaatccgtccccgaccgcctgaggattcgtgtgaataagatcagcctgcaggattacgaaggctttcactacgataaggaaaagctaagagaggctagtatcccattaggcattctagtggtgagaggtgactgtgaccttgagacttgcaggatgtacatagacagattacaggaggatctccagtctgtctcgagcggaagccagcgggttcactatcaagaccatgaaacctcatttccaagagccctgagcgcacagcgcttaagcccgagatggtgcttcctagatgacagatcacaggagcatctgcactttgtcatggaaatttcacaagacgaaatttttatacttgatcccgacatggtggtgtcacagcctgccggaacccctcctggaatgcctgacctggtcgtggagcaggccagtggaatttccgactggtggaatccagcattgcgaaagcgtatgctgtccgattccgggttgggcatgatagcaccttactacgaggatagcgacctgaaggatctgagccattctcgcgtgttacagagtccagtttcttccgaagaccatgcaattctgcaggcagtaattgcaggagacctgatgaaattaatagagagctataagaatggcggatctctgctgatccaaggacctgatcattgcagtctgctccactatgcagctaagactgggaacggtgaaattgtaaaatatattctggaccacggcccaagcgagctgctagacatggcagattccgagacaggggagactgccttacacaaggcagcctgtcagagaaatagagcagtatgccagctactagtcgacgccggagctagcctgcgcaaaaccgattcaaaaggcaagaccccgcaagagcgtgctcagcaggcaggtgatcccgacctagctgcctacctggagtccagacaaaattataaggttattgggcacgaagatcttgaaacggcggtctag

SEQ ID NO: 220705 - DNA, 2949 bp, synthetic construct
  misc_feature 1..2949: note = Description of Artificial Sequence: Synthetic coding sequence
  source 1..2949: mol_type = other DNA
atgaacccatcgtcctctgcgggagaggaaaagggagcgacgggaggtagcagctcctccggtagcggagcgggtagttgctgcctgggcgctgaggggggtgccgaccccaggggcgctgggagtgctgccgcagctggtgccgctgccctcgatgagcctgctgcagcgggtcagaaggaaaaggacgaggctcttgaggagaagttgcggaacctgacgttccgaaagcaggtaagttacaggaaagctatttcaagagccggattgcagcacttggctcctgcccaccctctttcgcttccagtcgcaaatggaccagctaaggaaccaagagccaccctcgattggagcgagaatgctgtcaacggagaacatctgtggcttgagaccaacgtcagcggagatttgtgctatctaggggaggaaaactgtcaggtgcgctttgccaaaagcgcccttcgcaggaagtgcgccgtgtgcaagatcgtagtacatacggcatgcatagagcagctggagaagattaattttcgttgcaagcccacttttcgggagggcggttcccgaagtcctagggaaaactttgttcggcaccactgggtgcaccggagacggcaagaaggtaaatgtaagcagtgtggaaaaggattccagcaaaagttcagcttccatagcaaggagatcgtggctataagttgctcatggtgcaaacaggcgtttcacaacaaagtcacctgcttcatgctgcaccacatcgaagagccgtgcagcctcggcgcacacgccgctgtgattgtgcctcctacctggatcatcaaggttaagaagcctcagaactctttaaaagctagcaaccgtaaaaagaaacggacttcttttaaacggaaagcttccaagcgcggaatggagcaggagaacaagggcaggccctttgtgatcaagccaatatcttcccctctcatgaaacctttgttggtatttgtcaatcctaaatctggaggaaatcaaggaacgaaagtgttgcaaatgttcatgtggtatctcaatcccagacaggtgtttgacttaagccaggaggggccaaaagatgccctagagctttatcggaaagttcctaacctccggatcctggcctgcggtggggacggcactgtgggatggatcctgtccattctcgacgaactccagctgtcacctcaaccgcctgttggagtgcttcccttgggcactggcaacgacttggccaggacactgaactggggcggaggctacacagacgaaccagtctccaagatcctttgtcaagtggaagatggcacggtggtccagctcgaccgctggaacctccacgtagagaggaaccccgacctgcctcccgaggaactcgaagatggggtttgtaaactcccgctgaatgtgttcaacaattatttcagtttgggcttcgatgctcacgttacacttgaattccacgaaagccgagaggcgaatcccgaaaagtttaattcccggtttcggaacaagatgttctacgcaggggcagccttttctgacttcctccagcgctcctctcgcgacctgtctaaacacgttaaagtggtatgcgacgggaccgacctgactcccaagatacaagagttgaagtttcagtgcatcgtgtttctgaacattcctaggtactgtgctgggacgatgccctggggaaacccgggagaccatcacgactttgaacctcaaaggcacgatgacgggtatatcgaagtgataggcttcacgatggctagcttggctgcattacaagtggggggacacggggaaagactgcaccagtgccgcgaggtgatgctgctgacctacaagtccatcccaatgcaggtggacggggagccctgtaggcttgcacctgcgatgattcggatctcattaaggaaccaggctaatatggtgcagaaatcaaagcggaggacatcgatgccactgctgaatgaccctcagagtgtgccagatagactgaggattagagtaaataaaatctctctccaggattatgaaggctttcactacgacaaggaaaagttacgggaggcctctattagtgactggctacggactatagccggagagctcgtgcagagttttggggctatcccactgggcatactagtggtgaggggcgactgcgatctcgaaacttgccgaatgtatatcgatagattgcaagaagacttacagagtgttagttcagggagccaaagagttcactatcaagatcacgaaacctcttttccacgcgcactgagtgcgcagaggttgtctcctcggtggtgtttccttgatgcaacctctgccgataggttctacagaattgaccggagtcaggagcacctgcattttgtcatggagatcagccaggatgaaattttcatcctcgaccccgatatggtagtgtcccagccagccggaacaccaccaggaatgcccgatctcgtggtggagcaagcctctggcagccccgtgtctagcgaggaccacgcaatcttgcaggccgtgattgcaggggacctgatgaaactgatagagtcctataagaatggcggatcccttctgattcaaggtccggaccactgtagtttactgcactacgccgcaaagacggggaatggggagatcgtcaaatatatccttgatcacgggccttctgagctccttgatatggccgatagcgagactggtgaaactgccctgcataaagccgcatgtcagaggaaccgggctgtgtgtcagctgctggttgacgccggtgccagtctgcgtaaaactgacagcaaggggaaaaccccgcaggaaagagcgcaacaggctggggaccccgatctggctgcctatctggaaagtcgtcagaactataaggtgatcgggcacgaggatctggagaccgcagtgtag

SEQ ID NO: 220706 - DNA, 2829 bp, synthetic construct
  misc_feature 1..2829: note = Description of Artificial Sequence: Synthetic coding sequence
  source 1..2829: mol_type = other DNA
atggcagctgctgctgagcctggagctcgggcttggctcggcggaggctcacctcgtccaggcagtccagcatgcagccctgtcctcgggagtggcggtcgtgctagacctggccctgggccaggccctgggccagaacgggctggggtgagggcccctggtcccgctgctgcacccggacacagtttccgcaaagtgacattgaccaaacccaccttttgtcatttgtgttcagactttatttgggggctggcagggttcctctgcgatgtctgtaattttatgtctcatgaaaaatgcctgaaacacgttaggatcccatgcaccagcgtggcgccaagtctcgtgagggtgcccgtggcccactgcttcggccctcgcggtttacataaacggaagttttgcgcagtctgtagaaaggtgctggaagcacccgctttgcactgtgaagtgtgtgagctacacctccatccagactgtgtgccttttgcctgcagcgactgccgccagtgtcaccaagatggccaccaggaccacgatacacaccatcaccattggagagaggggaacctccctagcggagctcgatgcgaggtgtgtcgaaagacttgcggaagtagtgatgtgctagcgggtgtaagatgcgagtggtgcggagtgcaggcccatagcctgtgcagcgcagcactcgctccagagtgcgggttcggcagactgcggtccctagtccttcctccggcttgcgtgcggctattgcccggagggttctccaagacacagtcgtttcgcattgtggaggccgctgagccaggtgaaggaggggatggagcggacggatcagccgcagttgggcctggtagggagacccaagccacaccagaatctgggaagcagactttaaagatctttgatggcgatgacgctgtgcgccgatctcagttcaggttagttacggtttcccgccttgctggggcagaagaggtgctggaggcagccctacgggctcaccatatcccagaggatcctggacatctggaactctgtcgactgcccccatcctcacaggcttgtgacgcgtgggccggaggaaaagcaggttcagccgtgatatctgaagagggaaggtcgcccggttccggagaggcaacgcccgaagcatgggtcatccgcgcactgcccagggcacaggaggttctcaaaatttaccccggatggctgaaagtgggtgtcgcatacgtgtccgtgagggtgactccaaagagcacagcaagaagtgtggtgctggaggtgctgcccctgctcggcaggcaggccgagtcccccgaatcttttcaattggttgaagtggctatgggatgcagacatgtccaaagaactatgctgatggatgagcagcctcttctggatcggttgcaggatatccgacagatgtctgtgcggcaagtgagccagacccggttttatgttgcagagagtagggatgtggctcctcatgttagtctctttgtcgggggattgccacccggattgtctcctgaggaatactcctctctcctccatgaggccggagccaccaaggccactgttgtatctgtcagccacatctatagttcgcaaggcgcagtcgttctcgatgtggcatgttttgccgaagcagaaaggctctacatgctcctgaaagacatggccgtgcggggtcgccttctcaccgctttggtattgccggatttgctacacgccaagctccccccagactcttgtcctctgcttgtattcgtgaatccgaagtctggtggcctcaaaggtagggacctattgtgtagcttcaggaaacttctcaatccgcatcaggtgttcgacctgaccaatggagggccactccctggcctgcacctgtttagccaggttccatgtttcagagtcctggtctgcggaggcgatggcacggtcggctgggtcctgggagcactggaggagacaagatatcgactagcctgtcccgaaccttccgtggcgatactgccgcttggcactggaaacgatcttggtcgcgtcctgcggtggggcgcaggttactcaggggaagatcctttttccgtgcttctgagtgttgacgaagcagacgcagtgctgatggatcgctggaccattcttctcgatgcccacgaagccggatctgctgaaaatgacacagccgatgcagaaccccctaagatcgtccaaatgtccaactattgcggtataggaattgacgcggagttgagcctggacttccaccaggctcgtgaggaagaacctggcaaattcacaagccgcttgcacaacaaaggcgtttatgtccgcgtcgggttacaaaaaattagccactcacgaagcctgcataagcagatccggctgcaagtggagcgccaggaagtggagctgccatccatagagggcctgattttcatcaacataccaagctggggtagcggagctgacctgtggggctccgactccgatacaaggttcgagaagcctagaatggacgacggtctcctagaagtagtcggggtcaccggcgtcgtgcatatgggccaggtccagggcggactcagatcaggtatcagaattgcccaggggtcctacttccgggtgactcttctcaaggctacgcccgtgcaagtcgatggggagccctgggtgcaggccccaggacacatgattatctccgcagctgggccaaaagtgcacatgctgcggaaagccaaacagaagccacgcagggccggaactactagggacgcaagagctgacgcagcccctgcacctgagtctgatcctaggtag

SEQ ID NO: 220707 - DNA, 1632 bp, synthetic construct
  misc_feature 1..1632: note = Description of Artificial Sequence: Synthetic coding sequence
  source 1..1632: mol_type = other DNA
atgcctgggatggtgctctttggcagaaggtgggctatcgcttccgatgaccttgtgttccctggtttttttgagctcgtggttagagtcttgtggtggataggcatcctgactctctatttaatgcatagaggaaaattggactgcgctggcggtgctctcctcagcagttatctcatcgtgctgatgatcttattagcagtagtgatctgcacagtgtccgccattatgtgcgtgtcaatgcgcggaacaatctgcaaccccggacctagaaagagtatgtccaagcttctgtacatacgactcgcacttttctttcctgagatggtgtgggccagtttaggggctgcctgggtggcagacggcgtgcagtgtgatcggaccgtggttaatggcattattgcgacagtagtggtgcgtacccagatctggtgtccagccacactgagacgggctagcccctgttttatcagtaatcgaacaatctctggtactaccaagagcctccccaggtggagtgccatgccccaaggggctcctagctgtagaagtaggactaccgactatgatctggtgggtggcgaccaattgaactgtcactttggatcaatcctgcatacaacgggtctgcagtaccgggactttattcacgtgagctttcatgataaagtgtacgaactccctttcctcgtggcattggatcatcgaaaagaatccgtcgtcgttgcggtacgtggtaccatgtccctccaagatgttttgaccgatttgagcgcagagagtgaagtattggatgtggagtgtgaggtgcaggatcggttagctcataagggcatctctcaagcagcaaggtacgtctaccagcgcctcatcaatgatggcatcctaagtcaggccttttccatcgcccctgagtatagattggtaattgtgggccattccctgggaggtggagccgctgcgcttttggccacaatgctgagagctgcatatcctcaggttcggtgctatgctttctcccctcccaggggactgtggtcaaaggcgctgcaggagtattctcagtcctttatcgtaagtttagtccttggcaaggacgtgatccctagattatccgtaacgaatctggaagatcttaaacggaggatcctccgggtggtggcacattgtaataaaccaaaatataaaattctgctccacggactgtggtacgagctgttcggcggtaatcccaacaatcttcccaccgagctggatggaggcgaccaggaagtgcttacccaacctttgctcggggagcagtccctgctgacaaggtggtcgccagcatattcatttagttctgactcacctcttgattcctctcccaagtatccaccactctaccctcctgggaggattattcacttacaggaagagggggcatccgggagattcgggtgctgctcagcagcacattacagcgctaagtggtctcatgaggcagagttctcaaagattcttattggacccaagatgctgacagatcacatgcccgatatccttatgcgcgctctagattcagtggtaagcgaccgagctgcatgtgtctcgtgccccgctcaaggcgtgtccagtgtcgatgtcgcctag

SEQ ID NO: 220708 - DNA, 3129 bp, synthetic construct
  misc_feature 1..3129: note = Description of Artificial Sequence: Synthetic coding sequence
  source 1..3129: mol_type = other DNA
atgcccggaatcgtggtctttcgacgacgctggtccgtgggtagtgacgatctggtgctgccagccattttcctgtttttgctccacacaacctggtttgttatactgagcgtcgtgctgtttgggctggtctataacccccatgaggcctgcagcctgaacctggtcgatcacgggcgaggctacctggggattttgctctcctgcatgatcgccgaaatggccattatatggctgtctatgcggggaggcattttatacaccgaacctcgagatagcatgcagtacgtcctatacgtgcggctcgcaattctcgtgatcgaatttatatacgctattgtcggaattgtgtggctgacacagtattacacctcctgtaatgatctcacggccaagaatgtcaccctcgggatggtggtgtgcaattgggttgtgatcctctccgtctgcattaccgtgctctgtgtattcgatcccacaggacgaactttcgtgaagctgagagctacaaagagacgtcagcgcaatctgagaacatataacctgagacacaggctggaagaggggcaagcaacctcgtggtcaagaagattgaaagtattcctctgctgtactcgcaccaaggacagtcagtcagacgcatacagtgaaatcgcttatttgttcgcggaattcttccgggatctggacatcgtccccagcgacataatcgctggcctggttctcctgcggcagagacaacgagcaaaaagaaacgctgtgctggatgaggctaataacgacattcttgcattcctttctggtatgcccgtgaccaggaacacaaaataccttgatttaaaaaatagccaggaaatgcttagatacaaagaggtgtgctattacatgttattcgcacttgctgcttatggctggcccatgtaccttatgcgaaaacctgcctgcgggctgtgtcagctggctcgttcatgcagttgctgtctgtgccctgcgcgacccaggttcgcccctggcgtgacgatcgaggaggataattgctgcggctgcaacgcgattgccattcggagacattttctggacgagaatatgactgctgtggacattgtgtatacatcttgccatgacgcagtgtacgagacccccttctatgttgctgtggaccatgacaaaaagaaggtcgtgatttcaatccggggaaccctaagccctaaggacgccttaacagaccttaccggagacgcagagcgcctgcctgtcgaagggcatcatggaacatggctaggccataaggggatggtgctgtccgccgagtacatcaagaaaaaactagagcaggagatggtgctgagccaggctttcgggagagatctggggcgtggaaccaagcattatgggttaattgtggtgggccactcactgggagccggaaccgcagcaatactcagctttctgctgagaccccagtaccctacgctaaagtgtttcgcatattcaccgcctggtgggctcttgagcgaggatgctatggagtatagtaaggaattcgtgactgcagtggtccttggcaaagacttagtgccacggattggtctgtcgcaactggagggcttccggagacagcttctcgacgtcctgcagaggtccacaaaaccaaagtggaggatcatcgtaggagcaacaaagtgcatccctaagtctgagctgcctgaggaagtagaagtgacaaccttggctagcacgcggttatggacacacccttcagacctcacgattgcactgagcgcttctacccctctatatcccccagggaggattatacacgtggtccacaatcaccctgctgagcagtgttgttgctgcgaacaggaggagcccacatatttcgccatctggggcgacaataaggcatttaatgaagtgattatctcaccagccatgctgcatgaacatctgccttatgttgtcatggaaggcttgaataaggttctcgaaaactataataagggcaaaaccgcccttctgtccgccgcaaaagtgatggtctctccaactgaggtggacctaacgccagagctcatttttcagcagcaacctctaccgactggaccccctatgcctacaggattagctctcgagctgcccacagctgaccatagaaattcctctgtaaggagtaaaagccagtccgaaatgtccctggaaggcttcagtgagggacgattgttatcaccagttgtggccgctgcagctcggcaagacccagtggaactgcttctgttatcgacccaggagaggttggccgcagaactgcaggccagaagggcgccactggctaccatggagagcttatcagataccgaatctttgtactctttcgacagccgtagaagtagcgggtttcggtctataagggggtccccgagccttcatgcagtgttggagagagatgagggacacctattctacatcgacccagcaatccccgaagagaatccatctctaagcagcaggaccgagttgctcgccgctgatagcctgagcaagcacagccaagatacacagccattggaggccgcattaggttccggcggagtgacccctgagcggcctccctccgccgctgctaacgatgaagaggaggaggtcgggggaggcggtggtggacctgcgtcaaggggcgagctggctctgcataatggtaggctgggtgacagcccttctccacaggtgttggaatttgccgaatttatcgactcactgttcaacttggactccaagtcctcctctttccaggacctgtactgcatggtggttcctgagtcccctacgtctgactatgctgaagggcctaaatccccttcccagcaggagatcctgcttcgcgctcagttcgagccgaatctggttccgaaacccccacgcctcttcgctggaagcgcagatccctcctcaggaatctctctgtctccctcttttcccctgtccagttctggcgaactcatggatctgactcctacgggactgtcatctcaggagtgcttagcagcagacaaaatccggacaagtaccccaacaggacacggcgcttcccccgctaagcaggacgaactggtcatcagcgctcgttag

SEQ ID NO: 220709 - DNA, 2019 bp, synthetic construct
  misc_feature 1..2019: note = Description of Artificial Sequence: Synthetic coding sequence
  source 1..2019: mol_type = other DNA
atgcctggcatggtgctgttcggtcggagatgggccatcgcaagtgatgatctggtgtttccaggcttctttgaattggtggtgcgggtgctgtggtggatcggtatcctgactctgtacctgatgcaccgaggcaagctcgactgtgcaggcggagcacttttgtctagttacctgatagtcctgatgatcctgctggccgtcgttatttgcacggtgtcggccatcatgtgcgtgagcatgaggggtacaatctgtaatcccggaccacgaaaatccatgtctaaattgctctacatcaggctagctctctttttcccagagatggtgtgggcaagccttggggctgcatgggtggccgatggcgtacaatgtgacagaaccgtcgtgaacgggatcattgctactgtcgtggtgagctggattattatcgctgctacggtggtctcgatcatcatagtattcgatcccctgggtggcaagatggccccatacagctcagcgggaccatctcatctggattctcacgactcctcccagttgctgaacggacttaagaccgccgcaacctctgtatgggagaccaggattaagctgctgtgttgctgcatcggcaaagatgaccacacacgcgtagcgttctcctccactgcagagttattctcgacatacttttccgataccgacttagtaccgagtgacattgctgccggactggcactgcttcaccagcaacaggacaatattaggaacaaccaggagccggcacaggtggtctgccatgccccaggttctagccaggaagctgaccttgacgctgagcttgagaattgtcaccactatatgcaattcgccgcagccgcttatggctggcctctgtacatctatagaaatccccttacaggactttgccgcatcggtggggattgctgtagatcacgaacaaccgactacgatcttgtggggggtgatcaactcaactgccattttggttccatcctgcatacgacaggtctgcagtaccgcgatttcattcacgttagctttcacgataaagtctacgagctacccttcctggtggcccttgatcaccgcaaggagagcgttgtagtcgcggtgcggggaacaatgagcctccaggacgttctaaccgatctgagcgctgagtctgaagtgctcgacgtggaatgtgaggtgcaggacaggctggctcacaaaggaatctcccaagccgctaggtatgtataccagaggttgattaacgacgggatcctgtcgcaggcgttttcgatcgccccagagtatcggctcgtgatcgtggggcattctctcggcggaggcgcagctgcccttctggcaaccatgttaagagcagcgtaccctcaggtgcgctgctatgccttctcaccacctcggggactgtggtccaaagctctgcaggaatacagccagtcattcatcgtgtcactcgttctagggaaggatgtaattcctcggctgtctgtgacaaatctcgaagatcttaagcggagaatccttagagtcgtcgcccactgtaacaagcctaaatacaaaatcctgctgcacggactgtggtatgaattgtttggcggaaacccgaacaacttgcccacggagttggacggaggtgatcaagaggtcctgacccaacctttgcttggcgagcagagcctactcacgagatggtctcccgcttactctttcagcagtgatagtcccctggattcttctcctaagtacccacctctgtatccgcctgggaggatcatccaccttcaagaagagggcgcttcaggaaggtttgggtgttgtagtgccgctcattatagtgcgaaatggagtcacgaagcagagttttccaaaatccttatcggaccaaagatgctgacggatcatatgcccgatattttaatgagggccctggacagcgttgtctctgatagggctgcatgcgtgagttgcccggctcagggtgtgagttccgtcgacgtggcatag

SEQ ID NO: 220710 - DNA, 663 bp, synthetic construct
  misc_feature 1..663: note = Description of Artificial Sequence: Synthetic coding sequence
  source 1..663: mol_type = other DNA
atgtactgcgtatctcatcatgtgtgccagcacgaaaggactcagatatggtgtccagcaacactacggagagcaagcccgtgctttatttccaaccgcaccatctcgggcactaccaaaagcctccccagatggtctgccatgccacagggcgctccatcctgtcgcagcagaacaaccgactacgatctcgtcggaggcgaccaactcaactgtcacttcggatctatcctgcacaccacaggcctgcagtatcgagactttattcacgtctcatttcacgacaaagtttatgagctcccattcctcgttgctctcgaccacaggaaagagtctgttgtggtggcagtacgaggtactatgtcacttcaggacgtgctgaccgatttgtccgccgaatctgaggttctcgacgtggaatgtgaggtacaggataggcttgcccataaaggcatatcccaggccgctagatacgtgtaccagcgcctgattaatgatggaatcttatcccaagcgttctctattgctccggagtacagactcgtgattgtcggacatagtctcggcggtggagccgctgcgctactggctactatgttgcgggctgcatatccccaagtgagatgctacgcttttagtcctccacgagggctttggagatag

SEQ ID NO: 220711 - DNA, 1140 bp, synthetic construct
  misc_feature 1..1140: note = Description of Artificial Sequence: Synthetic coding sequence
  source 1..1140: mol_type = other DNA
atgtactgcgtgtctcatcacgtctgccagcatgagtcttggattataattgctgccaccgtggtgtcaataattatcgtgtttgacccactgggtgggaaaatggccccatactccagcgcaggcccttctcacctcgactctcatgacagtagccagcttcttaatggtttgaagacggccgcaacctctgtgtgggagactcggatcaagctgctgtgctgctgcattggcaaagacgatcacacaagggtggcttttagttcaaccgctgaactgttctcgacctatttttctgacactgatctggtccctagcgacattgccgcaggcttagccctgctgcaccagcagcaggataatatccgcaacaatcaagaaccagcacaggtggtatgtcatgccccagggagctcccaggaagcagacctggacgctgagctggaaaactgtcaccattatatgcaattcgctgctgccgcttacgggtggcctttgtatatttatcgcaacccgctcaccgggctctgtcggatcggaggagactgctgtagaagcaggacaacagattacgacctagtcggcggtgatcagctgaattgccattttggatcaattcttcatactaccggcctgcagtaccgcgactttatccacgttagcttccatgataaagtctatgagttgccatttctggtggctctcgaccaccgcaaagaaagcgtggtcgttgcagtccgaggcacgatgtccctccaggacgttcttactgacctcagcgcggagtcagaggtgcttgacgtagagtgtgaggtccaggatcgcttggcgcacaagggcatatctcaagctgcccgatacgtttatcagcgacttatcaatgatgggattctgtcccaggccttcagtatcgctcccgagtaccgtctggtcatagttggccatagccttggtgggggagccgctgccctcctggcaactatgctgcgggctgcttacccgcaacagagttctgctggcatattctccgagcttcaccgcgtgacaagacctggcgagggttgcgactcacaggctcagtgcgatcaacttggaagatcagaagagaaaaaccttgctagtgggcgtgcgctgcagtag

SEQ ID NO: 220712 - DNA, 804 bp, synthetic construct
  misc_feature 1..804: note = Description of Artificial Sequence: Synthetic coding sequence
  source 1..804: mol_type = other DNA
atgccaggtatggtgctgttcggtcggagatgggccattgccagtgatgacctggtgtttccaggcttcttcgagttggtcgtgcgagtgctttggtggatcggaattctgactctatatctgatgcaccgaggaaagttggattgcgccggaggcgcattgctatctagctacctcattgtgctaatgatcctgctcgccgtcgtcatctgcacagtctcagccattatgtgcgtctcaatgcggggaacaatctgcaatccaggccctcggaagtcaatgtcgaaactgctatacatccgtctcgctctgttttttcccgagatggtctgggcctcactgggtgctgcctgggtagcagatggggtacagtgcgaccgcactgtggtgaacggtatcattgcaacagttgtcgtctcatggattatcatcgctgccacagtggtcagtatcattattgtctttgaccctctaggcggtaagatggctccgtactcctccgctggaccttcacatctcgacagccacgattcatctcagcttctgaatggtctgaagacggccgctacttcggtctgggaaaccaggatcaagctcctgtgttgttgtataggaaaggatgatcatacgagggttgcgttctcatcaacagcggaattattcagcacttattttagcgatacagacctggtgcccagtgacatcgctgccggactggccttgctgcatcagcagcaggacaacacgcgagcgactggtaactgcccaagaaacgacggcctgacccttctctctcttaactag

SEQ ID NO: 220713 - DNA, 1467 bp, synthetic construct
  misc_feature 1..1467: note = Description of Artificial Sequence: Synthetic coding sequence
  source 1..1467: mol_type = other DNA
atgggtgatagaggctccagccggcgaaggcgcacgggttcacgtccttcctctcatggtggcggaggccctgcagccgcagaggaagaggtgcgcgatgccgcagcagggccagacgtcggggcagccggtgacgcccctgcgccagctcccaacaaagacggcgacgctggagtcggctcggggcactgggagctgaggtgccatagattgcaggacagcctgttctcatcagactccggtttttcgaattatcgcggtatcttgaattggtgcgtggtgatgcttatcctcagtaatgcaaggctctttctggaaaatctgatcaagtacggcatcctggtggatcctatacaagttgtgtctctgtttctgaaggacccatacagctggcctgccccttgtcttgtcatcgccgctaacgtattcgctgttgccgcattccaggttgagaagcggctggcggtgggagcactaacagagcaggcaggcctgctgcttcatgtggccaatctcgctactatcctctgcttccctgctgccgtggttctcttagtggagagcatcaccccggtggggtcactactggctctgatggcacacaccattctgttcctgaaacttttctcatatcgggatgtaaacagttggtgcaggcgggcacgcgcaaaggccgcttctgccggaaaaaaagcttctagtgccgctgctccacacaccgtgtcctacccagataacctgacctaccgggatctgtactactttctgttcgcccctactctctgttatgaattaaactttccaagatcaccacgaatcagaaaacgcttcctcctaagaagaatccttgagatgctttttttcacccaactccaggttgggttgatccagcagtggatggtccctacaattcagaacagcatgaagccctttaaagatatggactattcaagaataatagaaagactcctaaagctcgcagttccaaaccacctcatatggctcatctttttctactggctgtttcactcttgcctgaatgcagtagctgagctcatgcagtttggggaccgcgagttctacagagactggtggaatagtgaatccgttacctacttctggcagaactggaatattcccgttcataagtggtgtatccgtcacttctataaaccaatgctgagacggggttcgtctaaatggatggcacgcaccggcgtgtttttagctagtgcattctttcatgagtacctggtctcagtgccgcttaggatgttcagactctgggcctttaccggaatgatggcccagatccccctggcctggtttgtcggaagatttttccaagggaactacggcaatgccgcagtgtggttaagccttattattggtcagcctattgcagtgctaatgtatgtgcatgattactacgtccttaactatgaggctccggctgccgaagcatag

SEQ ID NO: 220714 - DNA, 282 bp, synthetic construct
  misc_feature 1..282: note = Description of Artificial Sequence: Synthetic coding sequence
  source 1..282: mol_type = other DNA
atgaagctgctgatggtcctgatgctagccgctctatcgcaacattgttatgcaggctcaggttgccctttgctggaaaacgtaataagtaaaacaataaatccccaggtgtccaaaaccgagtataaggagctgctgcaggagttcattgacgataatgctacaaccaatgctatcgatgagttgaaagagtgtttcctgaatcagacggacgaaaccctgagcaatgttgaggtgtttatgcaattgatatatgattcttccctttgtgacctcttctag

SEQ ID NO: 220715 - DNA, 1038 bp, synthetic construct
  misc_feature 1..1038: note = Description of Artificial Sequence: Synthetic coding sequence
  source 1..1038: mol_type = other DNA
atgaagaccctgatcgctgcctacagcggcgtcctccgtggtgagcgtcaggcagaggcagacaggtcacagaggtcacacgggggacccgctttgagtagagaagggtcgggcagatggggagtggcctgtagcgctatattgatgtatatcttttgcacagactgctggctgatcgcagttctgtatttcacatggctggtgtttgactggaatacccccaagaagggcggacgcagaagccagtgggtgaggaactgggctgtgtggagatacttcagagattacttccctatccagctggtcaagacccataatcttttaacgactcggaactacatcttcggctaccatccacatggtatcatgggcttgggagcattctgcaatttctctacagaggcgaccgaagtttccaaaaagttcccagggatcaggccttacctggccaccctcgctggtaacttcagaatgcctgtgctacgggagtatctcatgtccggcggaatctgcccagtctcaagggataccatcgactacctgctgtccaagaacggatccggcaatgctatcattattgtggtgggtggcgctgctgaatccctgtccagcatgcctgggaagaacgccgtgactctccgtaaccgcaaggggttcgtaaaattagcgctcaggcatggtgcagacctggtgccaatctattctttcggtgagaacgaagtgtataaacaggtgatattcgaggagggatcatggggcaggtgggtacagaagaaattccagaaatatatcggcttcgctccttgcatcttccatgggagagggcttttttcttccgacacttgggggctggtaccttactccaagcccattactaccgtcgtaggtgagcccattacaatacctaaattggagcatccaactcagcaggatatcgatctctaccacacaatgtacatggaagctttagtgaagctgttcgataagcacaaaacaaaattcggcctgcccgagactgaggtgctcgaggttaactag

SEQ ID NO: 220716 - DNA, 3306 bp, synthetic construct
  misc_feature 1..3306: note = Description of Artificial Sequence: Synthetic coding sequence
  source 1..3306: mol_type = other DNA
atggagcagccaggtgccgctgcctctggagctggcggaggctctgaagaaccgggtggaggcagatctaataaacgcagtgctggcaaccgcgctgccaacgaagaggaaacaaaaaataagcccaaacttaacattcagattaaaactctcgccgacgacgtgagagaccggattacctcattcaggaaaagcaccgtgaaaaaagaaaagccattgattcaacaccctatcgatagtcaggtggcgatgtccgaatttccggctgctcagcccctttacgacgagcggagtttaaacctgtcagagaaagaggtgctcgatctttttgaaaagatgatggaagacatgaatttgaacgaggaaaagaaagctcctctgaggaacaaggacttcaccactaagcgtgaaatggtggtccagtatatctctgctaccgccaagtctggcggtctgaaaaacagtaaacacgagtgtacactgagcagccaggagtatgtgcacgaactgcgcagcggcatcagtgacgaaaaattactcaactgcctcgagagcctcagggtgagtctgacgtcaaaccccgtctcttgggtgaataatttcggccacgagggactgggtttactgctggacgaactggagaaactcctggacaaaaagcagcaagaaaacatcgataagaagaatcagtacaagctgattcaatgcctcaaggcttttatgaacaacaagttcggcctgcaaagaatactcggagatgagaggagcctgctgctcctggcccgagccattgaccccaagcagcctaacatgatgacagagatcgtgaagatcttgagcgcaatttgtatcgtgggagaagagaacattctagacaagctactgggggctattaccactgccgctgaacgaaacaaccgggagcggttcagcccaatcgtggaaggactggagaatcaggaagctctgcagttacaggttgcctgcatgcaattcatcaacgctctcgtgacttccccatatgagctcgacttcagaattcacctgcgaaacgaattccttcgctcaggtctaaagactatgctccctgatctcaaagagaaggagaacgatgagctggacattcagctcaaggtgtttgatgagaacaaggaagatgaccttacagagctgtcacacagactgaatgatattagagctgagatggatgatatgaatgaagtgtatcatctcctgtataacatgctgaaggataccgccgctgaaaactatttcttatcaattcttcaacatttcctcctgattcgaaacgattattacatacgacctcaatattacaagataatagaggagtgcgtttcgcagatagtactacactgttcaggcatggacccagacttcaagtatagacagcgacttgacatcgacctgacacatctgattgacagctgtgtgaacaaagctaaggtcgaagaatcagagcaaaaagccgctgaatttagtaagaagttcgacgaggaattcacagcacgtcaagaagcccaagctgaactacagaagcgggatgagaagattaaggaactggaagccgaaatacagcagctcaggactcaagctcaggtgcttagttcatcgtccggaataccgggaccccctgctgcaccccctcttcccggagtggggcctcctccccctccccctgctccacctctgcctgggggagcaccgttacctccccctccacctccactccctggcatgatgggaattcccccaccccctccaccccctctgttgtttggcggacctcccccacccccaccactgggcggagttccccctccacccggaatttcactaaacctgccctatggaatgaagcagaagaagatgtacaagccggaggtttctatgaagcggataaactggagcaaaatcgaaccaacggaactgtctgagaattgtttctggctcagggtgaaggaggataaattcgagaatcccgatttgttcgccaaactagccctgaatttcgccacccagattaaggtacagaaaaacgccgaagcgctagaagagaagaaaacaggaccaacaaagaaaaaagtgaaagagttgcggatcctggatccgaaaacagctcagaatttgagcatttttctgggaagctaccgtatgccttacgaggacatccggaacgtcatcctagaggtgaacgaggacatgctgagcgaagccttaattcagaaccttgtgaaacatttgcctgaacagaagattttaaacgaactggccgagttgaagaacgagtatgatgacctttgcgagcccgagcagttcggcgttgtgatgtcaagcgtcaaaatgctacagcctcgtttaagctctattttgtttaagctcaccttcgaggagcatatcaataatatcaagccctctatcatagccgtcaccctggcatgtgaagaactcaaaaagagtgagagcttcaatcggctgctcgagctggtcctactggtgggcaactacatgaacagcggctcccgcaacgcccagtccttgggcttcaagatcaacttcttgtgtaagataagagacaccaagagcgcagatcagaaaaccaccctgttacactttattgctgatatctgcgaggaaaaatacagagacatactgaaatttcccgaagaattggagcatgtagagagcgccagtaaagttagtgctcaaatcttgaagtccaatctggcctccatggagcaacagattgtccacctcgagagggacataaagaaattcccacaggcagagaatcagcatgacaaattcgttgagaaaatgacctcattcactaaaactgccagggaacaatacgagaagctatctaccatgcataacaatatgatgaaactttacgaaaacctgggagagtatttcatctttgactctaagacagtgtccatcgaggagttctttggagatctaaataacttccgaactttgttcctggaggcagtacgagaaaacaataaacgcagagagatggaggaaaaaacgagacgggcaaagctagccaaagagaaagccgaacaagagaaactggagagacagaagaagaaaaagcagttaattgatatcaataaagagggcgatgaaaccggcgttatggacaacttgctggaagctttgcagagcggcgcagcttttcgcgatcgacggaagagaataccaagaaacccagacaatcggcgtgtgcccctggaaagaagtaggagcagacacaacggtgccattagctcaaaatag

SEQ ID NO: 220717 - DNA, 3291 bp, synthetic construct
  misc_feature 1..3291: note = Description of Artificial Sequence: Synthetic coding sequence
  source 1..3291: mol_type = other DNA
atggagcaacctggagcagccgctagtggagctgggggaggctctgaggaaccaggcggaggacgaagtaacaagcggtctgcagggaatagagcggcaaacgaagaggagactaaaaataagcccaaactgaacatccaaatcaagacattggccgacgacgtgagggatcgaattacttcatttaggaaaagcacagtgaaaaaggagaagccattgatccagcatcctatagattcccaggtagctatgtctgaattccccgcagcccaaccactttatgacgagcgctctctgaatctttcagagaaggaggtgcttgatctgtttgaaaaaatgatggaagacatgaatctgaatgaagaaaaaaaggcccctctgcggaacaaagattttaccacaaaaagggaaatggtcgtgcagtacatatccgctacagccaaatcaggaggtctgaaaaactcaaaacacgaatgtacactttcttcacaggagtatgtgcacgagctgcggtctgggatcagcgatgagaaattgctaaattgtctggagtccctgagagtctccttgacctcaaaccccgtcagttgggtgaataattttggccacgagggtctgggccttctactggacgagctggaaaaacttctggacaaaaagcagcaagagaacatcgacaaaaagaaccaatataagctcatccaatgcctcaaagcattcatgaacaacaagtttggcctccagcggattctgggtgacgagcggagcttgctactgttagctcgtgccattgacccaaaacagcccaatatgatgaccgagattgtcaaaattctgtctgccatttgcattgtgggcgaggaaaatattctggataaattactcggcgcaatcacgaccgccgcagaaaggaataatcgggaacgattttctcctatcgtcgaaggcctagaaaatcaggaagcactgcagctgcaggtggcttgtatgcaattcataaacgccctggttacatcaccctacgaacttgacttccgcattcacttgcggaacgagttccttcgcagtgggctaaagaccatgctccccgacctgaaggagaaagaaaacgatgaactagacatccaattgaaggtttttgatgagaacaaagaagatgaccttactgaattgtcacaccgcctcaacgacatccgagccgagatggacgacatgaatgaggtgtaccacttattatataacatgctaaaagatacagcggcagagaattattttctgtctatattacagcatttcctgctcatcagaaacgattattatatccgcccacagtattataaaatcatcgaggaatgtgtttcccagatcgtgctccactgttcgggcatggatcccgatttcaagtaccgccagaggctcgacatcgacctgacacacctgattgatagttgcgttaataaggccaaggtcgaagaatctgagcagaaggctgccgaattctcgaagaaattcgatgaggaattcactgctcggcaggaagcccaagccgaactgcagaagcgggacgagaaaatcaaggaactggaagctgagatacaacagctgagaacacaggcacaggttctgtccagttcctcagggattcctggacctccagcagcacccccattgcctggcgtcggaccgcctcccccaccaccagcaccacctttgcccggtggagccccactgccaccgcctcctcctccattacctggtatgatgggcatccctccaccaccacccccaccactgctgtttggcggtccgcctcctcctccacctctggggggtgtgcctcccccacctggcataagcctgaacctcccttacggaatgaagcagaagaaaatgtataaacccgaagttagtatgaagcgcatcaactggtctaaaatagagccgactgagttatccgagaactgtttttggttgcgggtgaaagaggataaatttgaaaacccggatctcttcgccaagctggccttaaactttgcaacacagattaaggttcagaaaaacgcagaggccctggaagagaagaagacaggcccaactaagaagaaggtcaaggaactgcgaatcctcgacccaaaaacggcccagaatctgtctatcttccttgggagttaccgcatgccttacgaagacatcagaaatgttatcctggaggtcaatgaggacatgctgtccgaggccttaattcagaatctagtgaaacatctgccagagcagaaaatcctgaatgaattggcagaactgaagaacgagtacgatgacctgtgcgagcctgagcagtttggagtggttatgtcttctgtcaaaatgttacagccacgcttatccagtatcctatttaaactgacctttgaagagcacatcaacaacatcaagcctagcattatcgctgtcactctggcgtgcgaagaactgaaaaagagcgaatctttcaaccgcctcttggagctcgttcttctggttggcaattacatgaatagcggctcacgtaacgcccagtctctagggtttaaaatcaacttcttatgtaaaattcgcgatacaaaatcggccgaccaaaaaacaactctgctacactttattgccgacatttgcgaggaaaagtacagggatatcctcaagtttccagaggagctcgaacacgtcgagtctgcatcgaaggtctccgctcaaatcctgaagagcaatctggcctctatggagcagcagatcgtgcatctcgaaagagacattaagaagtttccgcaagccgaaaaccaacacgacaagttcgttgagaaaatgaccatattcaccaaaaccgccagggagcagtatgaaaagctgtctaccatgcataataatatgatgaagctgtacgagaacctcggggaatacttcatcttcgactctaagactgtgagtattgaggagtttttcggtgacttgaacaatttccggacactttttctcgaggcagtgagggaaaataataagcggagggaaatggaggaaaaaacacggcgagcaaagctggctaaagaaaaggcagagcaggagaagttggagaggcagaagaaaaagaagcagctgatcgatattaataaggagggagacgagactggagtgatggacaacctgctggaggccctgcagtcaggcgcagcattccgcgacagacgcaagagaatcccgcgaaatcctgtggtgaatcacccctgtgccacccgcgcaaacccgcgaagcgcgacttag

SEQ ID NO: 220718 - DNA, 3291 bp, synthetic construct
  misc_feature 1..3291: note = Description of Artificial Sequence: Synthetic coding sequence
  source 1..3291: mol_type = other DNA
atggaacagccgggagcggcagcctctggcgcaggaggagggagtgaggaaccgggagggggacgatccaacaaaaggtctgctgggaatagggcagctaacgaagaggagactaagaataagcctaaactgaacatccagatcaagaccctggctgacgacgtcagagaccgtattacatcctttaggaaatcaactgtgaaaaaggaaaaacccctgatccaacaccctatcgattcccaggtggccatgagtgagttccctgctgcccagcctctatacgacgaacgcagcttaaatctatccgagaaggaggtcctggatcttttcgagaaaatgatggaggatatgaacttgaacgaggaaaaaaaagcccctctgcggaacaaagacttcactaccaagcgtgagatggtggttcagtacataagcgccaccgcgaagagtggaggcttgaagaattccaagcatgagtgtactctgagcagccaggagtacgttcacgagcttcgctcaggcattagcgatgagaaattgctgaactgtcttgaatccctccgggtgtccctcacgtccaatcctgtcagctgggtaaacaatttcggtcacgagggattgggactgctgttggacgagctggagaaactgttagataagaagcagcaggaaaatattgataaaaagaaccaatacaagctcatacaatgcttgaaggctttcatgaataacaaattcggccttcaaagaatccttggtgacgaaaggtccctgcttcttctagcacgcgcaattgatcccaaacagcccaatatgatgactgaaatcgtgaagattctaagcgcaatctgtattgtgggcgaagaaaacatacttgataaactgctgggcgctatcacaacggcagccgagcggaataatcgtgagagattcagcccaattgtggaaggactggagaaccaggaggctttgcagctccaagtagcatgcatgcagttcatcaacgcactcgtgaccagcccttacgagctagatttccggatccatctgagaaacgaattccttcggtcaggtcttaagacaatgttacccgacctaaaggaaaaagaaaacgatgaactcgatatccagttaaaggtgtttgatgaaaacaaagaggacgatctgaccgagctaagccaccgattgaatgatatcagggccgagatggatgatatgaatgaggtttatcacctactgtataacatgcttaaggatactgccgctgaaaactacttccttagcatcctgcagcatttccttttaatccggaatgactactatattaggcctcaatattacaagatcatcgaggagtgcgtgtcacagattgttctgcactgttccggcatggaccctgatttcaaatataggcagcgtctcgacattgaccttacgcatctgatcgattcatgtgtcaataaagcaaaggtggaggaaagtgagcaaaaagctgccgaatttagcaagaagttcgatgaggagtttacggctagacaagaagcccaggccgaattgcagaaaagagacgaaaaaattaaagaacttgaagcggaaattcagcaactccgcacacaggcacaggttctttccagtagtagcgggataccagggcctccagctgcgcctccattgcctggggtgggaccgcctcccccaccaccggctccccctctgcctggcggagcgcctttacccccacctcccccacctctaccaggcatgatgggaattccacctcccccaccgcctccactactgttcggaggcccaccgccacctccacctttgggcggagtgccaccaccccctggaatcagcttaaacttgccatatgggatgaagcagaaaaagatgtataaacctgaggtgagtatgaagaggattaactggtctaaaatagagccaacggaactgagcgagaattgcttctggctaagagtgaaagaagataagttcgaaaacccagatctctttgccaaactcgctttaaatttcgctacccaaatcaaggtgcagaaaaatgcagaagctttagaggagaagaagactggtcccaccaaaaagaaagtaaaagagctgcgcattctcgacccaaaaactgcacagaacctcagcattttcctcggctcctatcgcatgccatacgaagatattagaaacgttattctggaggttaacgaggatatgctgtccgaagccctaatacagaacctggtcaagcaccttcccgagcaaaaaatcttgaacgagctcgcagagcttaagaatgaatacgacgatctgtgtgagcccgagcagttcggggtggttatgtcctctgtgaaaatgttgcaaccgcgtctgtccagtattttgttcaagctcactttcgaggagcatataaacaatatcaagccttctattatcgctgtgacgctggcctgtgaggaattgaaaaaatccgagtcttttaaccggctcctggagttggtcttgctagtaggaaattatatgaactccggctccaggaacgcccagtcgttaggatttaaaataaacttcttgtgtaagatacgtgatacaaagtctgctgatcagaaaaccaccctgctccattttatcgccgacatatgcgaagagaagtaccgggatatcctgaagttcccagaagagctagaacacgtagagtccgcctccaaagtgagtgctcagatcctgaagagcaacctggcatctatggaacagcaaatcgttcacctcgaaagggacatcaagaaatttccacaagctgaaaatcagcatgacaaatttgtcgagaagatgacaagtttcactaaaaccgcccgtgagcagtacgaaaagctgtccacgatgcataataatatgatgaagctgtacgaaaatctgggcgagtattttatcttcgacagcaaaacagtcagcattgaagagttcttcggcgacttgaacaacttcaggacacttttcctagaggccgtcagagaaaataacaaaagacgtgagatggaagagaagacacgcagagccaagctggccaaggagaaagccgaacaggaaaaactcgagcgccagaaaaagaagaagcagctcattgacatcaacaaggagggagatgaaacaggagtgatggacaatctcttggaggcactacagtccggtgctgcttttcgggatcgacggaagaggattcccaggaacccagttgtgaaccacccttgtgctacacgtgccaaccccagatccgctacttag

SEQ ID NO: 220719 - DNA, 3294 bp, synthetic construct
  misc_feature 1..3294: note = Description of Artificial Sequence: Synthetic coding sequence
  source 1..3294: mol_type = other DNA
atggagcagccaggcgcagcagcctcaggagccggtggaggtagtgaagaacctggcggtggccgatcaaacaagagaagtgcaggaaatcgcgcagcaaacgaggaggagacaaaaaataagccaaaattgagggatcggatcacaagcttccgcaagtccacagtgaagaaggagaagcccctgatacagcaccccatcgattcccaagtggcgatgagcgaattcccagccgcacagccactgtacgacgaaaggtccctgaatcttagcgaaaaggaggtactggaccttttcgagaaaatgatggaagatatgaaccttaacgaggaaaaaaaggcgcctctgagaaataaggacttcacaaccaagcgcgaaatggtggtccagtacatttccgccacagccaaaagtgtgataagctcacacattaaagggggtctcaagaactccaagcacgagtgtaccctttcttcccaagaatacgtgcatgagctccgatcgggtatctcggatgagaagctgctaaactgtctggaatccctgagggtgagtctcacttccaaccctgtgagctgggtcaacaactttggtcacgaaggactgggcttgctacttgatgagttggaaaaactgcttgacaagaagcaacaagagaatatcgataagaagaatcaatataagctgattcagtgccttaaggcattcatgaataataagttcggtcttcaaaggattctgggcgacgagagatctctgctgctgttggccagagccatcgacccaaagcaacctaatatgatgacagagatcgtgaaaattctgagcgctatatgcatcgtgggggaggaaaatatacttgacaagctgctgggcgctatcaccacagcagcagagcgtaataaccgggagcggttcagcccgatcgtcgaagggctcgagaatcaggaggcactgcagcttcaagtggcctgtatgcagtttatcaatgcactggttacaagtccctatgaactggactttagaattcatctgcgaaacgagttcctgcgcagcggactaaagaccatgctgccagacctgaaggaaaaggagaatgacgaactcgatatacagctgaaagtttttgatgagaacaaggaggacgacctgacagaactgtcacatcggctcaatgatattagggcagaaatggatgacatgaatgaggtgtaccacttgttgtacaatatgctgaaggataccgcggcagaaaattacttcctgtcaatcctccaacatttcttgttaattcggaatgactactatatccgcccacaatattacaagattattgaagaatgcgtaagtcagatcgtgttgcactgcagcggtatggaccccgatttcaagtacagacaacggctagacatcgatctgacccatctgattgactcgtgcgttaacaaggctaaagttgaggagtccgagcaaaaagccgctgagttctccaagaagtttgacgaggagttcacagctagacaggaagctcaagctgaattacaaaagagagacgaaaagatcaaagagctggaagctgagatccagcaactgaggactcaagcacaggtcttgtcatccagctcgggtatccctggcccaccagctgcacctcctctgcccggtgtgggccctcctccccctcccccagcccctcccttaccaggaggggcacctctccccccacccccaccccctctgcctggcatgatgggaattcccccaccaccccctcctcctctactattcggaggacctccaccaccgcctcctcttggaggggtgcccccacctccaggcattagtttgaaccttccttatgggatgaaacaaaaaaagatgtacaaacccgaggtctctatgaagagaatcaactggagcaaaattgaaccaaccgaactgagcgagaactgcttctggctgagagtgaaagaagacaagtttgagaacccggacttgttcgccaaactggctctgaattttgcgacacagatcaaggtacagaagaatgctgaggccctcgaagagaagaagaccggaccaactaaaaaaaaagtgaaagagttgagaatcctagatcccaagacagctcagaatctgagtatttttctaggtagctacagaatgccatacgaagacatcagaaacgttattttggaggtcaacgaagacatgctttcagaagccttgatacaaaacttggtgaagcacctgccagaacaaaaaatcctgaacgagctggcagagctgaagaatgagtatgatgacctctgcgagcctgaacaattcggggtggtgatgagtagcgtcaaaatgctgcaacccagactgtcttccattctatttaagctaactttcgaggagcacatcaacaatattaagccatcaattatagccgtcactctcgcatgcgaggaattaaagaaatctgaaagctttaatcgcctcttggaattagtccttttagttggcaactatatgaatagcggatctagaaatgctcaaagtttgggatttaaaatcaattttttgtgcaagattcgcgatacaaagagcgccgaccagaagaccaccttattgcacttcatcgcagacatctgcgaagaaaagtaccgggacattctgaaattccctgaagagttggagcatgtagaatccgcaagcaaagtgtccgcccagatccttaagtctaacttagcctccatggaacaacagatcgtgcatttggaacgcgacatcaagaaattccctcaggccgagaaccaacatgataaatttgtggagaaaatgacaatatttacaaagacagctcgcgagcagtacgagaaattaagtacaatgcacaacaacatgatgaagctgtatgagaatctaggtgagtattttattttcgatagcaaaacggtgagtatcgaggagttctttggcgatctcaacaatttcaggaccctgtttcttgaagctgtcagggagaacaataagagaagagagatggaagaaaaaacaagacgggcaaaactggctaaggagaaggccgaacaggagaagctagaacgacagaaaaaaaagaagcagctaatcgatatcaacaaagagggagatgagactggagtcatggataacctgctggaggccctccagtctggcgctgcttttcgtgatagacgcaaaaggattcccagaaacccagataaccgacgcgtaccactcgagagatctcggtcccgccataacggagccatttccagtaaatag

SEQ ID NO: 220720 - DNA, 3306 bp, synthetic construct
  misc_feature 1..3306: note = Description of Artificial Sequence: Synthetic coding sequence
  source 1..3306: mol_type = other DNA
atggaacagcccggtgctgctgctagtggagctggtggaggctccgaggagcccggaggcggaagaagcaacaaaagatcagcgggaaatagagccgctaacgaagaggagactaaaaacaaacctaagctcaatatccaaataaaaactctagctgacgatgtacgggataggattacttctttccgaaagtccactgtcaaaaaggagaaacccctgattcagcatcctattgattcccaggtggccatgtcagagttccctgccgctcagcccctgtacgatgagagatccctgaatctcagcgagaaagaggtgttggacctgttcgagaaaatgatggaggacatgaacctgaacgaggagaaaaaggccccactgaggaacaaagattttacaaccaagcgggaaatggtggttcagtatatcagcgccactgctaaaagcggaggcctgaagaacagtaaacacgaatgtactctttctagtcaggaatacgtgcatgaattgagaagcggtatctctgacgaaaagcttcttaattgcttggaaagcttacgggtctccctgacgtccaaccctgtgagctgggtgaataactttggccacgaagggctgggtctgctgctggacgaactggagaaattactggataaaaaacagcaggaaaatatagataaaaaaaaccagtataagttgatccagtgcttgaaggcctttatgaataataaatttggactccagcggatcctgggggatgagaggagccttctgctgctcgccagagcaatcgatcccaagcagcccaatatgatgacggagattgtaaaaatactatcagcgatctgtattgtcggcgaagagaacatcctcgacaaactgctcggagccatcacaaccgccgcagaaaggaataaccgggagagatttagcccaattgttgagggccttgaaaatcaagaagccctacagctgcaagtggcgtgtatgcagtttattaatgccctggtgacttccccctatgaattggactttaggatccatctcaggaacgaatttctacgcagcggtctaaaaacaatgttaccagatttgaaagagaaagagaatgacgagttagacattcagctgaaagtgtttgacgagaataaggaagacgacttgacagaactctcccatcgactgaacgatatccgcgcagaaatggacgacatgaatgaggtttaccatctgttgtataacatgcttaaggataccgccgctgaaaattactttctgtccattttgcagcatttcctgctcatccgcaacgactactatattcgcccacagtattataaaattatagaagaatgtgtcagccaaattgttctgcattgcagtgggatggatcctgattttaaataccggcagcggctcgacattgacctgacacatctcattgactcctgcgttaataaggccaaagtggaggagtctgaacagaaagccgctgagttctccaagaaattcgacgaagagttcacagcgagacaggaggcccaggcagaactgcagaaacgggacgaaaaaattaaagagctcgaagcagagatacagcaacttagaactcaagctcaggtgctgtcctcatcttccgggatccccggtcctcccgcagcccctcctctccccggagtgggcccacctccacctccgccagcgcctccactccctggaggggctcccctgcccccaccacccccacctctcccaggcatgatggggattcctcccccacctccccctcctctgctcttcgggggacccccaccgccaccgccactggggggtgtaccgccaccacctggcatcagcctgaatctcccttatggaatgaagcaaaaaaagatgtataagcccgaggtgtctatgaaaaggatcaattggagtaaaattgagccaacagagctgagtgaaaattgcttctggctgagagtgaaggaggataaattcgagaacccggacctgttcgctaagttggctttaaacttcgctacccagataaaagtccaaaaaaatgcagaagcccttgaagaaaaaaagactggccctacgaagaaaaaggtgaaggagcttcgcatcctggatcctaagaccgcccagaacctgtcaatctttctcggaagctatcggatgccctacgaagatatccgcaatgtgattttggaagtcaatgaagacatgctctccgaagcgttaattcaaaatcttgtaaagcatctgcctgagcagaaaatactgaatgagctggcagagcttaagaacgagtacgacgacctttgcgagcctgagcaatttggtgttgttatgtctagtgtgaagatgttgcagcctcggttatctagcattcttttcaagcttacatttgaggaacacattaacaacattaagccaagtattattgcagtgacattggcatgcgaggagctgaagaagtcagagtccttcaatagattactggagctggtgctgctggtggggaactacatgaattccggcagcaggaacgctcaatccctgggttttaagataaactttctgtgtaagattcgagataccaaatctgccgatcagaaaacaactctcctgcacttcattgcggatatctgcgaggaaaagtaccgggatatcctgaaattcccagaagaactggaacacgtggaaagcgcttcaaaggtgtccgcccagatccttaaaagtaacctggcaagtatggagcagcagatcgtacacctagaacgcgatattaaaaagtttccccaggcagagaatcagcatgataagtttgtagaaaagatgacaatctttaccaagaccgccagagaacagtacgagaagctctccactatgcacaataatatgatgaaactgtatgaaaatctaggagagtatttcatctttgattcaaagaccgtctcaatcgaggaattctttggagacttaaacaactttcggaccctgtttctggaagccgttcgggaaaataataagcgccgagagatggaggaaaagacaagacgggcaaagctggccaaagaaaaagctgagcaggaaaaacttgaacggcagaagaaaaaaaagcagcttatcgatatcaacaaagaaggggatgagaccggcgtcatggacaacctcctggaggctcttcaatccggagccgcatttcgcgaccggagaaagcgaattcccagaaacccagataatcggagggtccctctcgagcgcagtaggtccaggcacaacggggcaatcagctctaagtag

SEQ ID NO: 220721 - DNA, 3312 bp, synthetic construct
  misc_feature 1..3312: note = Description of Artificial Sequence: Synthetic coding sequence
  source 1..3312: mol_type = other DNA
atggagcaaccaggtgccgctgccagtggagcaggtggcggatccgaagagcccggtgggggtagatccaacaagagatccgcaggaaatcgggctgccaacgaggaagagacaaaaaataagcccaagttaaatatccagatcaagactctcgccgatgacgtgcgcgacaggatcacctctttccgtaaatccactgtaaagaaggagaaaccgctgatccagcacccaatcgattcccaggtggccatgagcgaattcccagccgcacagccgctctatgacgaacgctcgctgaacctgagcgagaaggaagtccttgatctatttgagaagatgatggaggatatgaacttaaacgaagagaaaaaagccccattgcgtaataaggactttacaaccaagcgagagatggtggtacaatatatttctgccactgctaaatccattgtcggcagcaaagtcacaggtgggcttaagaatagcaagcatgaatgcactttgagcagtcaggagtacgtgcacgagctgagatccggcatctccgacgaaaagttactgaattgcttggaatctctcagagtctccctgacatcaaatcccgttagttgggtcaataactttggccacgaagggctcgggcttctcctggatgagctggagaaactgttggacaagaaacagcaggagaatatcgataagaagaaccagtataagctgattcagtgtctgaaagcttttatgaataacaaattcggcctgcaacgaattttgggcgacgagcgaagcctcctcctgctggcccgagctatcgaccccaaacagcctaatatgatgactgagattgttaaaatcctgagcgcgatctgcatcgtaggtgaagagaacatcttggacaaactactcggagcaataactaccgccgcagagagaaataatcgggagaggttctctccgatagttgaagggctagagaaccaggaggccctccagcttcaagtggcttgcatgcagtttattaatgcgctcgtgacgagtccatacgagctggatttccggatccatctccgtaacgaatttctgaggtctggactcaaaacaatgctgccagacctcaaagagaaggagaacgacgaacttgacatccagcttaaagtctttgacgaaaataaagaggacgatttaaccgagttgtcccaccgtctgaacgatatccgcgcagaaatggacgacatgaacgaggtgtaccacttgctttataacatgctgaaggatactgcagcagagaactattttctgtcaatactgcagcactttttgttaatccggaacgattactatattagaccccagtattataagattattgaggaatgtgtatctcaaattgtcttacactgttctgggatggaccccgactttaaatatagacagcgactcgatatcgatctgactcacctgattgattcttgcgtgaacaaggccaaagttgaagagagcgagcaaaaggccgcagagttttctaaaaaatttgacgaggagttcactgcacggcaggaggcccaggcggaactccagaaaagagacgagaaaataaaggaactggaagccgagatacagcagcttaggactcaagcccaggttctctcctcttcgtctggaatccctggccctccggcagccccaccccttccaggcgtgggcccaccaccgccaccacccgctcccccactgcccggaggggcacccctgcccccacccccacctccgttacccggaatgatgggcattccacccccaccaccacctccgctcctgttcggcggtcctcctccacctccaccactgggtggcgtccctcctcctcccggaatctctctaaatttaccatatggaatgaagcaaaaaaagatgtacaaaccggaggtgtccatgaagcgcattaactggtcaaaaattgaacctaccgagctgagcgaaaactgtttttggctgcgcgtaaaagaagataaatttgagaatcccgatttattcgctaagctcgcattgaattttgcaacacagataaaagtgcagaaaaatgccgaggccctggaggaaaaaaaaaccggaccaacaaagaaaaaggtgaaagagctgaggatattggaccctaaaaccgcacagaatctttcaatcttcttggggtcctaccggatgccctacgaggatatccgaaacgttattctcgaagtcaatgaggatatgctctctgaagcactgattcagaaccttgttaagcacctgccagagcagaagatcttgaatgaactggccgagttgaaaaatgaatacgacgacttatgtgaacctgagcagttcggcgtggtcatgtctagcgtgaaaatgctgcaaccacgcctgagcagcattcttttcaagctaactttcgaagaacacatcaacaatataaaacccagtattattgcggtgaccctggcttgtgaagaactgaagaagtcggagtccttcaaccgactcctggagcttgtgctcctggtgggcaactacatgaacagtggatcacggaatgcccagagccttgggtttaaaataaattttctttgtaagatccgggacactaagtctgcagatcaaaaaactacactgctccatttcatcgctgacatttgtgaggagaagtaccgggacattttgaaattcccagaggaactggaacacgtggaatctgcctctaaagtgagcgcccagattctgaaaagtaatctggcttctatggagcagcaaatcgtgcatctggagagggacattaaaaagtttccccaggcagagaaccagcatgataaatttgtcgagaagatgacgatcttcaccaagacagccagggaacaatatgaaaagctgtctacgatgcacaacaacatgatgaaactgtatgaaaacctgggcgaatatttcatcttcgactctaaaactgtatctattgaggaattttttggagatctcaacaattttcggactttgttcctggaggctgttcgcgaaaataacaaaagaagagagatggaggaaaaaactcgcagggcaaaactggcgaaggaaaaggcagaacaagaaaagctcgaacgacagaagaagaaaaagcaactcatcgatatcaacaaggagggtgatgagactggcgtgatggataatttgttggaagccctgcaaagcggggctgcattccgggatcgaaggaaaagaataccgcgaaatcctgtggtcaaccatccatgcgccacaagggcgaatcctcggagcgcaacctag

SEQ ID NO: 220722 - DNA, 735 bp, synthetic construct
  misc_feature 1..735: note = Description of Artificial Sequence: Synthetic coding sequence
  source 1..735: mol_type = other DNA
atggaattatttctggccggacgtcgggtgctggtaaccggcgcaggcaagggaatcggccgagggacagtgcaggccctccacgccactggagctcgcgtggtggccgttagccggacccaagccgacttggactctctagttcgcgaatgtcctgggatagagcccgtttgcgtggatttaggggattgggaggccaccgaacgcgcattgggctcagtgggccctgtggatctgctggtaaataacgccgctgtggcactactgcagccattccttgaggtaactaaggaggctttcgaccggtccttcgaggtgaacctacgcgctgtcattcaggtgagccagatcgttgcgaggggtctgattgctcggggtgtgcccggagccattgtgaatgtgagctctcagtgctcccagcgggcagtcacaaaccattctgtttattgcagcacaaagggcgcactggacatgttgacgaaggtgatggccttagaactaggtccgcacaaaattcgtgtcaatgctgtcaaccctaccgtggtaatgacatcaatggggcaggcaacctggtccgacccacacaaggctaaaaccatgcttaacagaatcccgttgggaaagtttgcagaggtagagcacgtcgttaatgccatacttttcctgcttagcgacaggtccgggatgaccacgggctccactctgcccgtggaaggaggattctgggcatgctag

SEQ ID NO: 220723 - DNA, 5768 bp, synthetic construct
  misc_feature 1..5768: note = Description of Artificial Sequence: Synthetic coding sequence
  source 1..5768: mol_type = other DNA
atgaaatcccccgctctgcagccactcagcatggctggcctacagctcatgaccccggcaagctcacccatgggacccttttttggcctcccctggcaacaggaagccatccacgataacatttacacccccagaaagtaccaagtggagctcctggaggcagccttggaccacaatacaatcgtttgcctcaacaccgggagcggaaagacatttatcgccgttctgctcacgaaagaacttagctatcagatccgaggggacttttcacgcaacggaaagaggaccgtgtttctggttaactccgctaaccaggttgcacaacaggtgtcagccgttcgcacacacagtgatctgaaggtgggagagtactcgaacctagaggttaatgcatcctggacaaaggagcgatggaatcaggagtttacaaaacaccaagtactgatcatgacctgttacgttgccttgaatgtgctgaagaatggttaccttagcctgtctgatatcaaccttctagtgttcgacgagtgtcacctcgccatcctggatcatccctatagggagatcatgaaactgtgcgagaattgcccaagttgccccagaatcttgggcctcaccgctagtatactgaacgggaagtgcgatccggaagagctggaggagaaaattcagaagctggaaaaaattttgaagtccaatgccgaaactgccacagaccttgtggtgctcgataggtatacgtctcaaccctgtgaaatcgttgtggattgtggtccatttactgaccgttcaggactttacgagcgtctgcttatggagctcgaggaagccctgaatttcataaacgactgcaacatctcagttcatagcaaggagcgcgactctacactcatttccaagcagattctgtcggactgtcgagcagtcctcgtggtgctagggccatggtgcgcggataaagtcgcaggcatgatggttagagagctccagaaatatattaagcacgagcaggaagaattgcatagaaagtttctgctcttcaccgacacctttttgcgaaaaatccacgccttgtgtgaggagcacttcagcccagctagccttgacctcaagtttgtcacccccaaggtgatcaagctattagaaattctccggaaatacaagccttatgagcgtcagcaatttgaaagtgtcgagtggtataataacagaaaccaggacaactatgtttcatggagtgattccgaggacgatgacgaagatgaggagattgaagagaaagagaaacccgaaacaaatttcccttcgccgttcacgaatatactgtgcggcataatctttgttgaaaggagatatacagcagtcgtcttgaacagactgattaaggaggctggcaagcaggaccccgagctagcatacatcagctccaacttcatcacaggtcacggcatcggcaagaaccagcccagaaacaagcaaatggaagcagaatttcggaaacaggaggaggtgctgcgaaaatttagggctcatgagactaacctcctcattgctactagcattgtcgaggaaggggttgacattcccaagtgcaatctcgtggtcaggttcgatcttccaactgaataccggtcctatgtgcagagcaaaggcagggccagagcccctattagtaactatattatgctcgcagacacggataaaattaagtcatttgaggaagatctgaagacatacaaggctatcgagaagattctgcgaaataaatgttccaagagtgtggatacgggggagacagatatcgatccagtgatggacgacgacgacgtctttcctccctacgtcctgaggcccgacgacggcggacccagggtcacgatcaatactgctatcggacatatcaatcgctactgcgctagactgccttccgacccatttactcacctcgcccctaaatgtcgcacgcgagaactcccagatggcacattctactccacattgtatttacccatcaactctcctctccgggctagtatcgttggcccaccgatgagctgcgttaggcttgctgagagggtcgtggcactgatatgctgtgagaagttgcataagattggtgagcttgacgaccatcttatgcctgtcggaaaagagaccgtcaagtacgaggaagaactcgatttgcacgatgaggaggaaacctcagtcccagggcgacctggtagcaccaaaagaaggcagtgctatccaaaggccattcccgaatgtctgcgcgattcgtatcccaggcccgaccaaccatgctatctgtatgtcatcggaatggtgcttacaacacctttgccagatgagctgaactttcgtaggcgcaaattgtacccacctgaggacacaaccagatgctttggtatcttgactgctaaaccaatcccgcaaataccccactttcctgtttacactagatctggcgaggtgaccatttcaatcgagctcaagaagagtggtttcatgctctcacttcagatgttggagctgataacacgtcttcaccagtacatcttttcgcatatcctgcgactagaaaagccagccctggagttcaagcccacggatgccgactcagcctactgcgttctgccactgaatgtggtgaacgactcctccacactggatattgactttaagttcatggaagacattgaaaagtcagaggcacggatcggaataccatctacaaaatataccaaggaaactccctttgtgttcaaactggaggactaccaggatgccgtcattatccccaggtacaggaatttcgatcagccgcatcgtttctacgtggcagatgtgtatactgatcttacaccactgtcaaaattcccatcacccgagtacgagacgttcgccgaatattataaaactaaatacaatctagatctaaccaatctcaatcagcccctactggacgtggatcatactagctctcggctgaatctgttaacacccaggcacctcaatcaaaaagggaaggccctgcctttgagttcagcagaaaaacgtaaggccaagtgggaatcactgcagaataagcagattttggtcccagagctttgtgccatacacccaattcctgcatctttgtggcggaaagccgtgtgtctccctagcattctctacaggctccactgtctcctcaccgctgaagagctccgggctcagactgcgagcgatgctggtgtgggagtcagaagtctgcccgctgatttcagatatcccaaccttgattttggatggaaaaagtctatcgattccaaaagctttatctctatatcaaactctagttctgcagagaacgacaattactgcaagcattctactatcgtgccagagaatgcagcccaccagggggctaatcggacttcttcgctggagaaccacgatcaaatgagcgtgaactgtcgcacactcttgtctgagtcgccaggcaagctgcatgtggaagtaagcgcagatttgactgctatcaatggcctctcctataaccagaatctggcaaacggaagttatgatctcgccaacagggacttttgtcagggcaatcaactgaactattacaagcaggagatccctgtgcagccgaccactagctattccatccagaacttatattcctatgaaaatcaaccacagccatcggatgagtgcaccttgctctcaaacaagtatctggacggtaatgccaataagtctacttcagacggctcaccagtaatggccgtgatgcctggaaccaccgataccattcaggtgctaaaaggcaggatggattctgagcagtccccctctatcggatatagcagtcggacactcggaccaaatcccggtctcattttgcaggccttaaccctcagtaatgcctcagacggcttcaacctggagagacttgagatgctcggtgactcattcttgaaacacgccatcacgacctacttgttctgcacatatccggatgctcatgaaggcagactgtcttatatgcgctccaaaaaggttagcaactgtaacctgtaccggctggggaaaaagaaggggctcccaagtcgcatggtggtctctatcttcgatcctccggttaactggttacctccaggctacgttgttaatcaagataaatctaacacagacaagtgggaaaaagatgaaatgactaaggactgtatgcttgccaatggtaagctagatgaggattacgaagaagaagatgaggaggaggagtccctgatgtggagagcgcctaaggaagaggccgactatgaggatgacttcctggaatatgatcaagaacacatcagatttatcgataatatgctgatggggtccggggctttcgttaagaaaatctcgctcagtccattttcaaccaccgattccgcatacgaatggaagatgccaaagaaaagctccctcgggtcaatgcctttctcctcagacttcgaggatttcgactactcttcttgggacgccatgtgttacctcgacccctccaaagccgttgaagaggacgattttgtcgtcggtttctggaaccccagtgaggagaattgcggtgttgacaccggcaaacagagcatttcatacgaccttcacactgaacagtgcatcgctgacaagtcaatcgctgattgtgttgaagcactcctggggtgctaccttacttcttgtggtgagagggccgctcagctgttcctctgcagtctgggcttgaaggtcctgcccgtaatcaaacgcactgatcgtgagaaagcactctgccctacgcgcgaaaacttcaattcccagcagaaaaatctgagtgtgagctgtgccgcagcatcagtcgcctctagtaggtcaagcgtgctgaaggatagcgaatacggatgccttaaaattccccctcgctgcatgttcgaccaccctgatgccgacaaaaccctgaaccatctgatttccggattcgaaaactttgaaaagaaaatcaattacaggtttaagaataaagcatacctattgcaggccttcacccacgcctcttaccactataatactataaccgattgctatcaacgccttgagttcctgggcgatgccattttagattatctgataaccaaacacttatacgaagatccccgacaacacagccctggtgtcctgaccgaccttagaagtgccctcgtgaataatacaattttcgcctctttagccgtgaagtacgactatcataaatatttcaaagcagtgagtcctgagctgttccatgtcattgacgattttgtgcagttccagctggaaaaaaacgaaatgcagggaatggactctgaattgcgcaggagtgaagaggacgaggaaaaagaggaggacattgaggtgccaaaggcaatgggagatatcttcgaatccctggctggggctatctacatggactcaggcatgtcactcgaaactgtctggcaggtttactatcctatgatgcgcccactgatagagaagtttagcgctaacgtaccacgctccccggttagggaactcctggaaatggagcccgaaaccgcgaagttcagcccagccgagcggacttatgacggcaaagttagagtaactgtggaagtggtcggcaaaggtaagttcaagggcgtaggaagatcataccggatcgccaaatcagccgctgcgaggcgggcactgaggagtctgaaagctaaccagccgcaggtgcctaatagcta

SEQ ID NO: 220724 - DNA, 5768 bp, synthetic construct
  misc_feature 1..5768: note = Description of Artificial Sequence: Synthetic coding sequence
  source 1..5768: mol_type = other DNA
atgaagtcccctgctctgcagccactgtccatggcaggcctgcaattgatgacacctgcatcaagcccgatgggcccattcttcggccttccttggcagcaagaggcaatccacgataatatctacaccccacgaaaatatcaggtcgagcttctggaggctgcactggatcataacacgatcgtatgcttgaacaccggtagtggaaaaaccttcattgcagtgctgctcaccaaggaactctcttaccaaattcggggagacttttccaggaatggaaagcgaaccgtgttccttgtcaacagcgctaatcaggtggcccagcaggtgagcgctgtaagaacccacagtgacctgaaagtcggggaatactcaaacctcgaagtaaatgccagttggaccaaagaacgatggaatcaggaattcactaaacatcaagtcctcattatgacgtgttacgttgcactgaatgtactgaagaacggatacctttctctgagcgatatcaacctccttgtgttcgacgaatgtcacctggctatccttgaccacccctatagggaaattatgaagctgtgcgagaactgtccctcttgtcccagaatactgggactgacggcaagtattcttaacggcaaatgtgacccggaagagctcgaagagaaaatacagaaactagagaaaatccttaagtccaacgctgaaacggcgacggacttagtggtgctcgaccgctatacctcacaaccctgtgagatcgtagtggattgcgggccattcactgatcgtagtggactgtatgagcgccttctgatggagttagaggaggctctgaactttattaacgattgtaacatttctgtccactccaaagagagggattcgactctcatttcaaagcagattttgagtgactgccgcgctgtcctcgtggtccttggcccatggtgcgcagataaagtcgccggtatgatggtccgcgaactccagaagtatatcaagcatgagcaggaggagctgcatcgcaagtttctgctgttcactgatactttcctcagaaagatccacgctctgtgcgaagaacatttcagcccagctagcttagacctgaagttcgtgacacccaaagtgataaagctcctggaaatcctaagaaaatataagccctatgagcgccagcagtttgagtctgtggagtggtacaacaaccgtaaccaggataattatgtgtcctggtccgactctgaagatgatgatgaggacgaggaaatcgaagagaaggagaagcctgagaccaacttccctagtccattcaccaacatactctgtggcattattttcgtggaaagacgttacactgccgttgtgttaaacagactgatcaaggaagcaggaaaacaagaccccgagctggcctatatctcctccaactttattacaggacatggcatcggcaaaaatcagccacgcaacaaacaaatggaggccgaattcaggaaacaggaggaagtgctgcggaagtttcgagcccacgaaacaaacctgcttattgctacttccatcgtcgaagaaggtgtggacattcctaagtgcaacttggtggtccgcttcgatctgccgactgaatatagatcctacgtgcagtctaaagggcgtgctagggctcctatttcgaactacatcatgctggcggatactgacaaaattaagagtttcgaggaggacttgaagacctacaaggcaatcgagaaaattctgaggaacaagtgttcaaagagtgttgacactggcgaaacagacatcgaccctgtgatggacgacgacgacgtatttcctccatatgtcctccgccctgacgacggcggaccaagagtgactataaatacggccatcggacatatcaaccggtactgtgcacgtttgcccagtgatccatttacccatctcgcccctaagtgcagaacacgcgagcttcccgacggcacattttactctacactgtatcttccaattaactctcccttacgggcatctattgtgggtcctccaatgtcgtgcgtcagactagccgagcgcgttgtagctttgatttgctgcgaaaagcttcataagatcggggagctggacgaccacctgatgcccgtcggaaaagagacagtgaaatatgaagaagagctggatctgcacgacgaggaggagacttccgttcccggacgtcccggttccactaaacgacggcagtgctatccaaaagccatccctgaatgcctgcgggacagctacccaagaccggaccagccttgttacttatatgtcatcggtatggtcctaaccaccccccttccagatgagctgaacttcagacgaaggaagttgtacccaccagaagacactactcgttgttttggtattctcactgcaaagcccattccccaaataccacatttcccagtgtacactcggtcaggagaggtcaccatctccattgaattgaagaaatccgggtttatgctcagccttcagatgctggaactgattacccgcctccaccagtatattttctcccacatcctcaggctagagaagccggcattggagttcaagccaaccgacgcagattctgcctactgcgtgctgcccctgaacgtcgtgaacgacagctctaccctcgacattgactttaagttcatggaggatattgaaaagagcgaggctagaatcgggatcccatcgactaaatataccaaggaaactcctttcgtgtttaaacttgaagactatcaagacgcagtcataatcccaagatatcggaattttgatcagccccaccgtttttacgtcgccgacgtgtacaccgatcttacgccactttccaaattcccatcacctgagtacgagacatttgccgagtattataaaaccaaatacaatcttgaccttacgaacctaaatcaaccactgctggatgtggaccacacatcctcccggctgaatctactgactccgagacatctgaatcagaaaggtaaggcactgccgctgagcagtgcagagaagagaaaggcaaagtgggagagcctgcaaaataagcagattcttgtccctgagttgtgcgccattcaccctatacccgctagcctctggcggaaggcagtctgcctccctagcattctgtacaggttgcattgcttacttaccgctgaagagttaagagcccaaactgcctctgatgctggcgttggggttagaagtctaccagctgacttcagatatccaaacctggacttcgggtggaagaaaagcattgatagtaaatcattcatctcaatctctaactccagttccgccgaaaacgacaactactgtaagcacagtacgattgttccagaaaatgctgcccatcaaggtgccaatcgcacttcttcacttgagaatcacgatcagatgtccgtcaactgtaggacccttctgagtgagtccccagggaaactgcacgtggaagtctccgctgacttaaccgccatcaatggactgtcttataaccagaacctagcgaatgggtcctacgatctcgccaacagagacttctgccagggtaaccaactcaattactacaagcaggaaatccccgtgcagccgacaacaagctacagcattcaaaacttatattcatatgaaaatcaacctcagccgagcgatgaatgcactttattatccaacaaatatctggatggcaacgctaacaagtctacctcagatgggtcaccggtcatggctgttatgcctgggactacggacacgatacaggtattgaagggaagaatggacagtgaacagtctccaagtatcggttattctagtcgcaccctgggccctaaccccggtctgatcttgcaggccctgacactgagcaatgcctcagacggctttaacctggagcgcttggagatgttgggggacagctttcttaagcatgcgataaccacctatcttttctgtacgtaccccgacgctcatgagggacgtctgagctacatgcgatccaaaaaggtgtctaattgcaatttgtaccggcttggcaaaaagaagggtctcccctccaggatggtggtcagtattttcgatccgcctgtcaattggcttccaccagggtatgtggttaaccaggataagtccaatacagataaatgggaaaaggatgaaatgactaaagactgcatgctggctaacggtaagttagacgaagactacgaagaagaagatgaggaagaggaatctctgatgtggcgcgcaccaaaagaggaggccgactacgaggacgactttctggaatacgaccaggaacatatcagatttattgacaatatgcttatggggtctggagcattcgtgaagaagattagcctgtcccctttttccacaaccgactctgcttatgaatggaagatgcccaagaaaagttctctgggttcaatgccattcagctctgacttcgaggattttgactacagctcgtgggacgcgatgtgttatctcgacccctccaaggcagttgaagaagacgactttgttgtcggtttttggaacccttctgaggaaaattgcggagtggacacaggtaagcaatccatctcgtacgatctgcacaccgaacagtgtatagccgacaaaagtatcgcagattgtgtagaggccttactcggatgctatctgacctcgtgcggcgaacgagccgctcagctattcttgtgctcattggggttgaaggtgctgccggtcatcaagcgaaccgatagagagaaggctttgtgccctacgcgagaaaattttaattcccagcagaagaatttgagtgtctcatgcgctgctgcctctgtagccagctctagatctagtgtgctgaaggatagtgagtacgggtgtctgaaaatacccccaagatgcatgttcgaccatccagacgcagataagactttaaaccatctcatttcaggcttcgagaattttgagaaaaaaattaattatagattcaaaaataaggcctatctgcttcaggctttcacccacgcctcataccactataatactattaccgactgttaccagagactagagttcttgggagatgctatcctggattacctgattactaagcacctgtatgaggatccacgacaacacagccctggagttctcaccgacctgaggagcgctcttgtcaacaatactattttcgcttcacttgccgtgaagtacgactaccacaaatattttaaagctgtctcccccgagttgttccacgttatagatgacttcgtacagttccaactggaaaagaacgagatgcaaggaatggatagcgaactgaggaggagcgaagaggacgaggaaaaggaagaggatattgaggtgcccaaggcaatgggggacatttttgaatcgctggcgggagctatatatatggatagcggaatgtccttggagacagtatggcaggtatattaccctatgatgaggcccctgattgaaaaattcagcgctaacgtgccaagaagccccgttcgcgagctgttagaaatggagcctgaaacggcgaaattcagtccagccgagagaacatatgatggcaaagtgagggttaccgtggaggtcgtcggaaagggcaaatttaagggcgtgggccgatcttaccggatcgccaagtcagcagccgctagacgtgccctgagatcgctgaaggccaaccagccacaggtgccgaactccta

SEQ ID NO: 220725 - DNA, 5768 bp, synthetic construct
  misc_feature 1..5768: note = Description of Artificial Sequence: Synthetic coding sequence
  source 1..5768: mol_type = other DNA
atgaagtcaccagcactccagcctttgtccatggccggactccagctcatgacaccagcctcaagtccaatggggccattctttggcttgccatggcaacaagaagccatccatgataacatttacactcctcgcaaatatcaggtcgaacttttggaggcagctttggatcataatacaatcgtgtgcctcaacacagggagtggaaaaacctttattgccgtgctcctcaccaaggagctgtcataccagattcgcggtgacttctccagaaacggtaagagaactgtttttctggtaaactctgcgaaccaggtagcacaacaggtttcagctgttcggacgcacagtgacctcaaggtaggcgagtacagcaatcttgaggtgaacgcctcctggaccaaagagagatggaaccaagaattcacaaagcatcaagtgctgatcatgacctgctacgtagctctgaatgtgcttaagaatgggtacctcagcctctccgatatcaatcttctggtatttgacgagtgtcacttagcaattctggatcacccatacagagaaataatgaaactctgtgagaattgccctagctgtccgaggatcctgggactgaccgcaagtatcctgaatggaaaatgcgaccctgaagagcttgaagaaaagatccaaaagctggagaagattctgaagtctaatgccgagactgcaactgatctcgtggttttggatagatatacatcccaaccctgtgaaatagtcgttgattgtggtccgttcaccgatcgctctggtctttatgaaaggctgctaatggagctggaggaggcattaaactttataaatgactgtaacatctctgtgcacagcaaagaacgagatagcacccttatttctaagcagattcttagcgactgccgagctgtactggtggtcctgggcccatggtgcgccgacaaggttgctggcatgatggtgagggaattgcagaagtacattaagcatgagcaagaagaactgcataggaagttcttgctattcacggacactttcctgcggaaaattcatgcactgtgtgaggagcacttcagtcctgcctctctggacttgaaattcgtcacacccaaggtgataaagctcctagagatccttcggaagtacaaaccgtacgagagacaacagttcgagagtgtggagtggtacaataacaggaatcaggacaattatgtgtcctggagcgatagcgaagacgacgacgaggacgaggaaattgaagagaaagagaagcccgaaacaaactttccctcgcctttcacgaatatcctttgcggcattatattcgtggaaagaagatacactgctgtggttcttaaccggctgatcaaagaagccggtaagcaggacccagaactggcttacatttcgagcaactttatcacggggcacggaattgggaagaatcaaccacgcaataagcaaatggaggcagaattcaggaagcaagaggaagtcctcagaaaatttcgcgctcacgaaaccaatctcttaatcgctacctcaatcgttgaggagggagtagatatcccaaagtgcaatttggtggtgcggtttgatctccctaccgagtatcgctcatatgttcagagtaagggaagagctcgtgctccaatatccaactacattatgctagccgacactgacaagataaagagcttcgaggaagacctgaagacatataaagctatagagaagattctgcgaaacaaatgttccaaatctgtcgatactggggagacggacattgaccccgtgatggatgatgatgatgttttccccccttacgtgctgcggccagatgatggcggaccacgcgttaccatcaataccgccatcgggcacatcaaccgctactgcgccagattacctagcgacccatttacccacctcgccccaaagtgccgcacaagggaattgcccgacggcaccttctacagtacactgtatctgcctatcaactccccactaagggcttccatcgttggcccacctatgtcatgcgtgagactggctgaacgtgtggtggccctcatctgttgcgagaagctccataagatcggcgaactggatgatcacctcatgcccgtgggaaaagagacagtgaaatatgaagaggagttggacctacatgatgaggaagagaccagcgtgcctgggagacccggttctacgaagcgccgacagtgttaccccaaagccatcccagaatgcttacgggatagttaccctcgcccagaccagccgtgttatctgtatgtaataggcatggtgctcaccacccctctgcccgatgaactgaacttcagacggaggaagctgtacccaccagaagacacgacgcgctgttttggcatcctcaccgccaagccaattccgcagattccacacttccccgtctataccagaagcggagaggtgacgattagcatagaactgaagaagagcggattcatgcttagcctacagatgttggagttgataacacgcctgcatcagtatatattctcccatatcctcaggctcgaaaagccagctttggagtttaaacccactgacgccgatagcgcttattgcgtgctccctcttaatgtggtcaatgacagctccactcttgacatagacttcaaatttatggaagatattgagaaaagcgaagcccgtatcgggattcctagcacgaagtatactaaagagacaccatttgtgttcaaattagaggattatcaggatgctgtgattatcccccgatacagaaatttcgatcagccgcatcggttctacgtagctgacgtgtacactgacctgacacccttgtccaagtttccatccccggaatacgaaacgtttgctgagtattataagacgaaatataacctagatctcaccaacctcaaccaaccattactcgatgtggatcacacctctagccgcctgaacttgctgaccccaaggcacctgaatcagaagggtaaggcgctcccactgagcagcgccgagaaacggaaggctaagtgggagtccctccagaataagcagattttggtacctgaattgtgcgccatccatcctatcccggcaagcctttggagaaaagcagtctgcctgcctagcattctctaccggctacattgcctactgacagctgaggaactgagggcccagactgcttccgatgcaggcgtgggcgtccggtcgctcccagccgattttagatatcccaacctggactttggttggaaaaaatccatcgacagtaagtcctttatctctatttcaaatagctcgtccgcagagaatgataattactgtaaacacagtaccatcgttcctgagaatgccgctcaccaaggagctaaccgtacaagcagtctcgaaaaccatgaccagatgagcgtgaactgcagaactctactcagcgagagccctggaaaactgcacgtggaagtctctgcggatctcactgccatcaatggactgtcgtacaaccagaacttagcgaatggttcctatgacttagccaatcgagacttttgtcagggaaaccagcttaattactacaaacaggagattccagttcagccgactacatcatattccatccagaatctgtattcctacgaaaaccagccacagccctccgacgaatgtactctgctgagtaacaagtatttggatggcaacgccaataagagtacctccgacggcagcccagtaatggctgtgatgcccggtaccacggatacaattcaggtgctgaagggccgtatggactctgaacaatccccaagcattgggtacagttctcgtacactgggtcccaatccgggactgattctgcaggcactcaccttaagcaacgcctccgatggattcaatcttgagcggcttgagatgcttggggattcgttccttaagcacgccatcacgacctacttgttctgtacttatcctgacgcccatgaaggaagactgtcgtatatgcggagtaagaaagtgtcaaattgtaacctgtacagactgggtaaaaagaaggggctgccgagccggatggtcgtcagcatctttgatccacctgtcaattggctgcccccaggatatgtggtcaaccaggacaaaagcaacaccgacaaatgggaaaaggatgagatgacgaaagactgtatgctggcgaatggcaagctagacgaggattatgaggaagaggacgaggaggaagaatcactgatgtggagagctcccaaggaggaggctgattatgaggacgattttttagagtacgatcaagagcatatccgctttatcgataatatgctcatggggtccggtgcatttgtcaagaagatcagcctcagtcctttctccaccactgattccgcctatgaatggaaaatgccaaaaaaatcctcgctcggctccatgccctttagctccgacttcgaggattttgactattcatcctgggatgccatgtgctatctcgatccttctaaggccgttgaagaagacgattttgttgtagggttttggaacccctctgaggagaactgcggcgttgatacaggtaagcagtccattagttacgatcttcacactgagcagtgtatcgccgacaagtctattgcggattgcgtcgaggcgctgttggggtgttatttgaccagttgtggggaaagagcagctcagctcttcctctgttctctcggtttgaaggttcttccggtaatcaagaggacagaccgcgagaaggcgctgtgtccgacccgcgaaaatttcaattcccagcagaagaatctgtctgtgagttgcgcagccgctagtgtggcatcctcacgatcctctgtgctgaaggactcagagtatgggtgtctgaaaattcctccccgatgtatgtttgaccatcctgacgctgacaagactctgaatcacctcatcagcggttttgaaaactttgagaagaaaatcaactatagattcaaaaataaagcgtacctgttacaagcttttacacacgcgagttaccactacaacacaataactgattgctatcagcgcctggagtttctgggagatgcgatcttagactacttgataactaaacacctctatgaggatcccagacagcattcccccggagtgcttacggatctgaggtctgctctggtgaacaatacaatcttcgcctctctggccgtgaagtatgactaccacaaatatttcaaggccgtgagtcccgaactgttccacgtgatcgatgacttcgtgcagtttcagttagagaagaatgagatgcaggggatggactctgagctgaggagatctgaggaggatgaggagaaggaagaggacattgaggtcccgaaggcaatgggagatatcttcgaaagcctcgctggtgccatctacatggacagtggcatgtctctcgagactgtctggcaggtgtactacccgatgatgcgacccctcattgagaagttctccgctaatgtgcccagatccccagtgagagaactgcttgaaatggagccggaaactgctaagttcagtcctgcagaacggacatacgatggaaaagtccgggtgaccgtcgaagtcgtgggcaaaggcaagtttaagggcgtgggcagatcgtaccgcatcgctaagagcgcggctgctagacgcgctctgcggtcactaaaagccaaccagcctcaggtccctaattcata

SEQ ID NO: 220726 - DNA, 5768 bp, synthetic construct
  misc_feature 1..5768: note = Description of Artificial Sequence: Synthetic coding sequence
  source 1..5768: mol_type = other DNA
atgaagtcacctgcacttcagccactgagtatggccggactgcagctgatgactcctgcctccagtccgatgggccctttttttggtctaccctggcagcaggaagctattcacgataacatttacacccctaggaaatatcaggttgagcttttggaagccgcacttgaccacaacactattgtctgcttaaatacagggtcaggcaagacgttcattgccgtgctgttgaccaaagagctgtcttaccaaattcgcggagatttttcacggaatggaaaacgcaccgttttcctggtcaatagcgccaaccaagtcgctcagcaggtgtcagctgtacgaactcattccgacttgaaggttggtgagtactctaacctcgaagtgaacgcttcttggaccaaagaacgatggaatcaggagttcactaaacatcaggtgctcattatgacctgttatgttgccttaaatgtcctcaagaacggatacctcagcttgtctgacattaacttactggtattcgacgagtgccacctggccatcctcgaccacccataccgggagattatgaagttgtgcgaaaattgcccatcatgcccgagaatccttggcctaactgctagcatattgaatggcaagtgtgatccagaggagctggaagagaagatccaaaagctcgagaaaatcctcaagtccaacgctgagaccgcaacggatctggtggtgctagataggtacacctctcagccctgcgagatcgtggttgactgcggtcctttcaccgaccggtcaggcctatacgagcgcctgctcatggagctggaggaggcgcttaactttattaatgactgcaacatctctgtccactctaaagagcgcgattccacactcataagtaagcagattctttctgattgtcgtgcggttttggtcgttctcgggccatggtgcgcggacaaggtggctggaatgatggtcagggaactccaaaaatacattaaacatgaacaagaagaactccaccggaagtttctccttttcacagacacatttctgagaaagattcatgccctgtgtgaagaacacttttcccctgcttctctcgatcttaagtttgtgacaccaaaggtcatcaaactgctggagattctccgtaagtacaagccatatgagagacagcagttcgagtcggtggagtggtacaacaatcgaaatcaagataactacgtgagttggtctgatagcgaggatgatgatgaagatgaggaaatcgaggaaaaggaaaaacctgagactaacttcccttcgcctttcactaacatcctctgtgggatcatttttgttgaacgccgttacacggcggtggtgctcaatcgactgattaaggaggctgggaagcaagaccccgagctagcctacatcagttcgaattttataacaggccatggaatagggaagaatcaacccaggaacaaacagatggaagcagaatttaggaaacaggaggaagtcctacgcaagttcagagctcatgaaaccaatcttctaatagccactagcattgttgaagaaggagtcgacattccgaagtgcaatcttgtcgtcaggtttgacctgcctaccgagtataggtcgtacgtgcagagcaaaggacgcgctagagcacctatctccaattatatcatgctggctgacaccgacaaaattaagtcctttgaggaggacctgaaaacctataaggccattgaaaagattttacgcaataagtgttcaaaatccgttgataccggggagactgacatcgatcctgtgatggatgacgacgatgtgttccccccatacgtcctgaggcccgacgacggcggaccccgagtcactataaatacagctatcggccacatcaacaggtattgcgctcggctaccatctgacccctttactcatctcgccccaaagtgcagaaccagggaactcccagacggaacattttatagcacactttatctgcccatcaattcccccctacgggcttctattgtaggccctccaatgagctgcgtacgactggccgaacgcgtggtggccctgatctgctgcgaaaaactccataagatcggtgaacttgacgatcatttaatgccagtgggtaaggagaccgtgaaatatgaagaggaactggatctgcatgacgaggaagagacatctgtgcccggaaggcccggttctacgaagcgacgccagtgttaccctaaggctattcctgaatgcttaagggactcctaccctcggccagatcagccctgttatctgtacgtaataggaatggttctgacaacccccctgcccgatgagctaaacttccggagaaggaagctttacccaccagaagacactacccggtgttttggtattctgaccgccaagcctatccctcagattcctcatttcccggtttacacgcgctctggtgaagtgacaattagtattgagctcaaaaagtcaggtttcatgttaagcctgcaaatgttagagcttattacccgcctgcaccagtacatcttctcccatatcctgagactggaaaagccagctctggagttcaagcctactgatgccgactcagcctactgcgtgttacccctaaacgtggtgaatgatagctctacactcgacatcgattttaagtttatggaagacattgaaaagagtgaggcgcgtattgggattccaagcacaaagtacacgaaggagactccatttgtgtttaaacttgaggattatcaagatgccgtgatcattccgaggtaccgaaattttgaccagccccacagattctacgtcgcagacgtctatactgacctcaccccactttccaaatttccatcccctgaatacgaaaccttcgctgagtattacaagaccaaatataacctggatctaaccaaccttaatcagcctctcctggacgtggaccatacatcctcccggctcaacctcctgaccccaaggcaccttaatcaaaaaggcaaagctcttcccctcagcagcgctgaaaaacgcaaagccaaatgggagtccctgcagaataagcagatcctcgtgcctgagctgtgcgccatccatcctataccggcatcactgtggcgcaaggccgtttgtcttcccagtattctgtacaggcttcattgtctcctcaccgcagaagagttgagagcgcagactgcgagcgatgctggagtcggtgtgagaagcttaccagcggattttcggtaccctaacctcgatttcggttggaagaaaagcattgacagcaagtcctttattagcatttccaactcttcgtccgcagagaatgataattactgcaaacatagcaccatcgttcccgaaaatgcagcgcaccagggggcaaacagaacgtcatcgttggagaaccacgatcagatgtcagttaactgtcggaccttgctcagtgagagtcctggcaagcttcacgtcgaggtttcagccgacctaaccgcaatcaatgggctgtcttataatcaaaatttggcgaatggaagttacgatctcgcgaatcgagatttttgtcaaggtaaccagctcaactactataagcaggagattccagtgcagcctacaactagctattctatccagaacctctacagctacgaaaaccagccgcagccttccgatgagtgtacactgctgagtaacaaatacctggatgggaatgctaataaatcaacatctgacggatcaccggtcatggcagtgatgcccggaacaacagacaccattcaagtgctgaaaggcagaatggactcagagcaaagcccaagcatcggctattcctcacgcacccttggacccaatccaggtttgattttgcaggccctgaccctgagcaacgccagcgacggttttaacctagaaaggctcgaaatgctcggtgactcctttctgaagcacgccatcacaacctacctattctgcacgtaccctgacgctcacgaaggcagattaagttacatgagatctaagaaggtgtccaactgcaatttgtaccgcctggggaagaaaaagggactaccatcaagaatggttgtgagcatcttcgacccaccagttaattggctaccccctggatacgttgtgaatcaggacaagagcaataccgacaaatgggagaaggatgaaatgactaaagactgtatgctggctaatggaaagctagacgaggactatgaagaagaagatgaagaagaagagtcactgatgtggcgagcaccaaaggaagaggcagattacgaggacgattttctagaatatgaccaggaacatattcgcttcattgacaacatgctcatgggaagtggggcatttgttaaaaagattagcctgtcccctttttccaccacagatagcgcttacgaatggaaaatgcctaagaagtcttcactggggtccatgcctttctctagcgatttcgaggacttcgattacagttcgtgggacgccatgtgctacctggacccaagcaaggccgttgaagaagacgacttcgtcgttggcttttggaatccgtcagaagagaattgtggcgttgataccggcaaacaatctatttcctacgatcttcacactgagcagtgtatcgctgataaatcaatcgccgattgtgtggaggccctgctcggttgctacctgactagttgcggcgagcgtgccgctcaacttttcctttgctcactgggcctgaaggttttacccgtgattaagcggaccgatagagagaaggccctgtgtcccacacgtgaaaacttcaactcccagcaaaagaatctgtcagttagttgcgctgccgcaagcgtggcaagcagccgttcttcggtgttgaaagatagtgaatacggttgtctgaagatccctcccaggtgtatgtttgaccatcccgacgcagacaagacactgaatcatttaattagcgggtttgagaattttgagaagaaaattaactatcggttcaaaaataaggcgtatctattacaggccttcacgcatgctagttatcactataacacaattaccgattgctaccagcgactggaattcctgggggatgcgattctcgattacttgataactaagcatctgtatgaggaccctcggcagcattcccccggagttctgaccgatctgcgtagcgcacttgtaaacaacactatttttgcgtctttggctgtaaagtatgattaccacaaatacttcaaggccgtgagccccgagttatttcacgtgatcgacgatttcgtgcaattccagctggaaaagaatgaaatgcagggaatggatagcgagttaagacggtcagaagaggatgaggaaaaggaagaggacattgaggtacctaaagccatgggagacatctttgaatctctagccggtgcaatctatatggactccggtatgtctttggagaccgtgtggcaagtgtactatccaatgatgaggcccctgattgaaaaattttctgccaacgtcccgagatctcccgtacgggaactactcgagatggaacctgagacagccaaattctcccccgctgaacggacctacgacggtaaagttcgagtgactgtagaagtggtcggcaaggggaagttcaaaggggtcggaagaagctaccgcatcgcgaaatcagcagctgcccgtcgtgcactcagatcactgaaggcaaaccaaccccaggtccccaacagtta

SEQ ID NO: 220727 - DNA, 213 bp, synthetic construct
  misc_feature 1..213: note = Description of Artificial Sequence: Synthetic coding sequence
  source 1..213: mol_type = other DNA
atgaaatccccagccctccaacccctaagcatggctgggctgcagttgatgacccctgcttcctccccaatgggtcccttcttcggactgccgtggcagcaggaagccattcacgacaacatctataccccacggaagtaccaggtcgaactcctggaggcagctctagatcacaatacaattgtctgtctcaacaccggttccgggaaatag

SEQ ID NO: 220728 - DNA, 213 bp, synthetic construct
  misc_feature 1..213: note = Description of Artificial Sequence: Synthetic coding sequence
  source 1..213: mol_type = other DNA
atgaaatcccctgccctacaacccctgagcatggcgggactgcagctgatgactcctgcgtcttctccaatgggtcctttttttggtctgccgtggcaacaggaggccattcatgacaatatttacacaccgaggaagtaccaagtggagctcctggaggccgctctggatcacaacacgattgtgtgtcttaataccggatctggtaaatag

SEQ ID NO: 220729 - DNA, 5489 bp, synthetic construct
  misc_feature 1..5489: note = Description of Artificial Sequence: Synthetic coding sequence
  source 1..5489: mol_type = other DNA
atgaagagcccggctttacagccgttgtccatggccggactgcagctcatgacccctgcctcaagcccaatggggcctttttttggattgccgtggcaacaggaggctatccacgataacatctacaccccccgaaagtaccaggtggaactccttgaagcagccctcgatcacaataccattgtgtgcctgaacacaggcagtggcaagacttttatagcggtgttactaacaaaagagctgagctaccaaattcgtggggatttctcacggaacggaaaacggacagtgttcttagtcaactccgccaatcaagtggctcagcaggtatctgccgtacgcactcatagcgatcttaaagtgggcgagtacagcaatctggaagttaacgcgtcttggacaaaggaacgctggaatcaggagttcactaaacaccaggtcctgatcatgacttgctatgtggccctcaatgtgttgaagaacgggtatctgtctctgtcggacatcaatttgctggtctttgacgagtgtcacctggccattctcgaccatccgtacagagagattatgaaactgtgtgagaattgtcctagttgccccagaatactaggccttacagcttcaatcttgaatggtaagtgcgatcctgaggaattggaggagaaaatacaaaagctggagaagatccttaagagtaatgcggagactgctactgacctggtcgtcctggaccggtacacttcacagccctgcgagatagtggtggactgcggaccctttacggaccgttctgggctgtatgagcggttactcatggagcttgaggaggccctcaacttcatcaacgattgcaatattagtgtgcacagcaaagagcgggactccaccctgatttctaagcagatcctatccgattgcagagcagtgttggttgttctgggcccttggtgcgccgacaaagtcgctggtatgatggtgagagaactgcagaaatatattaaacacgaacaggaagaactccatcgcaaattcttgctgttcacagacacctttctgcgcaagattcatgcgctttgcgaggaacacttcagccctgcctcactagatctgaagtttgtgacccccaaagtgattaaactgttggagatcctgcgaaagtacaagccctacgaacgccagcagttcgagtctgttgagtggtacaataaccggaatcaggacaactacgtctcctggtcagattcagaggacgatgacgaggacgaggagatcgaggagaaagagaaacctgagactaactttcctagcccctttacgaacatactgtgcggcataatcttcgtagaaaggcgatacacagccgtcgttttaaacaggctgatcaaagaggccggaaaacaggatcccgagctagcttatatttcttccaatttcatcacgggtcacggtatcgggaagaaccaaccacggaacaagcaaatggaggccgagttccggaagcaagaggaagtgctacggaagttccgggcacatgagactaacctcttgatcgctacatctatcgtggaggagggcgtggacatcccaaaatgcaaccttgtcgttagatttgatttgccgacggagtaccggtcatacgtccagtctaaaggaagggcaagagcccctatctctaactacatcatgctcgcagacactgataagattaagtcctttgaggaagacttgaagacatacaaagccattgaaaaaatcctgcgcaataagtgctctaagtcagtggacaccggagagaccgacatcgaccccgtaatggatgatgatgacgtgttcccgccttacgtcctgagacccgatgacggaggcccacgggtgaccatcaacacggctatcggccacattaaccgctattgtgcacgactgccatccgatccctttacccatctggccccaaaatgccggactcgagaactgccagacggaacattttactccaccctctatctgcccattaatagtccactccgcgcttcaattgtgggccctcctatgagttgcgtccgccttgcagaaagggtggtcgccctcatctgttgcgagaagctccacaagattggtgagctcgatgaccatctgatgccagtgggcaaagagaccgtgaagtacgaagaagagctcgatcttcacgacgaagaagagacttctgtgcccggaagacccggttctacaaagcgcagacagtgttatcctaaggccatcccggagtgcctgagagactcctacccccgaccggaccagccatgttacctttatgtcattggtatggtgctcacaacccccctgcccgatgagctaaatttccggaggcggaaactttacccacctgaagacactacgcggtgttttggaatcctgaccgcaaagcccatccctcagattccccatttccctgtgtacactcggagcggagaagtgactatatcgatagagctcaagaaatccgggtttatgttgagcttgcagatgctcgagctgatcactagactgcatcagtatatcttctcccatatccttcgcctggagaagccagcactagagttcaagccaactgacgctgatagcgcatattgtgtcctaccgctaaatgtggtgaacgattctagtacactggacatcgacttcaaatttatggaggatatcgagaagagcgaggcccgaataggaatcccaagcacaaaatacacaaaggagacacccttcgtattcaagttagaggattaccaggatgccgtgattattccacgataccgcaacttcgatcagccgcacagattctacgtcgctgatgtttacacggacctgacccccctttcaaagttcccgagccctgagtacgagacgtttgcagagtattataagaccaaatacaatctggacttgaccaatttgaatcagcccttgctggacgttgaccacacgagctctaggttgaaccttctgacaccaaggcacctaaatcagaagggtaaagcattgcctctgtcctctgctgaaaaacgaaaagctaaatgggaatctctccagaacaaacagattctagttccggagctctgtgcgattcacccgatcccggcttctctgtggcggaaagccgtctgcctgcccagtatcctataccgtttgcactgtttacttacagctgaggaactgagggcacagaccgcatctgacgcaggagtgggagtgcgatccctgcccgcagatttcaggtatccaaatctcgacttcggatggaagaagagtatcgacagcaagagctttatcagtatttctaactcatcctccgccgaaaatgacaattactgtaaacactctacaatagttcccgagaacgcagcacatcagggagccaatcgtacctcttcgcttgaaaaccatgatcagatgagcgtcaactgcagaacacttttgtccgagagtcctggtaagttacacgtggaggtctctgccgacttgaccgcaattaatggactgagttacaaccagaacctcgcgaatggctcctatgaccttgccaatagggatttttgtcaggggaaccagctgaactactataaacaggaaatacccgtccagcccactacaagctacagcatccagaacctctactcatacgagaatcaaccccaacctagcgacgaatgtaccctgctctcaaataagtatctggacggcaatgctaataaaagtacctccgatggaagccccgttatggccgtcatgcccggaaccaccgacaccatacaggttctgaagggcagaatggattccgagcagtcacccagtatcgggtattcatccaggacactgggcccaaatcctggcctgatcctgcaggcccttacattgtcaaacgcatctgatggttttaatctggaaaggctcgagatgctcggggactcctttctaaagcacgctatcaccacatacctgttctgcacatacccagacgcccatgaagggaggctgagttatatgaggtcaaagaaagtttccaattgcaatttataccggttgggtaaaaagaaagggctcccctcccgtatggtggtcagtatttttgacccccctgtgaattggctgccccctggttacgtggtgaatcaggataaatcaaatactgacaagtgggagaaggacgagatgactaaggattgcatgcttgctaatgggaagctggacgaagactatgaggaagaggatgaggaagaggaatctctcatgtggagagcacccaaggaggaagccgactatgaagatgacttcttagagtatgaccaggaacatatccgcttcatagataatatgttgatgggaagcggggcttttgtgaagaaaatcagcctgagccctttctccactacagattctgcctacgaatggaaaatgcccaagaagtcttcactgggcagcatgccgttttcctctgactttgaggactttgactattcatcgtgggatgcaatgtgctatctggaccccagcaaagcagtagaggaggacgacttcgtcgtgggcttttggaatcctagcgaagagaactgtggagtggatactggaaagcagtctatctcctacgacctgcatactgaacaatgcattgcggataaatctattgccgattgtgtggaagctctgcttggatgctatcttacctcttgtggagaacgggcagcccagctgttcctctgttcgctagggctcaaggttctccccgtcattaagcgcacagaccgcgaaaaggctctgtgtccaacacgcgagaactttaatagccagcagaaaaatctgtctgtgagctgcgccgctgcctccgtggcgagtagtagatccagtgttttaaaggactcggaatatggctgtttaaagattcctccaaggtgcatgttcgatcatccagacgcggacaagaccctgaatcacttgatcagcgggttcgaaaatttcgaaaaaaaaatcaactataggtttaagaataaggcatatcttttgcaggcatttacccacgcctcttaccactacaacaccattactgattgttaccaaaggctcgaattcttgggggacgcaatcctagactatctgataacaaaacacttatacgaggaccctcgccagcatagtcctggtgtgctgaccgacttgagatccgcgctggtgaataatacgatctttgcctccctcgccgtgaaatatgactatcataaatacttcaaggccgtcagtcctgaactcttccacgtaatcgacgatttcgtacaatttcagctggagaaaaatgagatgcagggcatggactccgaaaaatcgttcctgcagatgtaccccgtgccgctgtgtgagaactgtctgaagtggaatcagaagctgcccaatctggctagattgagagaactgaccaccggaaggtccgaatccttgtggaaata

SEQ ID NO: 220730 - DNA, 2463 bp, synthetic construct
  misc_feature 1..2463: note = Description of Artificial Sequence: Synthetic coding sequence
  source 1..2463: mol_type = other DNA
atgctcgcttgggaatctgaccactttctgagaatcctcgctgaaaacgataactactgtaaacatagcacgatcgtcccagagaatgcagcccatcagggcgcaaatagaacttcctccctggagaaccacgaccagatgagcgtgaattgccggacactcctcagcgagtctcctgggaaattgcacgtagaagtgagtgccgatcttactgctattaacggcctgtcatacaatcaaaatttagcaaatggctcttatgatctggctaatcgtgacttttgtcagggcaatcagttgaactactataaacaggaaataccagtgcagcctacaacttcatattcaattcagaacctgtacagctatgagaatcagccccagcctagtgacgagtgcacccttctaagcaacaagtaccttgacggaaatgcgaacaagtccacgagtgatggatctcccgttatggctgtgatgccagggaccaccgacacaatccaagttctgaagggtcggatggatagtgaacaaagtccctccataggatactcatcaaggaccctggggccaaatcctggcctgattcttcaagcgcttacactgtctaacgctagcgatgggttcaacctcgaaaggctggaaatgctgggggactcatttctgaagcacgccatcaccacgtatctgttctgtacttatccggatgctcacgagggcaggctgtcttacatgcgctctaaaaaggtctctaactgcaacctgtataggctgggaaaaaaaaagggcttgccctctcgaatggtcgtctccatctttgatcctccagtaaattggctgcccccaggttacgtggtcaatcaggacaagagtaacaccgacaagtgggagaaggatgagatgacgaaagattgcatgttggctaatggaaaactagatgaggactacgaggaggaagacgaagaggaggagtccctcatgtggagagctccaaaggaggaggctgactatgaggatgatttcttggagtacgaccaagaacacatacggtttatcgacaatatgctcatggggagtggcgctttcgttaaaaaaatcagccttagtccgttttccaccactgactcggcttacgagtggaagatgcccaagaaatcctcccttggctcaatgcccttttcgagcgatttcgaggacttcgattatagttcttgggacgccatgtgctatctagatccttccaaggccgtagaagaagacgatttcgtagtggggttttggaatccatcagaggagaattgtggggtggacaccggcaaacagagtattagttatgatcttcacaccgagcaatgtatcgccgacaaatccatcgccgattgtgtcgaggcactgctgggctgctacctgacgagttgtggagagcgtgctgcccagttgttcctatgcagcttaggactcaaagttctccctgtgattaaaaggacagaccgcgaaaaggcgctgtgccccacccgcgaaaatttcaactctcaacagaaaaacctgtcagtgagttgcgctgctgcatcggttgccagcagtagaagtagtgtgctgaaggactccgaatacgggtgcctgaagatccctccccgttgtatgtttgatcacccagatgcagataaaacccttaaccaccttatctcaggcttcgaaaatttcgaaaagaagatcaattatcgctttaagaacaaggcttacctgttacaggcgttcacccacgcttcatatcactacaatacaatcaccgactgctaccagcgactcgagttcctgggcgacgccattcttgactatctgataaccaaacatctgtatgaggatcctagacaacatagcccaggtgtccttacagacctccggtcagcactggtgaataacaccatcttcgccagcctcgctgtgaaatacgactaccacaaatacttcaaggccgtgtcaccagagctgttccatgtcatcgacgacttcgtgcagtttcagctggagaagaatgagatgcaagggatggatagcgagctgaggcgatcagaggaagacgaggagaaggaggaggatattgaagttccaaaggctatgggtgacattttcgagtccctggcaggagctatctacatggacagcggcatgtccctggagacagtgtggcaagtgtactaccctatgatgcgcccactcatcgagaagttctctgccaatgtgcctaggtctcccgtacgagaactgctagagatggaacctgagactgccaaattctcgcctgccgaaaggacttacgacggaaaggtcagggtcacggtggaggtggtgggcaagggtaagttcaagggtgtcggccgttcttatagaattgcaaaatcggccgcagctcgaagggccctccgctcgctcaaggccaatcagccgcaggtgcctaacagctag

SEQ ID NO: 220731 - DNA, 801 bp, synthetic construct
  misc_feature 1..801: note = Description of Artificial Sequence: Synthetic coding sequence
  source 1..801: mol_type = other DNA
atgatggctctcggcgcagccggtgccacacgcgtgttcgtggccatggtggcagcagctctggggggtcacccactgctcggtgtgtccgcaaccctcaactctgtcctgaattctaatgctatcaagaatctgcctccacctctagggggtgccgcaggacacccagggagcgctgtgtcagctgccccaggcattctttaccccggtggtaataagtaccaaaccatcgataactaccagccctacccctgtgctgaggatgaggaatgtggaactgacgaatattgcgctagtccgaccagagggggagatgcaggcgtacagatttgcctggcttgtcggaagaggcgtaagcgctgtatgagacacgctatgtgttgccctggcaactactgcaagaatgggatatgcgtaagcagtgaccagaaccattttagaggggagatcgaggaaaccatcacagaatcctttggaaatgatcacagcaccctcgatggttacagccggagaacaaccctgtcctcaaagatgtatcacactaagggacaggaagggtctgtatgtctgaggagcagcgactgcgcctccggactgtgttgtgcccgacacttttggagcaaaatttgcaagcctgttctgaaagaagggcaggtatgcactaagcatagaagaaaagggagccatggactggaaattttccaacggtgctattgtggagagggtctctcctgtcgcattcaaaaagaccatcatcaagcatctaattcaagcagactccatacttgtcagagacattag

SEQ ID NO: 220732 - DNA, 1689 bp, synthetic construct
  misc_feature 1..1689: note = Description of Artificial Sequence: Synthetic coding sequence
  source 1..1689: mol_type = other DNA
atggacgctatgaagagagggctgtgctgtgttttacttctatgtggcgcagtctttgtgtccccaagccaggagatccacgctcggttccggaggggggctaggagctatcaggtcatctgccgggatgagaaaactcaaatgatttatcagcagcatcaatcttggcttagacccgtcttgaggagcaatagagtggaatactgttggtgtaacagtggtcgcgctcagtgccattccgttcctgtaaagtcctgtagtgaaccaagatgcttcaacggcggaacttgtcagcaggccctgtacttctcggattttgtgtgccagtgccctgaaggatttgcagggaagtgttgcgaaattgacacaagagccacgtgttatgaggatcaggggatctcctaccggggaacatggtccacggccgagagcggggctgagtgtaccaattggaactcctccgcactagctcagaaaccatactctgggagaagaccagatgccataagactcggcctgggaaaccataattactgtaggaatccagacagggactcaaaaccctggtgctacgtgtttaaggctggcaagtatagctccgagttctgtagtacccctgcatgcagcgagggcaatagcgactgttatttcgggaacggatcagcttatcgcggaactcactccctcacagagtcaggtgcatcttgtttaccttggaactctatgattctgatcggcaaggtttatacagcacagaatcccagtgcgcaggctcttgggctagggaaacacaattactgcaggaaccccgacggcgatgctaaaccttggtgccatgtgttgaagaacaggagattgacctgggaatattgcgacgtaccaagttgctctacctgtggactcagacaatacagccaaccccaatttcgtatcaaaggtggtttgttcgccgacatcgcttcacatccttggcaggccgctattttcgctaaacaccggcgatctcctggcgagcgctttctttgcggaggtattctcataagtagttgctggattctttcagctgctcattgcttccaggaacggtttcctccccatcacttgaccgtaattttgggcagaacataccgggtggtacctggagaggaagaacagaagttcgaggtagagaagtacatagtgcataaagagttcgatgatgacacttatgataatgatattgcattgctccaactgaaatcagatagcagtagatgtgcgcaggagtcttcagtggtgcgcaccgtttgcctgccacccgctgacctccagttacctgattggacggagtgtgagctttcaggatacgggaagcacgaagcgcttagccccttctattcagagcggttgaaagaagcacatgtccgtctttacccaagctctcgatgtacgtcacaacacctcttgaaccgaacagttacagacaacatgctgtgcgcaggagatacccggtccgggggtcctcaggccaacttacatgatgcctgtcagggcgacagcgggggacccctggtgtgtctcaacgacggcaggatgacccttgtcggtattatttcatggggcctgggatgcgggcagaaggatgtgcccggtgtgtacaccaaggtgactaactacctggactggatccgtgacaacatgcggccatag

SEQ ID NO: 220733 - DNA, 420 bp, synthetic construct
  misc_feature 1..420: note = Description of Artificial Sequence: Synthetic coding sequence
  source 1..420: mol_type = other DNA
atggtcgcagctgtcctcctgggtctctcctggttgtgttcacctctgggcgcattggtccttgatttcaataacattaggagctcagcagacctgcatggcgctcgcaagggcagccaatgcttgtctgacactgactgcaatacgagaaaattctgcctccaacctcgagatgaaaaacccttttgtgctacctgtagaggactccgcagacgttgtcagagggacgccatgtgttgtcccggaacgctctgcgtgaatgatgtgtgtaccacaatggaggacgccacccctattttagaacggcagctggatgagcaagatggaactcacgcggaaggaaccaccggccatcccgttcaggaaaatcaaccaaagagaaagccatcaattaaaaagagtagttctatgttggattag

SEQ ID NO: 220734 - DNA, 1683 bp, synthetic construct
  misc_feature 1..1683: note = Description of Artificial Sequence: Synthetic coding sequence
  source 1..1683: mol_type = other DNA
atgcgggacctccctctgacatccttagcccttgtcttatcagctcttggggcactattgggaaccgaggctctgcgggcagaagagccagcggtcggtactagcggtcttattttccgggaagacctcgactggccgccaggcagtcctcaggaaccactgtgcctggtcgctctcggcggtgatagcaacggaagtagttcaccattgcgggtggtgggtgcactctccgcttacgaacaggcttttctgggggctgtgcagagggccaggtggggaccgagggatttagccacttttggggtctgtaacactggtgaccgccaggctgctctgccttcgttgcggaggctgggcgcttggctgagggacccaggcggacaaagactcgtcgtactgcacttggaggaggtgacgtgggagcccacaccgagcttgcggtttcaggagcctcctcccggtggcgcaggacctcccgaacttgcactccttgtgctttacccgggtcccggaccagaggtcacggtcacaagagctggcctgccaggggcacagtcgctctgcccttcccgtgacaccagatacctcgtgctggccgtggaccgtcccgcaggggcttggcgtgggtcaggcctagcgctgactctgcagccgaggggggaagattcccgactctcaactgcaagactgcaggccttgctctttggcgatgaccacagatgctttaccagaatgacaccagccctgttacttctgcccagaagcgaacctgcacccctgccagcccacggtcaactggatactgtaccttttcctcccccacgcccatccgccgagctcgaagagtctcctccatctgccgatccatttctggagactttgacgagacttgttagggccttgcgggtgccgcctgctagggcttccgcccctcggctcgccctcgatccagatgccctggccggttttcctcagggtctcgtaaacttatctgatccagcggcactcgagagattgcttgatggggaagaaccattgctgctcttactgaggccaactgccgctaccactggcgatcctgcaccactgcacgacccaacaagcgcgccttgggctactgctctggcaaggagggtagccgcagaattacaagccgcagccgcagaactgaggtctctgccgggtttacctccagctaccgctccgctgctggccaggctgttagcattgtgtcctggcggacccggaggtttgggggacccgctcagagctctgctgctgcttaaggccctgcagggtctccgggttgaatggaggggtagggaccctagaggccctggcagggcccagcgctccgccggagcaacagctgcagacggcccatgcgctctccgcgaactgtcagtggacttacgggcagagcgatctgttctaatccccgagacatatcaggccaacaattgccagggagtctgcggatggcctcaatccgacaggaatccacgttatgggaaccacgtggtgctgttgctcaaaatgcaggtgcggggagccgcactggcaagacctccctgctgcgttcccaccgcttacgcaggcaaactacttatctcactcagcgaggagagaattagtgctcaccatgtcccaaacatggtggcgacagagtgtggttgcaggtag

SEQ ID NO: 220735 - DNA, 600 bp, synthetic construct
  misc_feature 1..600: note = Description of Artificial Sequence: Synthetic coding sequence
  source 1..600: mol_type = other DNA
atgggcgaggcatctccgccagccccagctcgacggcacttgctggtcctgctgctgctgctcagcacactcgtcataccttctgccgcagccccaattcatgatgcagacgcccaggagagcagcttgggcttgacaggactacagtcccttttgcaagggtttagcagattattcttaaaagggaaccttctccgcggaatagactccttattctcagcaccaatggacttccggggattgccgggaaactatcataaagaggagaatcaggagcaccagttgggcaataataccctgtcttctcacctgcagatagataaagtaccacgcatggaggagaaggaggccctagtcccgatacaaaaagccactgattcgtttcacacagagcttcatcccagggtcgccttctggatcataaaacttcctagacgcagaagccatcaggacgccctcgaaggaggccattggcttagcgagaaacgccaccggctccaggcaatccgtgatggtttgcggaaaggtacacacaaggatgtcctggaagagggaactgagtcatcaagccattctcgactgagtcccaggaagacatag

SEQ ID NO: 220736 - DNA, 1896 bp, synthetic construct
  misc_feature 1..1896: note = Description of Artificial Sequence: Synthetic coding sequence
  source 1..1896: mol_type = other DNA
atggctctgcggaaggaattgcttaaaagtatttggtatgcctttactgcattggacgtcgagaagtccggcaaggtcagcaaatctcagctgaaggtcctgtctcataacctgtacacagtgcttcatattccccatgacccagtggctctagaggagcacttccgggacgatgacgatggtcctgtgtctagtcaggggtacatgccttatctaaacaaatacatattggataaagtggaagagggagcatttgtgaaggaacatttcgatgaactttgctggacgctgactgcaaaaaagaactacagggcggatagtaatggcaacagcatgctgagcaaccaagacgcctttcgtctttggtgcctgttcaacttcttaagcgaggataaatatcccctgatcatggtcccggatgaagtggaatacttgctcaagaaagtgttaagctcaatgagcctcgaggtctctctgggagagctggaggaacttttagcacaggaggctcaagttgcccagactactggtggactttccgtatggcagttccttgagctgtttaatagcggacggtgtctgaggggcgtcggccgagatactctgagcatggctatacatgaagtgtatcaggagctgatccaggacgttctgaagcagggttacctgtggaagagagggcacctgcgccgtaactgggctgaaagatggttccagctccaaccatcttgtctgtgttatttcggatcagaggagtgcaaggaaaaaaggggaatcattcccctcgatgcccactgctgcgtggaagtgttgccagacagggacggcaagcgctgtatgttctgtgttaaaaccgctaaccggacatatgagatgtccgcatccgatactcggcagagacaggagtggactgccgctattcagatggcgattaggctgcaagcagaaggtaaaactagcctccacaaagatttaaaacagaagcgccgtgaacagagggaacagcgcgaaaggcggagggctgcaaaagaggaagagttacttcgactgcagcaattacaggaggaaaaagaacgaaaacttcaggagctggagttactgcaagaagcacagcggcaagccgagagattgctccaagaagaggaggagaggagacgctctcagcaccgggagttacagcaggctctggaaggacagttacgagaggcagaacaggctcgagcatccatgcaagccgagatggagctgaaggaagaggaggctgccagacagagacagaggatcaaggagctggaggaaatgcagcagaggctccaagaagctctccagctagaagtcaaagccagaagggacgaagagagcgtgcggattgcccaaacccggctgcttgaggaggaggaggagaagcttaagcaattaatgcagttgaaggaagaacaggagcgctatatcgagcgtgcgcagcaggaaaaagaagagttacagcaggagatggcacagcaatcccggagcttgcagcaggctcagcagcaactcgaagaggtaagacaaaaccgtcagagagctgacgaagacgtggaggcagcacaacgaaagcttcgccaagcatcaactaacgtgaagcactggaacgtgcagatgaaccgattgatgcatccaattgagccaggggataagcggccagtcacatctagctcttttagcggcttccagccgcctctccttgcacatagagatagcagcctaaaaaggctaacgaggtgggggtcccaaggtaacagaacaccatcaccgaattctaatgaacagcagaagagcctgaatggcggtgatgaagcccctgcacctgcctcgaccccacaggaagataagctggatccggctcctgagaactag

SEQ ID NO: 220737 - DNA, 555 bp, synthetic construct
  misc_feature 1..555: note = Description of Artificial Sequence: Synthetic coding sequence
  source 1..555: mol_type = other DNA
atggcacttcgtaaggagcttctaaaatctatctggtacgctttcacggcgctcgatgtagaaaagtccggaaaggtgtctaaatcacaactgaaggtgctttcccacaacctgtataccgtgctacacatcccccacgaccccgtggcactcgaggagcattttagagatgatgacgatgggccagttagttctcaggggtacatgccataccttaacaaatacatcttggataaggatgcttttcgcctttggtgtctttttaattttttgagcgaagacaagtatccactgattatggttcctgacgaagtggaatacttgctgaagaaggtgctcagctctatgagccttgaagtgagcctcggcgaactggaagaactgctggcccaggaggcccaggtagcacagacgactggtggcctgtccgtgtggcagttcttggagttgttcaatagcggtaggtgtctccgcggagtgggcagggacaccctgtcgatggctatacatgaagtttaccaggaactgatccaagatgtgctgaaacaaggttag

SEQ ID NO: 220738 - DNA, 393 bp, synthetic construct
  misc_feature 1..393: note = Description of Artificial Sequence: Synthetic coding sequence
  source 1..393: mol_type = other DNA
tagagagacgatgatgatggacctgtatctagtcagggctatatgccttatctcaacaagtatatactcgacaaggatgcctttcggctctggtgtctgtttaacttcttgtcggaggataagtacccgctgatcatggtccccgacgaggttgagtatttactgaagaaagtcctgtcctctatgagcctggaggtgtctctgggcgaactggaagaactgctcgcgcaggaggctcaagtggcacagactaccggtggactcagtgtttggcagtttttggagctctttaattcgggacggtgtcttcggggtgtcggaagggatactctcagtatggctatacatgaagtgtaccaggaattgatacaggacgtgttgaagcagggctag

SEQ ID NO: 220739 - DNA, 1131 bp, synthetic construct
  misc_feature 1..1131: note = Description of Artificial Sequence: Synthetic coding sequence
  source 1..1131: mol_type = other DNA
atgatctgtccgcctagaccacccaaagtgctaggcctgcaagtgctgccggatagagatggcaagagatgtatgttttgcgtgaagactgccaacaggacctacgagatgagcgcttcagacacaaggcagagacaagagtggacagcggcaatccagatggcgatccgcctgcaagccgaaggcaaaacctccctacacaaggatcttaagcagaagagaagggaacagagggagcagagagaacgcaggagagcagcaaaggaagaagaactgctcagacttcaacaacttcaggaggagaaggaacggaaattgcaggagctggagctgcttcaggaggcccagcgccaagcagagaggcttctgcaagaggaggaagaacgcaggcgaagtcagcatagggagctgcagcaggctctcgaaggccaactgcgggaagccgaacaggctagagcatcaatgcaggccgaaatggaactcaaggaagaggaagccgcacgccagcgccagcggataaaggaactagaagagatgcaacaaaggcttcaagaagcactgcagctggaagtgaaagcacggagagacgaggaatccgtgaggatcgcacagacacggctgctggaggaagaggaagagaaattaaagcagctgatgcaacttaaggaggagcaggaaaggtacattgagagagctcagcaggaaaaggaggagctgcaacaggagatggcccagcagtcaaggtctctgcagcaagcgcagcagcagctggaggaagttaggcagaatagacagagagccgatgaagacgtggaagccgctcaacggaagctgcggcaagcgtctaccaatgtcaagcattggaacgtccagatgaaccgtttaatgcacccaatcgagcccggagataagcgccctgttacttcctcgagcttttccggctttcagccacccctattggctcatagggactcgtccctcaagagactaacccgatggggatctcagggcaaccggacaccgtcacccaactctaatgaacagcagaaatctttgaatggcggagacgaagctcccgcaccggcttcaacgccgcaggaagataaactggatcccgcaccagagaattag

SEQ ID NO: 220740 - DNA, 708 bp, synthetic construct
  misc_feature 1..708: note = Description of Artificial Sequence: Synthetic coding sequence
  source 1..708: mol_type = other DNA
atgactcaagtgaccgaaaaaagcactgagcatcccgaaaaaacgactagtacaacggagaagactacaagaacaccagaaaaacccaccctctattccgagaagacaatttgtacaaagggtaagaatacacctgttccagaaaaacccaccgagaacctaggcaataccacattgaccaccgaaactattaaggcacccgtcaagtctacagaaaaccctgagaagacggccgctgtaaccaaaacaattaaacctagtgtgaaggtcacaggtgacaagtcgctgaccaccacttcgagccatctgaataaaactgaggtaactcaccaggtgccaaccgggagtttcactttgattacgagcagaactaagctgtcatcgattaccagcgaggccaccggaaatgagagtcacccatacctgaacaaggatggctcccagaaaggtatccatgcaggccagatgggggagaatgactccttccccgcttgggccattgtaatagtagttctggtcgctgttatcctgctcttggtgttcttaggcctcatctttctcgtctcttatatgatgagaacccgcagaacactcacccagaacacccaatataatgatgctgaggacgaaggcggacccaatagctaccccgtttacctgatggagcagcagaacctggggatgggccagatcccttcccccagatag

SEQ ID NO: 220741 - DNA, 1524 bp, synthetic construct
  misc_feature 1..1524: note = Description of Artificial Sequence: Synthetic coding sequence
  source 1..1524: mol_type = other DNA
ccactcgcgaatgagaaaacaaccctctctcctgccgaaccaacagagaacggtgagcgcacacccttcactaatgaaaagaccaccccgtccagcgcagaaccaacagaacatggagagagaacccccctcgcaaacgagatcactacaccatctcgtgccgagccaaccgagcatggcgagaggattgctaatgagaaggccaccccatctccagctaagcctactgagcatggtgaaacaacagttaatgaggacaccacacccagcagcgctgaacctaccgagaacggggaaagaaccccacttgccaatgagaacacaaccacttcacctaccgaaagtacagaacatggcgagcggaccgctaatgagaaaactacacccagccctgcggaacctacagagcatggagagcgcaccccctcagcaaacgagaagacaatcccatcacccgctaaacctacagagcacgaagagatgaccccctcggctaacgaaaacaccaccccaagccccgtcaaacctacagagcacggcgaaaagacaaccctcgcaaatgaaaaaattaccttatcccctgaaggacccaccgaacacggagcaaaaacgacctcagccaacgaaaagatcacaccatccctggccaagcctaccgaacatggagagcgcacaacatcccccaacgacaaaattacatcctccgcagctgagagtactgagcaccgggacagagccacaagtgcaaacgtgatcactcccgcacccgcagagccaatcaaacacgccaagagaacgacactggcccatgaaaaaatgacgcaggtgaccgaaaagtcaaccgagcatcctgagaagaccacttctaccacggaaaagaccacacggactcccgagaagcctactctgtacagcgaaaagactatttgtacgaaaggcaaaaataccccagtgccagagaagcctacggagaacctcggcaatactactctgactactgagacaattaaagcacctgtcaagtccaccgagaaccccgaaaagacagctgctgtcaccaaaacaatcaagcctagcgtgaaagttactggggataagtccttgacaactaccagctcacacctgaacaaaactgaggtgactcaccaggtgcctacaggaagttttaccctcatcaccagccgaacaaagctgtccagcatcacctcggaggccacaggtaacgaaagtcacccctacttgaataaggatggatctcaaaaaggaatccacgcaggacagatgggagagaacgactcattccccgcttgggccatcgtgatagtcgttcttgtggctgttatcctgttactggtctttttgggactgatctttctggtgtcttacatgatgcgcacccgcagaactttgacccagaatactcaatataatgatgccgaagatgaaggcggtcccaattcctacccagtctacctgatggaacagcaaaatcttgggatgggccagattccatcccctcgatag

SEQ ID NO: 220742 - DNA, 1524 bp, synthetic construct
  misc_feature 1..1524: note = Description of Artificial Sequence: Synthetic coding sequence
  source 1..1524: mol_type = other DNA
cctctcgctaacgaaaagacaacactcagtcctgctgaacccaccgagaacggggagaggacaccttttacaaacgaaaaaacaacgccaagctcagcagagccaactgagcacggcgaaagaacaccactggcaaacgaaattaccactccaagccgggctgagcccacagaacacggtgaaaggatcgcgaacgagaaggctactccctcacctgccaagcccactgagcacggagagacaacggtaaacgaagatacaaccccatcctctgctgaaccaaccgagaatggtgaaaggacccccttggcgaacgagaataccacaacttcgcctactgaatctacggaacacggcgagcggacggctaatgagaaaaccaccccatctcccgctgagccaacagaacatggcgagcggacacccagcgctaacgaaaagaccatcccctccccggctaagcccaccgaacacgaagagatgacacccagtgccaatgagaataccacaccatcacctgtgaagcctactgaacacggcgagaaaacaacattagcaaacgagaagatcactttgagccccgagggacctacagaacatggagctaagacaacaagtgccaacgaaaagataaccccgagtttagctaagcccaccgagcacggagagaggactacatccccaaatgataagatcacctctagcgctgccgagagcactgagcacagagaccgagccacgagtgctaacgtgatcactcctgcccctgccgaaccaataaagcacgccaagcggaccactttggcccacgaaaaaatgacgcaagtaacagagaaaagtactgaacaccctgagaagactacctcaacaacagagaaaacaacccggactcccgaaaaacccacgctgtactctgagaaaacgatctgcactaaagggaaaaatactccagtacctgaaaaaccgacggagaatctggggaatacaacactaacgaccgagacaatcaaggccccagtcaagagtacagaaaatcccgagaaaaccgcagctgtcacaaaaaccatcaaaccctctgtcaaggtgactggagataaaagtctaacaaccacttcgtcccatctcaacaaaactgaggtgacccatcaggtcccaaccggctccttcactctcattacatctcgaaccaagctgtcctcaatcacttccgaggctaccgggaacaagagtcacccctatctcaacaaggatggctctcagaaaggtatccacgcaggccaaatgggcgagaatgattcgtttcccgcatgggccatcgtgattgttgtgctagtggcagtcattctgctactggtgttcctaggcctcatttttctggtgtcctacatgatgcgcactcgacgtactctgacgcagaacacccagtacaacgatgcagaagacgagggaggacccaactcttaccctgtgtacctgatggagcagcagaacttaggtatgggacagatcccgagccctaggtag

SEQ ID NO: 220743 - DNA, 1524 bp, synthetic construct
  misc_feature 1..1524: note = Description of Artificial Sequence: Synthetic coding sequence
  source 1..1524: mol_type = other DNA
ccccttgccaacgagaaaacaacactgagccctgcagagcctaccgagaacggggaacggaccccttttacgaatgagaaaaccacaccgtcctccgccgaacccactgaacatggcgagcgaaccccgctggccaatgagattacaacaccatctcgggctgaaccaacagagcacggagaacgcatcgcaaatgagaaggctactccatctcctgcaaagcctaccgaacacggtgaaacaaccgtcaacgaagacacaactcctagttctgctgagccaacagagaacggcgaacgaactccattggccaatgagaacaccactacctcaccaaccgagtctaccgaacacggagagagaaccgctaatgagaagacaaccccatcacctgccgaacccaccgaacacggtgaacgaacccctagtgctaatgagaaaactatcccttcccctgcaaaacctactgagcacgaggagatgactccttcagccaacgagaacaccaccccctctcccgtaaaacccaccgaacacggcgagaaaacaaccctggcaaacgagaagattacgctgtctcccgaaggcccaaccgagcacggtgctaagaccaccagtgctaatgagaagattactccgtccctggccaagcctacagagcacggagagcgaacaacttcgcccaatgacaagatcacatctagtgccgctgaaagcactgaacatagagatcgagccacatccgccaatgttattacacctgcccctgctgaacccatcaagcatgcaaaaaggaccacactggctcatgagaagatgacacaggtgaccgagaaatcaactgaacaccccgagaagaccacaagcacaactgaaaagaccaccagaacacccgaaaagccaactctgtacagcgagaagactatctgtaccaagggcaagaacactccagtgcccgagaagcccactgagaatctgggtaacacaacgctgaccaccgagacgattaaggctcccgtgaagagtacagagaatccagagaagacagcagcggtcacaaaaacaattaagccatctgtgaaggtcactggagacaaatccttgacgacaacttcttcgcaccttaataagactgaggtcacgcaccaggtccctacaggctcattcaccctgataacctcgaggaccaagctgtctagcatcaccagtgaagctaccggcaacgaaagccacccctacctcaacaaagacggttctcagaagggcatccatgccggtcagatgggcgagaacgattccttccctgcttgggcaattgtgattgtcgtgctggtggccgtcatactcctgctcgtgtttcttgggcttatattcctcgtcagttacatgatgcgaacccgaaggacgctgacacaaaacactcagtacaacgatgctgaagacgagggtgggccaaactcttaccctgtgtacttgatggagcagcagaatcttgggatgggacaaattccgtctccacggtag

SEQ ID NO: 220744 - DNA, 1554 bp, synthetic construct
  misc_feature 1..1554: note = Description of Artificial Sequence: Synthetic coding sequence
  source 1..1554: mol_type = other DNA
atggctcagccagttcatagcctctgtagtgcctttggacttcagtgttgcctacttttcttgctagcaagctggggagccggagccactacattccaggagtaccagaaaactggggagctgagcaccagtgatcacatcttcccactcacacccggtctggtatacagtatcccctttgaccatatcgtgttgcactctggccagcgccctcccgagctcccgaagtcgaccgagattcatgagcagaaacgacattgtaacacgactaggcactccaagccgacagacaagcccaccggaaactcaaaaaccatcgaccacaagtccagcactgacaatcacgaggcaccacctacgagtgaggagaatagctccaatcaaggtaaagatccaatgatcaggaatcagaggagcgtagacccagccgatagcacaacaactcataaggaaagcgccggaaagaagcacataaccccagctccaaagtctaaaattaactgccgaaagagtacaaccgggaagagtactgtcaccaggaaaagcgataagaccggtcgacccctggagaagagcatgagcactctggacaaaacatcaaccagcagtcacaaaacaacgacctctttccacaattccggaaattctcagactaagcagaagtccacctcctttccagagaagatcacagcggcatcaaagaccacttataaaactacagggacacctgaagagagtgaaaagaccgaggattcaaggacaaccgtggccagcgataagttgttaacaaagaccaccaagaatattcaggaaaccatctctgcgaacgagttgacccagtccttagcggaacctaccgagcatggcggtcgcaccgctaacgagaacaacacacccagcccagcagagcccaccgaaaaccgcgaacggacggccaacgaaaacaaaaaaactatctgcaccaagggaaaaaacacgccagttcctgagaagcctacagaaaatttgggcaataccacccttacaacagagaccatcaaggctccagtaaaaagcaccgagaatccagagaagaccgccgcagtgacgaagacaatcaagcccagcgtgaaggtgacgggggacaaatctctgaccactacttcttcccatctaaacaagactgaggtcacgcatcaagtgccgactgggtcatttactttaattacatccaggacgaagctctcttccatcacgtcagaggccacaggcaatgaaagtcacccctacctgaacaaggatgggtctcagaaaggaatacacgctggacaaatgggagagaacgactcattccccgcatgggctattgttattgttgttctcgtcgccgtgatcttactactggtgtttcttggccttatattcctggtatcatacatgatgcgcacgcgaagaacactgactcagaacacccagtacaacgatgcagaagatgaggggggaccaaactcctatcctgtttatctcatggagcaacagaatctggggatgggccagattccgtcacccagatag

SEQ ID NO: 220745 - DNA, 1554 bp, synthetic construct
  misc_feature 1..1554: note = Description of Artificial Sequence: Synthetic coding sequence
  source 1..1554: mol_type = other DNA
atggcccagcctgtgcattccctgtgttcggcatttggtctgcaatgctgcctgctgttcctcttggcctcctggggggcaggggcaacaacctttcaggaataccagaagactggcgagctgagcacctccgatcacatttttccgcttacccctgggctcgtttactccatcccctttgatcatatagtcctgcatagtggccagagaccacctgaactgccaaagtctacagaaattcatgagcagaagcggcactgcaataccactcgccactccaagcctactgataaacccacaggtaactctaagactattgatcacaagtccagcacagataatcacgaagctcccccaactagcgaggagaactccagcaaccagggcaaggatcccatgattaggaatcaacggagtgtggatccagcggattccacaacaacccacaaagagtccgcaggaaagaaacatattacaccagctcccaaatctaagatcaactgccgaaagagcacaaccggaaagtctaccgtgacaaggaagtccgataaaacaggcaggcctctggaaaagagtatgtccactttggataaaacctccacctcaagccacaagactacaactagtttccacaattccggtaactcgcagaccaagcagaagtcaacctcctttcccgagaagataacagcagcttcaaaaaccacgtacaaaacaaccgggacgcctgaggagagcgaaaagaccgaggactctcgtacaactgtggcatctgataagttgttgaccaagaccaccaagaacatccaggagacgatcagtgcgaacgagctgacccagagcctcgcagaaccaactgagcacgggggtagaactgccaacgagaacaatacaccctccccggcagaaccgaccgaaaaccgcgagagaactgctaacgaaaacaagaaaactatctgcacaaagggcaagaacacccccgttccggaaaagcctaccgagaacttgggtaacaccacacttaccaccgaaaccattaaggcgccagtaaaaagtacagagaacccagagaagactgccgcagtaactaagactataaagccctctgttaaggttacaggagataaatctctcaccactacctcatctcacctgaacaaaacggaagtgacccaccaagtcccgaccggatccttcacccttatcacatctcgaacaaagttgtctagcattactagtgaggccactgggaatgaatcacatccttacttaaataaggacggctcccagaagggaatccacgcaggtcagatgggggaaaacgattcctttcccgcttgggccattgtgatagtggttttggttgctgtcatacttcttcttgtgttcctgggacttatattcctcgtgtcttacatgatgcggacaagacggacgctgacgcagaacacgcagtataacgatgctgaggacgagggaggccctaatagttaccctgtgtatctaatggaacaacaaaacctgggaatggggcagatacccagtcctcggtag

SEQ ID NO: 220746 - DNA, 1554 bp, synthetic construct
  misc_feature 1..1554: note = Description of Artificial Sequence: Synthetic coding sequence
  source 1..1554: mol_type = other DNA
atggcacaacccgtgcactctctgtgctctgcttttggcctgcaatgctgcttactgtttctgcttgcttcatggggtgctggggcaacaacattccaagaatatcagaagactggggagctgtccaccagcgaccacattttcccgctgactcccggtttggtctacagtatcccttttgatcacatcgtgttgcacagtgggcaaagacccccagagctgccgaaatccacagagatacacgagcaaaagcgacattgcaacactactcgtcattcaaagccaacggataaaccgactgggaactcaaaaaccattgatcataagtcatctacggacaatcacgaagcaccgcctacgagcgaagagaacagctcaaatcagggaaaagaccccatgatccgtaaccaacggagtgtggacccggctgatagtaccactacgcacaaagagagtgccggaaaaaagcatattacacctgctcccaagagcaaaattaattgccgcaagtctacgacaggtaagtctaccgtcacaaggaagtctgacaagaccggcagacctctcgaaaagtccatgtctaccctggacaagacgtcgacttcttctcacaaaactacaacaagcttccacaacagtggaaattcacagactaaacagaaaagcacatcttttcccgaaaaaattacagcagcgagcaaaacaacttataagaccactggcacacctgaggaaagcgaaaaaaccgaagatagtagaaccactgtcgcgtccgataagctgctcaccaaaacaactaaaaatattcaggagacgatcagcgccaatgagctgacgcaatctctggccgagccaaccgaacacggcggtcgtacagccaacgagaataacaccccatcaccagccgaaccaaccgaaaatcgcgagaggacggctaacgagaacaagaagactatctgtacaaaagggaaaaataccccagttcctgagaagccaacagaaaacttaggcaatacgacactgaccaccgaaacgattaaagcccctgtgaagagtaccgagaatcccgaaaagacagcagcggtgactaaaaccatcaaaccatctgtcaaggtgacaggagataaatctctgacgactacaagcagccacttgaacaagacagaagtgacccaccaggtgcctacgggctcttttaccctcattacctcccgcacgaaattatctagtattactagtgaggctacaggcaatgaatctcatccctacctgaacaaagatgggagtcagaaaggaatccacgctggacagatgggcgagaacgatagtttcccagcgtgggctattgtgatcgttgtgctcgtggcagtcattctgctcctggtgtttctgggacttattttcctagtgtcttatatgatgcggacccgacgcactctgacacagaacacccagtataacgacgcggaagacgaaggcggtccaaacagctatcctgtatacctgatggaacagcaaaatctgggcatgggccagataccttcacctcgctag

SEQ ID NO: 220747 - DNA, 4182 bp, synthetic construct
  misc_feature 1..4182: note = Description of Artificial Sequence: Synthetic coding sequence
  source 1..4182: mol_type = other DNA
atggcacagccagtgcattcactctgctccgcatttgggcttcagtgttgtcttctgtttttgctcgccagttggggcgctggtgccacaactttccaggaataccagaagaccggcgaactgtccacctccgatcacattttccccctaactcctggactggtttactccatcccttttgatcatatcgttctgcatagcggccaacgacctccagagctgcctaagagtacagagatccacgagcagaaacggcattgtaacactacccgccactccaagccaactgataagccgaccggaaatagtaaaaccatcgatcataaaagcagcactgataatcacgaggctccccctaccagcgaagagaactcaagtaaccagggtaaggatcccatgattcgcaaccagcgatccgtggaccctgcagactcaactaccactcacaaagagagcgcagggaaaaagcacatcaccccagccccaaagagcaagatcaactgcaggaagtctaccacaggcaaatccaccgttacgaggaagagtgacaagacaggccgacctctggagaaatcaatgagtactcttgacaagacatccacttccagccacaagaccaccacgtcctttcataactctgggaactcacagaccaaacagaaaagtaccagttttccagaaaagattaccgcagcaagcaaaacgacctacaaaacaaccggcacacccgaggaaagcgagaagacggaggattcacggaccacagtggcttccgataagctgctgaccaaaacgacaaaaaatattcaggaaacaatttctgccaatgagttgacccagagcctggccgaacctacagaacatggcggtcggacggccaacgagaataatacaccaagtcccgctgaacccactgagaatcgcgagagaacagccaatgaaaacacaacactttcccccgctgagcctactgaaaaccgcgaacgtacagccaatgagaataccgctccattcccagccggaccgacagagaaccgcgagatgaccgcaaacgaaaacacgactcttttccccgctgaacctacagaacacggtgaaagaacagctaacgagaacactacaccttcccccgcagaacctaccgaacacggcgaacggactgccaacgagaacaccactccatctccagcggagcccactgaacacggcgagagaacccccttcgccaatgacaagaccacctcatcatcagcagaatccactgaacatggcgaaaggactcccttggccaacgaaaatactacgcctagtcctgctgagcccactgagaacagggagaggaccgccaacgaaaacactactccatctcccgcaggtcccactgagaatcgggaaacaacggcgaacgaaaaaaccacactgtcccccgttgagcctacagagaatagggagacaaccgcaaatgagaagacaacaccttctccagctgagccaacagagaatgggcagaggactccatttgcaaatgagaagaccacatcctcaagcgcggagcctaccgaacatggagagcggacccctctggccaatgagaacaccaccccgagccccgctgaacccactgagaacagggagcgtaccgccaacgaaaagactaccccgagccctgcggagcctacggagaacggagacaggactccactcgcaaacgaaaaaactaccccctcattggccgaacccaccgagaacgggcagcgcaccccgtttgcaaatgaaaaaacgacgtctagtagtgcagaaccaactgaacacgaagagcgcactccactggccaatgagaacactacacccagcccagctgagcccacagaaaacagggagcgcactgctaacgaaaacacaacaccaagtcccgctggccctactgagaaccgcgagatgactgcaaacgagaaaactacactgttccctgccgaaccaactgagaatagggagcggaccgctaatgagaagaccacctctagccccgctgaaccgactgaaaatggccaaaggacgccctttgctaacgagaaaacaacaagctctagtgctgagccaacagaacatggggagcgaacaccacttgccaacgaaaacacaacactttcacccgctgagccaaccgagaatcgagaacggaccgctaatgagaaaacaaccccctttccagccgaaccgactgagaatcgagaacggactgctaacgaaaacaccacgccttcccctgcccagccgaccgagaatggtgaccggacgccgttagccaatgagaaaacaacacccagccttgccgagccaactgagaacggaaagcgcactccttttgccaacgaaaaaaccactagtagctctgccgaaccgacagagcatgcagagaggacccccctggcaaatgagaacaccacaagctcccccgcagagccaactgaaaaccgcgaacgcaccgcaaacgaaaaaacaacacagtttccagctgagccgaccgaaaatagagaatctacggctaatgagaagacaactccattccccgctgagcccactgaaaatcgagagtggacggccaacgaaaacacgaccttgagcccagccgagccaactgaacatgaagaaatgactccactagcaaacgagaaaacaaccctgtccccagctgagccaacagaaaacggcgaaaggactccctttaccaatgaaaagaccactccatcaagcgccgagcctacagagcacggtgagagaacccccttggctaatgagataaccacccccagtcgcgcagagcccactgaacacggagaaagaatagcaaatgagaaagctacgcctagccctgctaagccgacagagcatggcgagacaacggtgaacgaggacactacaccaagctcagcggaacctacggagaatggggagaggacacccctagccaacgagaacaccacaacctcccctacagagtccacagaacatggagagcgaacggcgaacgagaagaccaccccatcgcctgcagaacctaccgaacatggtgaaaggaccccgtccgctaatgagaaaacaattccgtcacctgcaaaacccacagagcacgaagagatgaccccctcagcaaatgaaaacacgactccttcacccgtgaagcccaccgaacacggagaaaagacaaccctggctaatgagaagatcacactgagccctgaaggtcctaccgaacacggcgcaaaaactacctcagcgaatgaaaagattacccccagtcttgcgaaaccgacagaacacggagaacgaacgacctcacctaacgacaagatcacatcttctgccgcagaaagcaccgagcatcgcgacagggctacttcggcaaacgtcatcacccctgcacccgctgagcctattaagcatgctaagagaactaccctagcccacgagaagatgacccaggtgacagaaaagtccacagagcaccctgaaaaaactacttccacaactgaaaaaaccaccaggacaccagagaagccgacactgtatagtgaaaaaactatttgtactaaggggaagaacacgcctgtaccagaaaagcctactgagaatctgggaaacactaccctgacgactgagactataaaggcccctgtgaagtccaccgaaaaccctgagaagactgccgctgtgacaaagaccatcaagcctagtgtaaaggttacaggggacaaatcccttaccaccaccagctcacatctcaacaagacagaggtgactcatcaggtacccacgggcagctttacgctaattacatctcgtacgaagctgagcagtattaccagcgaggcaaccggaaacgagtctcacccatatctcaataaagacgggagtcagaaggggatacacgccggtcagatgggcgaaaatgatagctttccggcatgggccattgtgatcgtggtgctcgtagccgtcattctgctgctggtattcttggggctcatcttcctggtctcttatatgatgcgcacccgcaggacgcttactcagaacacgcaatataacgacgccgaggacgaagggggacccaactcttatccagtgtacttgatggagcaacagaacctgggaatgggccagattccatccccgagatag

SEQ ID NO: 220748 - DNA, 2670 bp, synthetic construct
  misc_feature 1..2670: note = Description of Artificial Sequence: Synthetic coding sequence
  source 1..2670: mol_type = other DNA
atggcacagcccgtgcactcactttgtagtgctttcggattgcagtgttgtctcctgtttctgcttgctagttggggggcaggggctactacctttcaagaatatcagaagaccggggagctgtctacatctgatcacatattccctttgacacccggattggtatactctatacctttcgatcatattgtcctgcactcaggccagaggccccctgaactcccgaaaagcacagagatccacgagcagaaacggcattgcaataccacacgacactccaagccaactgacaagcctaccggtaatagcaaaactatcgatcacaaaagcagtacagataaccacgaggcaccaccaactagcgaggagaattcctccaatcaggggaaagatcctatgatcagaaatcagcgaagcgtcgaccccgctgactccactacgacccacaaggaatcagctggtaaaaagcacatcacacctgctcctaaatcgaaaatcaattgtcgaaagagtacaacaggcaaaagtacggtaacgagaaagtctgacaagaccggtcgcccacttgaaaaaagtatgtctaccctggataaaaccagcacaagctctcataaaacaacaacctctttccataatagcggaaattctcagactaagcaaaagtccacctcattccccgagaagatcactgcagcttcgaagaccacctataagactacaggtactccggaagaaagcgaaaagaccgaagattctcgaactactgtggcctctgataagctgctgaccaagactacgaaaaatatccaggagacaatctcagcaaacgaattgacacagtctctcgccgagcccaccgagcatggaggcagaactgccaacgagaataacacccccagtcctgcagaaccaacagagaaccgcgagcggacagccaacgaaaatacaaccctctccccagccgaacccaccgaaaatcgcgagcgtaccgctaacgaaaataccgcgccttttccggcaggtcccaccgaaaaccgggaaatgactgcaaacgaaaataccactctgttccctgccgaacccacagaacatggagaacgaacagccaatgaaaacacaacccccagtcctgccgagccaaccgagcacggtgaacggactgcaaacgagaacacaacaccgagccccgctgagcctaccgaacacggtgaacgcaccccctttgctaatgacaaaactacaagctcctccgctgagtctaccgaacatggtgaacgcacaccactcgcaaatgaaaacacaactccctcacccgcagaacccaccgagaatagggaacggaccgccaatgagaatacaacaccgagtcccgctgggccaacagagaatcgagagacaacggcaaatgagaagaccacgctctctcccgtcgaacccaccgaaaaccgcgaaactaccgcaaatgagaagaccaccccaagcccagccgagcccactgaaaatggccaaaggaccccatttgcaaacgaaaaaacaacgagctcctcagccgagccaaccgaacacggcgagcggacccccttggccaatgagaataccactccatcccctgctgagccaaccgagaatagagagcgaactgcgaatgagaaaaccaccccctcccctgcagagcccacagaaaatggcgaccggacacccttagccaacgagaagactaccccatctcttgctgagccaaccgaaaatggtcagaggacacccttcgcaaatgagaagactacaagtagttcagccgaacctacagaacacgaggagcggacccccttggccaacgagaatactaccccaagcccggctgagcctaccgaaaacagagagcggactgccaatgagaatacgacgcccagccctgcagggccaacagaaaaccgcgaaatgactgctaatgagaaaaccacccttttcccggctgaacccaccgagaaccgggagcggacagccaatgagaagacaactagctcacctgctgagcctacagagaatggtcaacggacgccgttcgctaatgagaagacaacctcatcctcggccgagcccactgaacatggtgaacggactcccttagctaacgaaaacaccaccttatctcctgcaggcccaaccgaaaaccgcgaacgtaccgcaaatgaaaagacgacacccttcccagccgaacctacagagaaccgggaaaggacggccaacgaaaatactacgccctcccctgctcaaccaactgagaatggcgaccgcacacccctagccaacgaaaagaccaccccatcgttggctgagccaactgaaaacggcaaacgaacaccctttgccaatgaaaagacgactagttcgtcggccgaacctacagaacatgccgaacggactcctctggcgaatgagaatactacttcctctccggctgagccaacagaaaatagagagagaactgctaatgagaagaccacacagtttcctgctgagcccacagagaatagggagagtacagctaacgagaagaccactcctttccctgctgagcccacagaaaatagggagtggaccgccaatgaaaacacaactttaagtcccgcagagcccacagagcacgaggagatgactccgctggcctag

SEQ ID NO: 220749 - DNA, 1653 bp, synthetic construct
  misc_feature 1..1653: note = Description of Artificial Sequence: Synthetic coding sequence
  source 1..1653: mol_type = other DNA
atggtcccaaaggctgactctggagccttccttctgttgttcctgctggtgctgactgtcacagagcctctgcgccctgagttgcgttgcaatcccggacaattcgcatgtagaagcgggaccattcaatgcatccccttgccgtggcagtgcgacggatgggcaacctgcgaagatgagtctgacgaggctaactgtccagaagtgacaggggaagtcagaccgcaccacgggaaagaagctgtggatccaagacagggccgagccagggggggagatccttcccactttcacgccgtgaacgtcgcacagcctgtgcgctttagtagcttcctgggcaaatgccctactggatggcatcattatgaaggaaccgcaagctgctacagggtgtatctctccggagaaaactattgggatgctgctcagacctgtcagaggctaaacggatctctggccacgttctctacggaccaagagttgaggtttgtgctcgcccaggagtgggaccagcctgagagaagttttgggtggaaagaccagcgcaaactttgggtgggctatcagtatgtgattactgggcgaaacaggtctctagagggcagatgggaggtggcatttaaggggagcagcgaggtattcctgccacccgacccaatttttgcctccgcgatgtctgaaaatgataacgtcttctgtgctcaactacagtgtttccattttcctacattgcgacaccacgacctgcatagctggcacgcagaatcctgctacgagaagagctcattcctctgcaagaggtcccagacttgcgtagatatcaaagataatgttgtggacgaagggttttacttcacccctaagggcgacgacccttgcttgtcatgtacttgccacggcggagaacccgagatgtgcgtggcagccctatgtgaaagacctcaggggtgccagcagtacagaaaggaccctaaggaatgctgcaagtttatgtgtctggaccccgacgggaattccctgtttgatagtatggctagtggaatgcggctggtcgtttcctgcatttcaagcttcctgattctcagtttactgctgttcatggtgcataggctccgtcaacgcagacgtgagcggatcgaatcccttattggcgctaatctgcaccatttcaatctgggccgtagaatccccggatttgattacggccctgacggcttcgggacggggctaacccctctgcacttgagtgacgatggagagggcggtacctttcactttcacgaccccccacccccttatacagcctataaataccccgatattggacaacccgacgatccgccaccaccatatgaggcaagcattcatccagattctgtattttacgacccggcagacgatgacgccttcgagcccgtggaggttagtctgcccgcacctggtgacggtggctccgaaggtgctctgcttcgtcgtctggagcagccgttgcccacagcgggagcatccctggccgacctggaggacagcgccgacagcagctctgccttgcttgtgcctcccgatcctgcacagagcggttcaactcctgctgctgaggctctgcccggagggggtcgtcactcccgctcttctcttaataccgtggtttag

SEQ ID NO: 220750 - DNA, 984 bp, synthetic construct
  misc_feature 1..984: note = Description of Artificial Sequence: Synthetic coding sequence
  source 1..984: mol_type = other DNA
atggtacctaaagccgatagtggggcattcctactactgttcctgttggtgcttaccgtgaccgaaccactgaggccagaactgcgttgcaatcctggccaatttgcctgcaggtccgggactatacaatgcatcccacttccatggcagtgcgacgggtgggctacttgtgaagatgagagcgatgaggctaattgccctgaggtcacgggcgaagtacggccacaccacggcaaggaagctgtcgaccctcgtcagggcagggcaaggggcggagacccttcccatttccacgccgtgaacgtcgcgcaacccgttcggttcagttcgttcctaggaaaatgtccaacaggatggcatcactacgaagggaccgcctcatgctacagagtgtatctgtctggggaaaactattgggacgccgctcaaacatgtcagagactaaacggcagtctcgctactttttccacagaccaagagctgcgtttcgtcctggcacaggaatgggatcagcctgaacgcagtttcggatggaaggaccagagaaagctctgggttggctatcagtatgtaatcaccggcaggaataggtctctggaaggacgatgggaggtagcctttaagggatcgagtgaagttttcttaccccctgaccctatcttcgcgagtgccatgagtgaaaatgacaatgttttttgtgcacagctacagtgctttcatttccccaccctccgccaccatgatctgcacagctggcatgcagaaagctgctacgaaaaatcatcctttctgtgtaagcgtagtcagacttgtgtagacattaaggataatgtcgttgacgagggcttttatttcacacccaagggcgatgatccatgcctctcctgcacttgtcatggaggcgagccagaaatgtgcgtggcggcactctgcgagaggccacaggggtgcagtcccctttcttgcaccgcccgagcgacatag

SEQ ID NO: 220751 - DNA, 1530 bp, synthetic construct
  misc_feature 1..1530: note = Description of Artificial Sequence: Synthetic coding sequence
  source 1..1530: mol_type = other DNA
atggtgcccaaagccgacagcggcgcatttttgttactctttctgctggtcctcacagtgaccgagcccctccggccagaggtcaccggggaagttaggccccatcatggcaaagaagctgttgatcctagacagggtcgggctagaggtggggaccccagccacttccacgctgtcaacgtggcgcagcccgtgcggttcagcagcttcctcggcaaatgtcccaccgggtggcaccattacgaagggacggccagttgctaccgagtgtatctctccggtgaaaattattgggatgctgcccagacctgccagcgtttgaatggcagccttgcaactttctctaccgatcaagaactcaggttcgtcctggctcaggagtgggatcagcctgaacgatcctttggatggaaagaccagaggaagctctgggttgggtatcaatacgtcataaccggtcgtaaccgatctctcgaaggtcgctgggaagtggccttcaagggaagctccgaagtgtttctgccaccggatcccatcttcgccagtgctatgtcagagaacgacaatgtgttctgcgctcagctgcaatgctttcacttccctacgctgagacaccatgatcttcatagctggcatgcggagtcatgttacgaaaagtctagtttcctttgtaagaggtctcaaacttgcgtcgacattaaagacaatgtcgtcgatgagggtttttactttacgccaaagggcgatgacccctgcctttcatgcacatgtcacggtggcgagccagaaatgtgcgttgcggcactgtgtgaacggccacaaggttgtcagcagtaccgcaaggaccccaaagagtgttgcaaattcatgtgcttagatcctgacggcaactcactgtttgactctatggcctcgggtatgcggctggtcgtcagctgcatttccagttttcttattctgagtctgttgctgttcatggtgcatcgcctaaggcagcgccgtcgggaaagaatcgaatcactgataggcgctaatctgcatcattttaatctcggtaggaggattccagggttcgattacgggcctgatgggtttggaacgggactcaccccattgcacctaagtgatgatggcgagggagggacatttcatttccacgacccaccacccccatacaccgcatataagtatccggacattggtcagcccgatgatcccccacctccatatgaagcctccattcatccagatagtgtgttttatgatcccgctgacgacgacgcgtttgaacccgttgaagtgtcactacctgctcccggtgatggcggatcggaaggggcattactgcgcaggctggaacaacctctgcctacagccggtgcctccctcgccgacctggaggacagcgctgactcctcctcagctctactggtcccccctgatcccgcacaatctgggtccacccctgctgccgaagcgttgccaggcggtggacgacatagccggtccagcttgaatacagtggtctag

SEQ ID NO: 220752 - DNA, 810 bp, synthetic construct
  misc_feature 1..810: note = Description of Artificial Sequence: Synthetic coding sequence
  source 1..810: mol_type = other DNA
atggtgccgaaagccgactctggagcattccttcttctgtttctgctcgtgctgactgtgacggagccacttagacctgaactgaggtgcaacccagggcagtttgcctgcaggagcggtacaatccagtgtatcccgttgccgtggcagtgcgatgggtgggctacatgcgaggacgagtccgatgaagcaaactgtcctgaggtgacgggagaggtgcggcctcaccatggaaaggaggccgtcgatcctcggcagggacgggctaggggaggagatcccagccattttcacgcagtgaatgtcgcacagccagtgcgtttctcccgtaagtgtccgaccggatggcaccactatgagggtaccgcctcgtgctacagggtctacctatcgggtgagaactactgggacgccgctcaaacctgtcagaggctgaacggatcgctcgcaacatttagtactgatcaggagttgagatttgtactcgcacaggagtgggatcagcccgaacgctctttcgggtggaaagatcagcgaaagctgtgggtcgggtatcagtatgtcataaccgggagaaataggagcctggagggcagatgggaggtggccttcaaagactggggcgtttcagacacaatggtgcaccgaagacttctttgtccatgcgtcggaaccctccatacacacctgaaactcggcgcacggtttcgcagggttcccgtgaggctgggcggagccctgtctcggagatccccacgtccgacccctgcctgtgagccacgcttgggagccaagacgctccaggtttag

SEQ ID NO: 220753 - DNA, 663 bp, synthetic construct
  misc_feature 1..663: note = Description of Artificial Sequence: Synthetic coding sequence
  source 1..663: mol_type = other DNA
atggaacgatatgctggggcacttgaggaagttgctgatggcgctcgacagcaggagcgccattatcagttgctatctgccctgcagagcctcgtcaaggagcttccttcatcctttcagcaacggctgagttacacaaccctgtcagacctagccctcgcactgcttgacggtactgtcttcgagatcgtccaggggttgctagagatccagcatctgaccgagaagtcactttacaaccagagactcaggctccaaaacgaacatcgggtgcttaggcaggccctgcgacagaagcatcaggaagcacagcaggcatgtcggccacataacctgcccgttcttcaggcagcccagcagcgggagttggaggcggtggaacaccggatacgggaggaacaacgggctatggatcagaagattgtgcttgaactggacagaaaagtggctgatcaacagtcaacccttgaaaaagctggggtcgctgggttttatgtcaccaccaacccgcaggaactgatgcttcagatgaatctgctggagctgatcaggaagctacagcagagagggtgctgggcgggaaaggccgcactgggtctgggtgggccttggcagctccccgctgctcagtgtgatcagaagggctccccggtcccaccatag

SEQ ID NO: 220754 - DNA, 663 bp, synthetic construct
  misc_feature 1..663: note = Description of Artificial Sequence: Synthetic coding sequence
  source 1..663: mol_type = other DNA
atggagcgctacgcagcagccctggaagaggttgccgacggcgcacgtcagcaggagaggcactatcagctgttgagtgctctgcaaagcctcgtgaaggagctgcccagttcctttcagcagaggctgtcttacactaccctatccgacttggcactcgccctcctcgatggcaccgtctttgaaatcgtgcaaggactgctggaaattcagcacctgacagagaaatcactgtataaccagcgacttcggctgcagaacgagcaccgagtccttcggcaagcgcttagacagaagcatcaggaggcccagcaggcttgtcgccctcataacctccctgtagtccaggctgctcagcagcgggaactcgaggccgtcgagcaccggatccgagaagagcagcgagccatggatcagaagatcatcctcgaacttgatcgtaaggtcgcagatcagcagtctaccctagaaaaagctggggtagcgggattttacgtgacgaccaatcctcaggaactcatgctgcagatgaatctcctcgaacttatccgcaaactccagcagcgtggttgccgggctggcaacgcagccctcggtctaggcggtccctggcagtccccagctgcacagtgcgatcaaaagggtagccccgttccaccttag

SEQ ID NO: 220755 - DNA, 2322 bp, synthetic construct
  misc_feature 1..2322: note = Description of Artificial Sequence: Synthetic coding sequence
  source 1..2322: mol_type = other DNA
atggagaccgacgaatcaccaagtcccctgccatgcggcccagccggtgaggcagttatggagagtagagctcgccctttccaggccctaccacgcgagcagagccctcctccccctctgcagacatcatcaggcgctgaggtcatggacgttggatcaggcggagatggccagtcagagttaccggcagaagacccgttcaatttttatggggcttcactcctgtccaaaggaagcttctcaaagggtaggctgctgatcgacccgaattgctctggtcactctcctaggaccgctaggcacgcacctgccgtgagaaagttctcgcctgacctgaagctgttgaaggatgtcaaaatatccgtatctttcaccgagtcatgtaggagcaaagatagaaaggttttgtacactggcgctgagcgagacgttagggccgaatgcgggctcctcctctcccctgtctcgggcgatgtccatgcctgcccatttggtggaagtgttggggacggggttggcattggaggcgaaagcgctgacaaaaaggatgaggagaatgaactggaccaggaaaaaagggttgagtacgctgtgctagatgagctggaagacttcacagataacctggaactcgatgaagagggagcgggtggcttcacagctaaagcaatagtccagcgggacagggtggacgaggaggctctgaatttcccatacgaagacgactttgataacgacgtcgatgcgctcttagaggagggcctctgtgcaccaaagaagaggcggacggaggaaaagtacggcggagactcagaccaccccagcgatggagaaacgtcagtgcagcccatgatgaccaaaatcaaaacagttctaaaatccaggggaagacccccaacagaacccttgcccgatggctggatcatgacattccataactcgggcgtgcccgtatacctgcaccgggagtcccgcgtagttacctggtcccgtccctattttttgggtaccgggtctattaggaagcatgacccgccactatccagtatcccatgcttacattacaaaaagatgaaggacaacgaagagagagagcagagtagtgacctcaccccgtccggcgatgtgtcacctgtaaagcctttaagtcgcagtgccgaactggagtttccactcgatgaacccgactcgatgggcgcagatcccggacccccagatgagaaggatcccctgggagcggaagctgctcccggtgccctaggtcaggttaaagctaaggtggaagtatgcaaagacgagagcgtggatctcgaggagttcagatcttaccttgagaaacgcttcgactttgaacaggtcactgtcaagaagtttcgaacatgggctgagcgacggcagttcaaccgagaaatgaagagaaagcaggccgagagtgagagacccatcctccccgctaaccaaaagcttataactctgtctgtgcaggacgccccaacaaagaaggaatttgtgattaatcctaacgggaaaagcgaagtttgtatactacacgaatacatgcaacgggtgttgaaagtcagaccggtatataacttcttcgaatgtgaaaatccatccgagccttttggcgcatctgtgacaattgacggcgttacctacgggagcgggaccgccagtagcaaaaagctcgccaaaaataaagccgcaagagctaccctggaaatacttatcccagatttcgtgaaacaaactagtgaggaaaaacctaaagatagtgaggagctggagtattttaaccacatttctatcgaagattctagggtgtatgaactcacaagcaaagccggactactcagcccatatcagattctccacgaatgcctgaagagaaatcacggaatgggtgatacttccattaaatttgaggtggtcccaggaaagaaccaaaagtccgagtatgttatggcatgcgggaaacatactgtaagaggttggtgcaaaaataagcgcgtgggcaagcagttggcttctcagaaaatcctgcagctgctgcatccgcacgtgaaaaactggggaagcctgctgcgcatgtacggccgtgaatcttccaagatggtgaagcaggagacctctgacaagagcgtgatcgaacttcaacagtatgctaagaagaataagcccaacctccacatattgtcaaagttgcaagaagagatgaaacgtctggccgaggagcgcgaagaaacacggaagaagccgaaaatgagtattgtcgccagcgcccagccaggtggtgaacctctttgcacagtagacgtgtag

SEQ ID NO: 220756 - DNA, 2223 bp, synthetic construct
  misc_feature 1..2223: note = Description of Artificial Sequence: Synthetic coding sequence
  source 1..2223: mol_type = other DNA
atggaaacggacgaaagcccctcgcctctcccgtgcggcccagccggagaagctgtgatggaaagccgcgctcgccctttccaggccctgccccgtgagcagtccccccctcctcctctgcaaacttcttcaggtgcagaggtgatggacgtcggttcaggtggagacggccaaagtgagctgccggcagaggacccattcaacttctacggagcaagtctgctctccaaaggttctttttccaaaggtcggctgctgattgacccgaattgtagcggccatagcccgaggacagctcgccatgcccctgccgttagaaagttttcccctgaccttaaactcctcaaagacgtgaagatttctgtgtctttcactgagtcttgccggagcaaggataggaaggtattatataccggagcggagagagatgtccgcgcagagtgcggtctcttgctgagccctgtgtccggcgacgtgcatgcctgccctttcgggggaagcgtcggtgatggcgtagggatcgggggagaaagcgcggacaaaaaagatgaagagaacgagctggatcaagaaaaacgtgtggagtatgctgtcttagatgagctcgaggatttcactgataatctggagctggatgaagaaggcgctgggggatttacagcaaaagcgattgtgcagcgtgaccgggtcgacgaggaggctctcaactttccatatgaagatgacttcgacaacgatgtcgatgcactcttagaagagggtttatgtgcacccaagaaacgtaggactgaggagaagtacggcggagatagtgaccatccttcagacggagagacctccgttcagccgatgatgacgaagataaagaccgtgctcaaaagtagaggaagaccaccgacagagcccctacccgacggatggatcatgaccttccacaatagcggtgtgcctgtttacctacatcgcgaatcaagagtggtgacatggtcaaggccttacttcctcggaactggcagtatcaggaagcatgatcccccactctccagcattccctgcctccactacaaaaagatgaaggataatgaggaaagggaacaatcatctgatttgacaccctctggcgatgtgtcacctgtgaagccccttagtcgcagcgccgaacttgagtttcctctggacgaacctgattccatgggggcagacccagggcctcctgatgagaaggatccgcttggagctgaagctgcccctggtgctctgggccaggtcaaagccaaggtggaggtctgtaaggacgagtcagtggatctcgaagaatttcgcagctatcttgagaagcgctttgacttcgaacaggtgacggtgaaaaagttcaggacctgggccgagcgaagacagtttaaccgtgagatgaaacggaaacaggcagagtctgagaggccaatcctccctgcgaatcagaagctcattaccttgagtgtgcaggacgctcctacaaaaaaagagtttgtgatcaatcccaatggcaaatcagaagtctgtatccttcacgaatacatgcaaagagtcctgaaagtgagacccgtgtacaacttttttgagtgtgcacgggctaccctggaaatccttatccccgacttcgtcaagcaaacttccgaagaaaagccaaaagatagcgaagagctggagtattttaaccacatctcaatagaggattctagagtgtacgagctgacgtctaaggcagggttgttgtctccatatcagattctccatgaatgcctcaaaaggaatcacggtatgggagatacgtcaataaaatttgaggtcgttcccggaaagaatcagaaaagcgaatacgttatggcatgtggtaagcacacggtgcggggatggtgcaagaacaaacgcgtaggaaaacaactggcatcccagaagatcctccagctcttgcatccgcatgttaagaactggggtagtttgttgcgtatgtacggaagggagagcagcaaaatggtcaaacaggaaacgtccgacaagagtgtcatcgagctgcagcagtatgccaagaaaaacaaacctaacctgcacatcctgagtaagctgcaggaggagatgaagcgcctggctgaggaaagggaggaaacacgaaagaagcctaaaatgtcaattgttgcgtctgcccagccgggaggcgagccattgtgcactgttgacgtctag

SEQ ID NO: 220757 - DNA, 2223 bp, synthetic construct
  misc_feature 1..2223: note = Description of Artificial Sequence: Synthetic coding sequence
  source 1..2223: mol_type = other DNA
atggaaactgatgaatccccttctcctcttccgtgcggacctgccggtgaagcagtcatggagtcccgcgctcgcccttttcaggccctccctcgcgaacagtcccccccacctccgctgcagacctcctctggcgcagaggtcatggacgttggcagcggtggagacggtcagtctgagttgcctgccgaagatccctttaatttctacggcgcttctctcctgtcaaaaggttccttcagcaagggaaggttactcattgatcctaactgttccgggcattcgcccagaacagccaggcacgctccagcggtgaggaaattctcccctgacctgaagctcctgaaggatgttaagatctctgtgtcattcacagaatcctgtcgctccaaagatcgcaaggtgctctacactggcgcagagcgggatgtccgggcagagtgcggactgctgctgtctccggtgtccggggacgtccacgcctgtcccttcggaggctcagtgggcgacggcgtcgggatcggcggagaatcagcggataagaaagatgaggaaaacgaactggatcaagagaaaagggtggaatatgccgtcctggacgagctcgaagatttcacggataacttggaattggacgaagagggtgcaggcggatttacagctaaagccatagtacagcgcgatcgcgtcgacgaggaggccctgaactttccttatgaagacgatttcgataacgacgtcgacgccttactggaggaggggttgtgcgcaccgaagaagcgacgcacagaggaaaagtatggaggggattccgatcatcccagcgatggcgagacgagcgtgcaacctatgatgaccaagatcaagactgtgctgaagagtcgagggaggcccccaacagagcccctgcccgacgggtggatcatgacattccacaattcaggtgttccggtttaccttcaccgcgaatcgcgtgtcgtcacctggtctagaccatatttcctcggaacaggaagcataaggaaacacgacccccctctgagctcaatcccatgcctccattacaagaagatgaaagacaacgaggaacgggaacaaagctctgatctcaccccctcgggcgacgtgagccccgtcaagcctctgtcccggtcagccgaactggagttccctctggatgagccagacagcatgggagcagaccccggtccaccagatgaaaaagatccactgggggctgaggccgcacctggtgccttaggccaagtgaaggcgaaggtggaggtttgcaaggatgagtcggtcgacttagaagaatttcggtcttacctcgagaagagatttgatttcgagcaggttaccgtaaagaaatttcgcacctgggctgagcggaggcagttcaaccgagagatgaagcggaagcaggcggagtctgaacggccaattctgccggcaaaccagaagcttattactttgtccgttcaggacgcacctaccaagaaagaatttgttatcaatccaaacggtaagtctgaggtctgcatactccatgagtatatgcagagggtgcttaaagtgcggccagtctacaacttctttgagtgcgcacgcgctaccctggagatactgattccagattttgtgaagcaaacctcagaggagaagcctaaggacagtgaagagttggagtattttaatcatatcagtatcgaggattccagagtgtacgagttaacatctaaggcagggttgctctcaccctaccagatcctgcacgagtgccttaagcggaaccatggtatgggagacacctctatcaagttcgaggtggttccaggcaagaatcaaaaatctgaatacgtaatggcctgtggcaagcacacagtccggggatggtgtaaaaataaaagggttggaaagcaactcgcctctcagaagatactgcagttgctgcacccacatgtcaaaaattgggggagtttgctccggatgtacggcagagagtctagtaagatggtaaagcaagagacctcggacaagagcgtgatagaactccaacagtacgccaagaagaataaacccaatttgcatattctctccaagctgcaagaagagatgaagagattagctgaagaaagggaagagacacggaagaaacccaagatgtccatcgttgcctctgcccaacccggaggtgaacccctttgtaccgtagatgtttag

SEQ ID NO: 220758 - DNA, 378 bp, synthetic construct
  misc_feature 1..378: note = Description of Artificial Sequence: Synthetic coding sequence
  source 1..378: mol_type = other DNA
atggagacagatgagagtcccagccccctgccgtgcgggccagctggagaggccgtaatggaatcccgcgcaaggcccttccaggccttacctcgggaacagtcgccaccgccacctcttcagacttcctccggcgctgaagtcatggatgtgggaagcggaggagacggccagagtgagttgcccgcagaagacccatttaatttttacggcgcatcactgctgtcaaaaggctcgttttcgaaagggcgtctcctgattgaccccaactgctcaggccactctccacgcaccgctcgtcacgcccctgctgtgcgcaagttctcccctgacctgaaattactgaaagatgtgaagatctctgtgagcttcacctag

SEQ ID NO: 220759 - DNA, 564 bp, synthetic construct
  misc_feature 1..564: note = Description of Artificial Sequence: Synthetic coding sequence
  source 1..564: mol_type = other DNA
atggtgggctcgctcaactgtatcgtggccgtttcacagaatatgggcatcggcaaaaacggggacttgccttggccacccctaaggaacgaattcaggtattttcagaggatgactaccacaagcagtgtcgagggaaagcagaatctggtgataatgggtaagaagacatggtttagcatccctgaaaaaaataggccgctaaagggcagaattaatctagttctgagtcgcgagctcaaggagccccctcagggagcccactttctgtctagatccctggacgatgctctgaagctgaccgagcaacccgagttggcgaacaaagtggacatggtttggattgtgggaggctcttcggtttataaggaagctatgaatcatcccggtcacctgaaactctttgtcacaagaataatgcaggacttcgaatcggacacattttttcccgagatcgacctcgaaaagtataagcttctgccagaatacccaggcgtcctgtcggacgtccaggaggagaagggtattaagtacaagttcgaggtttatgaaaagaatgactag

SEQ ID NO: 220760 - DNA, 564 bp, synthetic construct
  misc_feature 1..564: note = Description of Artificial Sequence: Synthetic coding sequence
  source 1..564: mol_type = other DNA
atggttggctccctgaattgtatcgtcgctgtgagccagaatatggggattggaaaaaatggagacttgccgtggcctccactgcggaatgaattcaggtatttccagcgtatgacgacaacgagctcagtggaaggtaagcaaaacctggtgatcatgggtaagaaaacctggttttcaattccggagaaaaacagaccgctcaaggggagaattaaccttgtgctgagcagggagctcaaggaaccaccccaaggggcacactttttgagccggtccctcgatgatgcccttaagttaactgaacagccggagcttgctaacaaggtcgatatggtgtggatcgttggaggtagttcagtctacaaagaggccatgaatcatcccggtcaccttaaactcttcgtcacgagaatcatgcaggactttgaatccgacaccttcttccctgagatcgacctagagaaatataagctgctgcctgaatatccaggcgtgttgtctgatgtgcaggaagaaaaaggcatcaaatataaatttgaggtctatgaaaaaaatgattag

SEQ ID NO: 220761 - DNA, 963 bp, synthetic construct
  misc_feature 1..963: note = Description of Artificial Sequence: Synthetic coding sequence
  source 1..963: mol_type = other DNA
atggccgcagtgcgaatgctaaggacatggtcaagaaatgcaggtaaattaatttgcgtgcgctacttccaaacttgtggcaacgtgcatgtgctcaagcccaattatgtctgtttttttggatacccctccttcaaatactctcacccccatcacttcctcaagacaacagcagccctcagggggcaggtggtgcaatttaagctcagtgatattggggagggaatcagagaagtgacagtaaaggagtggtacgtgaaagaaggggacacagtgtcccagttcgactctatttgcgaggtgcagtcagacaaggcttcggtaactatcaccagccggtacgatggtgtcattaagaaactgtactacaacctggatgatatcgcctatgttggtaaacctttggtggacattgagaccgaggcccttaaagatagcgaggaggatgtggtggaaactcctgcagtgagtcatgatgagcacacgcaccaggagataaaaggcagaaaaacacttgctacgcccgcagtgcgcaggctagcaatggaaaacaacataaagttatcggaggtggttggcagcgggaaagacggcaggatacttaaggaagacatccttaattacttggagaagcagaccggggctatcctccccccatcccctaaagtcgagatcatgccacccccaccaaagcccaaagatatgaccgtgcctatccttgtgagcaagcccccagtctttaccggcaaagacaagactgaacctattaaaggattccagaaagctatggtaaagaccatgagcgccgcactgaagatacctcatttcggatactgtgacgagatagacctaacagagctggtcaagcttcgtgaagaactgaaaccaatcgccttcgcgagaggcattaaattaagctttatgccattttttctcaagtattatttcagctggaagtcctag

SEQ ID NO: 220762 - DNA, 1449 bp, synthetic construct
  misc_feature 1..1449: note = Description of Artificial Sequence: Synthetic coding sequence
  source 1..1449: mol_type = other DNA
atggctgcagtccggatgctgaggacctggagccgaaacgccggaaaactcatctgcgtaagatacttccagacttgcggaaacgtccacgtactcaagcccaactatgtgtgctttttcggttaccccagcttcaagtacagtcacccacaccactttctgaaaacaaccgctgcactacggggacaagtggtccagtttaaactgtctgacattggcgaggggatccgagaagtgacggtaaaagagtggtatgtcaaagaaggggacaccgtgagtcaattcgactcgatctgcgaagttcagtccgataaggcctccgtgactatcacgagccgatacgatggggtgatcaagaaactgtactataacctggatgacatcgcttatgtggggaagcctttggttgacattgaaacggaggcgctcaaggattcggaggaagacgtagtggaaactccagcagtttctcatgatgagcatacacaccaggaaatcaaaggacggaaaaccctggcaactcccgcagtgcggcgtctagccatggagaacaacataaagttgtcagaggttgtcggaagcggaaaggacggccgaatactgaaagaggacatcctgaactaccttgaaaagcaaacaggcgctatactgccgccaagcccaaaggtggagatcatgccccctccacctaaacccaaggatatgacagtgccaattttggtctcaaaaccacccgtattcaccggtaaggataagacagagccgattaaaggattccagaaagccatggtgaagaccatgagtgccgcattgaagattccccactttgggtactgtgacgagattgatctcacagagttagtcaagctccgcgaggaactcaaaccaattgcattcgctcgagggatcaaactcagcttcatgcccttctttctgaaagcggcttcgcttggtctcttgcagttcccgatacttaacgcaagcgtggatgaaaattgccagaacatcacctacaaggcaagccacaacattggtatcgcaatggatactgagcagggtctcatagtgccgaatgtgaaaaatgttcagatctgttcgatttttgacattgcaacagaacttaatcggctgcagaagttgggaagtgtaagccagctctccacaacagacctgacaggtggcacattcacactcagcaatatcgggtccatcggcggaacattcgccaaacccgtgattatgccccctgaggtggcaatcggagccctaggtagtattaaagccattcccaggtttaatcagaagggagaggtgtacaaagctcagataatgaacgtatcgtggagtgccgaccacagagtcatcgacggagccaccatgtcccgcttttctaatctgtggaagtcctatctcgagaacccagcctttatgttattggatttgaagtag

SEQ ID NO: 220763 - DNA, 906 bp, synthetic construct
  misc_feature 1..906: note = Description of Artificial Sequence: Synthetic coding sequence
  source 1..906: mol_type = other DNA
atggagaataacattaagttatccgaagtcgtcggtagcggcaaggacgggcgaatcctcaaggaggacatcttgaactatctcgagaaacagaccggggcaattctgccaccatctccgaaagtggagatcatgcccccaccccctaaacccaaggatatgacggtgccgattttagtctctaagccaccagtattcactggtaaggataagaccgagcctattaagggatttcagaaagccatggttaaaactatgagcgccgcattgaaaatcccacacttcggatattgcgatgagatcgatctcaccgagctcgtgaagttgcgggaggagctgaagcctatcgccttcgcacgcggtatcaaactgagtttcatgccatttttcctcaaagcagcctctctggggttgctgcagttcccaatcctgaatgcctccgttgacgaaaattgccaaaacatcacatacaaggccagccacaatataggcatcgctatggacacggagcaaggcctgatcgtgccaaatgtgaagaacgtccagatctgctctatcttcgacatcgccaccgagcttaatcgcctgcagaagctagggtccgtttcacaattaagcacaaccgacttgaccggtggcacctttacactgagcaacatcggaagtatcggaggtaccttcgccaagccagtaattatgccaccagaggttgcgatcggagctctgggctcaattaaagctatccccaggtttaaccaaaaaggcgaggtttacaaagcacagattatgaatgtcagctggagcgcagaccatcgggtgatagacggcgcaactatgtcacggttcagtaatctgtggaagtcttaccttgagaacccagcgttcatgctgctcgatctgaagtag

SEQ ID NO: 220764 - DNA, 5285 bp, synthetic construct
  misc_feature 1..5285: note = Description of Artificial Sequence: Synthetic coding sequence
  source 1..5285: mol_type = other DNA
atgcaatttcagctgactctcttcctgcatctgggctggctgtcctattccaaggctcaggacgactgcaatagaggggcatgccatcctaccaccggcgatctcctggtcggacgtaacactcagctgatggcctcctccacatgcgggctgagtcgcgcacaaaaatattgtatcctcagctatctggagggcgagcaaaaatgctttatctgtgacagcagatttccatacgacccgtatgaccagccaaattctcataccatagagaatgtcattgttagtttcgagcctgacagagaaaaaaaatggtggcaaagtgaaaacgggctggaccatgttagcatccgccttgacttggaggctttattccggttcagtcacttaatcctgacatttaagacttttaggccagcggcaatgctggtggagcgctcaactgattacggccacaattggaaggtgttcaagtattttgcgaaagactgcgcgacatcgtttcccaatattaccagcgggcaagcccagggagttggggatattgtatgcgactctaagtacagtgatatagaaccgtcaactggaggtgaggtggtactgaaggtgcttgacccctcttttgaaattgaaaacccttattcaccttatattcaggacctggtgactctgactaacctgaggatcaacttcacaaaactgcacacgttgggagatgccctgcttggacgtagacagaatgattctctcgacaagtattactatgcattatatgagatgattgttaggggctcatgtttttgcaatgggcatgccagcgaatgtaggcctatgcagaagatgcggggagacgtgttttcccccccaggcatggtgcacggccagtgtgtgtgtcaacacaataccgacggcccaaattgtgaaaggtgtaaggatttcttccaggatgcaccttggaggcctgctgcagatctgcaggacaatgcctgcagaagctgctcctgtaattcccattccagcaggtgccatttcgacatgacaacgtatctggcttctgggggattatctggcggtgtgtgcgaggattgtcagcacaacacggaagggcagcactgcgaccggtgtcgacctctgttttacagagatcctttgaaaaccatttccgacccatatgcatgcattccatgcgagtgtgacccagatggtacaatctctggaggaatctgtgttagccactctgatccggcactgggctctgtggccggacaatgcctctgcaaggagaatgttgagggagctaaatgcgaccagtgcaagccgaatcactacgggttgtctgctacagatcccctcggctgtcaaccatgcgactgtaatcctttaggatcgcttcccttcttgacatgtgacgttgataccggccagtgcctctgtctgtcttacgtgaccggggctcattgcgaggagtgcactgtgggctattggggactcgggaatcatcttcatgggtgctctccctgcgactgcgatattggcggtgcttactccaatgtgtgttcgcccaagaacggccaatgcgagtgtcgccctcacgttacaggtcggagttgcagcgaacctgctccaggctacttctttgccccactgaatttttacttgtatgaagctgaggaggccaccacgctgcaagggctagctccgctcgggtccgagacgtttggtcagtctccagctgtacacgtggttctgggggagccagtcccagggaacccagtgacctggaccgggcctgggtttgctcgggttctgcctggagccggtcttaggttcgcagtgaacaacatcccatttcccgtcgactttactatcgcaatccactacgagacacagtccgcggctgattggacagtacaaattgtagtgaatcctccgggaggtagcgagcactgtattccaaagaccctacagtccaaaccacagagtttcgccctccctgctgccacgcggattatgctgctgcccacccctatttgtttggagccggatgtgcaatattcaattgacgtatatttttcacagccgctgcagggggaatctcacgctcactcacatgtgctggtcgattctctgggcctcatccctcagattaactctctggagaacttttgcagtaagcaggacctggacgaataccagctgcataattgcgtcgagatcgcaagcgcaatgggccctcaagtgttacctggagcctgcgaacgcttaatcatctccatgagcgccaaactgcatgatggagccgtggcctgtaagtgtcatccacagggaagcgtgggctccagttgcagtagattaggtggtcaatgtcagtgtaagcccctggtcgtgggcagatgttgcgataggtgctcgaccggctcttatgatctaggtcaccacggttgtcatccttgtcattgccatccgcaggggagcaaggatactgtgtgtgaccaggtaacaggccagtgtccgtgtcatggagaggtgagtggcaggaggtgcgaccgctgtctcgccggttactttgggttcccatcgtgtcatccctgtccttgtaaccggtttgcagaactgtgtgacccagagacaggatcctgctttaactgtggaggctttaccactgggcgtaactgtgagcgttgtatcgatggatattacggtaatccttcctcggggcagccttgtagaccctgcctctgtccagatgatccttcttctaatcagtacttcgcacattcctgttatcagaacctgtggagtagcgatgtcatctgtaattgcctccagggatatactggcactcagtgtggtgagtgttctacaggattctatggcaatccccgtatcagtggcgctccatgccagccctgtgcgtgtaacaacaacatcgatgtgaccgatcccgaaagctgttccagggttactggcgaatgtctgaggtgcttgcacaatacccagggcgcaaactgtcagctgtgcaaacccggacactacggctcggccctgaaccagacctgccggaggtgcagctgccatgcttctggagtcagtccaatggagtgtccccctggcggtggagcctgcttgtgcgatcccgtgactggagcatgtccctgcctacccaatgtaacaggtctagcttgcgatcggtgcgccgacggctattggaaccttgtgcccggacgcggatgtcagtcatgcgattgcgatccgagaacgagccagagtagccactgcgaccagctgaccggccagtgtccgtgcaaattaggctacggaggaaaaaggtgtagcgagtgccaggagaattattacggagatccaccgggaaggtgtatcccctgtgactgtaatcgcgctggaacccaaaaacccatttgcgacccggatactggtatgtgccgttgcagagaaggggtgtccggtcaaaggtgtgaccggtgcgccagaggacactcccaggaatttcccacctgtctgcagtgtcatctctgttttgatcagtgggaccacacaattagcagcttaagtaaggctgtccagggtctcatgcggcttgcggctaacatggaagataaacgtgagactctgccagtgtgcgaagctgatttcaaagacctgcgagggaacgtcagtgaaattgaacgaatcttgaagcacccagtgttcccctccgggaaatttctcaaagtgaaagactatcatgattccgttcgccgtcaaatcatgcagctgaacgaacagcttaaagccgtctatgagtttcaggatttaaaagacactattgaacgggcaaagaacgaggctgatctgttgctggaagatcttcaggaagaaattgaccttcagtcctccgtgcttaatgctagcatcgctgactccagcgagaacatcaagaagtattaccacatatcttcttctgccgagaagaagatcaatgaaactagcagtaccattaacacctctgcgaatactagaaacgaccttttgactatcctggacaccctcacatcaaagggaaacctctcactggaaaggctaaagcagattaagatccctgacatacagatactaaacgagaaagtgtgcggcgaccctggtaacgtcccgtgtgtcccccttccgtgtggaggggctctgtgcacaggcagaaaaggacatcgaaaatgcagggggcctggttgtcatgggtccctcaccctgtcaactaacgcgctccaaaaagcgcaggaggccaaatctatcatccgcaacctggacaagcaggtgcgcggtctgaagaaccagattgagagcatttctgagcaggccgaagtcagtaaaaataacgctctgcaacttagagagaaacttggtaatatcaggaaccagtctgacagcgaggaggagaatattaaccttttcataaaaaaggtaaagaattttctactggaagagaacgttccacctgaagacatcgagaaagtcgctaatggggttctggatatacacctgccgattccctcccagaacctgaccgacgagcttgtgaaaattcagaagcatatgcagctgtgtgaagattatcgaacagacgagaaccggttaaacgaagaggccgacggtgcccagaagctcctagtgaaggccaaggccgctgaaaaagccgcaaatattctgttgaatctggacaagactctgaaccagctacaacaggcccagattacccaagggcgtgccaattcaaccataacgcaactgaccgctaatattactaaaatcaagaagaatgtgcttcaggccgagaaccagacaagggaaatgaaatccgaattggagcttgcaaagcagagaagtgggctggaggatggcttgtcattgttgcaaacgaagctacagcggcatcaggaccatgcagttaatgccaaggtccaggccgaaagcgcccagcaccaagccggtagtctggagaaggagtttgtagaactgaagaagcagtacgccatcctccaacgcaaaacatctactacggggctgactaaagaaaccttgggcaaagtcaagcagttgaaagatgctgccgaaaagctcgctggagacactgaagctaagatcagacggatcaccgatttagagcgaaaaatccaggacctgaatctcagccgtcaggctaaggctgatcagctccggatactcgaagatcaggtggtcgccataaaaaatgagatcgtggagcaggagaaaaagtacgcgcgttgctacagtta

SEQ ID NO: 220765 - DNA, 1530 bp, synthetic construct
  misc_feature 1..1530: note = Description of Artificial Sequence: Synthetic coding sequence
  source 1..1530: mol_type = other DNA
atgcagagctggagccgggtctattgctcactggccaagcgcggtcatttcaatcgtatctcacatggccttcaaggtctgtctgcagtccccttaagaacttatgctgaccaaccaatcgatgctgacgtgaccgtgatcggctcaggccctgggggatacgtagctgcgatcaaggccgctcagctcgggtttaaaacagtgtgcatcgaaaagaatgaaacactgggcggtacttgcctcaacgtggggtgtatcccctcaaaggcactcctgaacaacagtcactattaccacatggcacacggaaaggattttgcctcaaggggtatagagatgagtgaggttcgcctcaatctagataagatgatggagcaaaaaagcaccgctgtgaaggcccttaccggcggaatcgcccatcttttcaagcagaacaaggtagtccatgttaatggttatggtaaaattacaggcaaaaaccaggtgacagcaaccaaagccgacggaggcacccaggtgatcgataccaaaaacatcctgattgccacgggctctgaagtgacaccatttcctggtatcacaatcgacgaagacaccatagtttcgtcgaccggcgctctctctttgaaaaaagttccagagaaaatggttgttataggggcaggtgttataggggtcgagcttggtagtgtatggcagcgtttgggtgcagacgtaactgcagtagagtttctgggacacgtgggtggggtcgggattgatatggaaatttcaaagaacttccaaagaatcttgcagaaacagggctttaagtttaaactaaataccaaagtcaccggagctacaaagaagagcgacggtaaaattgacgtcagcatagaagcagctagcggcggaaaagcagaagtcatcacttgcgacgtactgctagtgtgcatagggagaagaccattcactaaaaacctagggctggaagagctggggattgaactggatcccagggggagaatcccagtgaacacccgtttccagactaaaatccccaatatctacgccatcggagacgtcgtggccggacctatgcttgcccacaaggccgaggacgaaggcatcatatgcgtggagggaatggccggtggcgctgtccatattgattataactgcgtcccttcagtcatatacacccatccagaagtggcttgggtgggaaaaagcgaggagcagttaaaggaggaaggtatcgaatacaaagtgggcaagttccccttcgctgctaattcaagggccaagacaaacgcagatactgatggcatggttaaaatcctgggacagaagagtacagatcgggtcctcggggcacatatcctgggcccaggcgctggcgagatggttaatgaggctgccttagccctcgaatacggcgcttcttgcgaagacatcgccagggtttgccacgcacaccctaccctgtctgaggcattcagagaggccaatcttgcagcttctttcggcaagagcataaatttctag

SEQ ID NO: 220766 - DNA, 1386 bp, synthetic construct
  misc_feature 1..1386: note = Description of Artificial Sequence: Synthetic coding sequence
  source 1..1386: mol_type = other DNA
atgcagagttggagcagggtttattgttctctggccaaaaggggccattttaaccgcatctcacacggacttcagggtctatctgccgtgcctctccggacttacgcagaccaacctattgatgccgacgttaccgtgataggcagcggacccggtggttacgttgccgcaattaaggccgctcaattaggatttaagacagtgtgcatagagaagaacgagactctgggcggaacttgccttaacgtgggctgcataccttcaaaggcgctgctgaataatagccattactatcatatggcacacgggaaggatttcgcttcgagaggcatcgagatgagtgaagtacgtcttaaccttgataaaatgatggaacagaagtccaccgctgtcaaggcccttaccggaggaattgctcacttatttaagcagaataaaatagacgaggacactatagtttcctcgaccggtgcactgtctctcaagaaggtcccagagaagatggttgtgataggagcgggtgttattggagttgagctgggcagcgtgtggcaacggttgggggctgacgtgaccgctgttgaattcctgggtcacgtggggggagtaggaatcgatatggaaatatccaagaactttcagcgcattctgcagaagcaggggttcaagttcaagctgaacaccaaagtcaccggagcaacaaagaagtctgacgggaagatagacgtgtcaatcgaagctgcgtccgggggaaaggcggaagtgattacatgtgatgtgctgctggtctgcattgggaggcgaccgtttacaaaaaatctgggcctggaggaactgggcatcgaactagatccaagaggacggatcccagttaacacaagatttcagactaagatcccaaacatctacgccataggggatgtggtcgccggtccaatgttagcacacaaagccgaagacgaagggattatctgtgttgagggcatggctggcggagccgtgcatatcgattataattgtgtcccctcagtcatctatactcacccagaagttgcctgggtgggaaaaagtgaagaacagctgaaagaggaagggatcgaatataaggttggcaagttcccttttgccgctaactcgagagcgaagacgaatgccgatactgatggcatggtgaagatccttggacagaagtcgactgaccgcgtgttaggggctcacatcctcggcccaggtgctggagaaatggtgaatgaggccgcactggcattggagtatggcgctagctgcgaagacatcgcccgagtatgtcatgctcaccctacactgtccgaagcctttcgcgaggcgaacttagctgccagttttggcaagagtattaatttctag

SEQ ID NO: 220767 - DNA, 1461 bp, synthetic construct
  misc_feature 1..1461: note = Description of Artificial Sequence: Synthetic coding sequence
  source 1..1461: mol_type = other DNA
atgcaaagctggtccagggtgtactgttctctggcaaagcggggacattttaatcgaatctctcacgggctccaaggcttgtctgccgtgccactccgtacttacgctgaccaacctatagacgctgatgtcacagtcattggaagcggacccggtggctacgtggcagcaattaaagccgcacaactgggctttaaggccctgctgaataattcgcattactaccacatggctcatggtaaagatttcgccagcaggggaattgagatgagcgaagttcgactgaatctggacaagatgatggagcagaaatccactgccgtgaaggcactgacgggcggtatcgcccacctcttcaagcaaaacaaggtggttcacgttaatggttatgggaagatcaccgggaagaaccaggtcaccgctacaaaggccgacgggggtacccaggtgattgataccaaaaacatcctgatcgctaccggatccgaagtgactcctttccctgggatcactatcgacgaggacacaattgtttcctctaccggagcgctcagcctgaaaaaggtgcctgaaaagatggtcgttatcggagctggtgtgatcggggtggagctgggctctgtttggcaacgccttggggcagacgtaaccgcggtggaattcctcgggcacgtgggaggagtgggaatcgatatggaaataagtaagaattttcaacggatcctccagaagcaaggtttcaagtttaaactgaacactaaggtgaccggcgcaaccaagaagtctgacggcaagattgacgtgtccatcgaggcagcctccggagggaaagcagaagtcattacatgcgatgtcctgctcgtatgcattggacgccgaccattcactaagaatctcgggctcgaggagctaggtatagagcttgatccacggggtcgtatcccggttaatacgaggtttcagacaaagatccccaacatttacgccatcggtgacgtggtggcgggacccatgctggctcataaggcagaggacgaaggtatcatctgtgtggaggggatggcaggcggagccgttcatatcgactacaattgcgtgccttctgtcatttacactcatcccgaagtagcctgggtgggaaagtccgaagaacaattaaaggaagagggcattgaatacaaagtcgggaagttcccttttgctgctaatagccgcgctaaaaccaatgctgacactgacggtatggttaaaatcctgggacagaaatcgaccgaccgagtgctgggggcacatatcctcgggccaggcgcaggtgagatggtcaacgaggccgcactggctttggagtacggggcatcatgcgaggacattgcacgggtgtgccacgcgcacccaactctgagtgaagcgttcagggaagcgaacttggccgcaagcttcggcaagtctatcaacttttag

SEQ ID NO: 220768 - DNA, 1233 bp, synthetic construct
  misc_feature 1..1233: note = Description of Artificial Sequence: Synthetic coding sequence
  source 1..1233: mol_type = other DNA
atggcccatggaaaggactttgcaagccgcggtattgagatgtctgaggtgcggttgaacttagataagatgatggaacaaaaatcaaccgcggtgaaagccctcaccggcggaatcgcgcatctgtttaagcagaacaaagtagtccacgtgaatggatacggcaagatcactggtaaaaatcaggtaaccgctaccaaggccgacggcggtacccaggttatcgatacaaaaaacatcctcattgccaccggctcagaagtgacaccttttccgggaattactattgatgaggacaccatagtttctagcacaggggcactcagcctgaaaaaggtccctgagaaaatggttgttattggtgctggggtgattggagtggaactggggtctgtctggcagagacttggagcagacgtgaccgcagtcgagtttcttggccatgttggaggcgtgggaatcgacatggagatcagtaagaacttccagaggattttacagaagcaggggttcaagttcaagctgaatacaaaagtaacaggagcgaccaagaagagcgatggaaagatcgatgtctccattgaggccgcttctgggggtaaggcagaggtgatcacatgtgacgtgctgctcgtctgcattggacgcaggcctttcacgaagaatctcggtctggaggagctgggcattgagttggatccgcgagggaggattcctgttaacacacgtttccagactaaaatacccaatatctacgcaataggagatgtcgtggcaggcccaatgctggcccacaaagctgaggatgagggaataatatgtgtagaaggaatggctggtggggctgtccacattgattacaactgtgtcccgtccgtgatctatacacaccctgaggttgcctgggtaggaaagagtgaggagcaattgaaggaggagggcatcgagtacaaggtcggaaaatttccctttgccgctaacagtcgggctaagacaaacgcagatacagatgggatggtgaagattttaggccaaaagtctaccgatcgtgtcctgggggcacacattctcggccctggagccggtgaaatggtcaatgaggcggctctggcgctagaatatggcgcatcctgcgaggatatcgcgagggtatgccacgcgcatccaacactcagcgaggcttttcgagaggcgaaccttgccgcaagctttggcaagagcattaatttctag

SEQ ID NO: 220769 - DNA, 1380 bp, synthetic construct
  misc_feature 1..1380: note = Description of Artificial Sequence: Synthetic coding sequence
  source 1..1380: mol_type = other DNA
atgctgatctacgtagccgctatcaaggccgcacagttgggcttcaagactgtctgcattgaaaagaatgaaaccctaggcggaacctgcctgaacgtcggatgtattcccagtaaagcattgctcaataacagccattattatcacatggcacacggcaaggactttgcaagcagagggatcgagatgagcgaggtgaggctgaatttggacaagatgatggaacagaagagcactgccgtgaaggccctcacaggtggcattgcccacttattcaagcagaataaggtggtacacgtgaatggttatggcaaaattaccggcaagaatcaggtgacagccacaaaagctgatgggggaacccaggtgattgacacgaagaatattctgatcgcaacggggtctgaggtaacccctttccctgggattacaattgatgaagacactatcgtgtcgtccacaggcgcactttccctaaaaaaagttcctgagaagatggtggttataggagccggagtgatcggagtggagctgggatccgtttggcagcgcctaggagctgacgtgaccgcagttgaatttctaggacatgtgggcggagtgggcattgacatggaaatctctaaaaacttccaaagaattctgcagaaacagggcttcaaattcaaattgaacacaaaagttaccggcgcaacaaagaaatcggacgggaagatcgatgtctccatcgaggcagcaagcggcggaaaggctgaagtgatcacatgcgatgtcctgctggtgtgcataggtcgcaggccttttaccaagaatctcgggcttgaagaactgggcatcgaattggacccaaggggccgaatccctgttaataccaggttccagaccaagatccctaatatctatgcgatcggagatgtggtggccggacccatgcttgcacataaggccgaagacgaaggaattatctgcgtagagggcatggccggaggcgctgtgcatatcgactacaactgtgtgccgtctgtgatctatacccatcccgaggtggcctgggtggggaaatcagaagagcaactcaaggaggaaggtattgagtacaaggtaggtaaattccctttcgctgctaattctcgggctaagacaaacgctgacacagatgggatggtgaagattctggggcaaaaatctacagacagggttctgggcgctcatattttggggcctggggcaggtgagatggtaaacgaggccgcattagccttagagtacggcgctagctgcgaggacattgcaagggtatgtcacgcgcacccaactctgagcgaagcttttagagaagctaacctagccgctagttttggcaagtcaataaacttttag

SEQ ID NO: 220770 - DNA, 1944 bp, synthetic construct
  misc_feature 1..1944: note = Description of Artificial Sequence: Synthetic coding sequence
  source 1..1944: mol_type = other DNA
atgtggcgggtatgcgcccgacgagctcagaacgttgcaccctgggctgggctggaagcaaggtggacagccctccaggaggtccctgggacgcccagggtcacaagtcgctccgggcctgcccctgctcgcagaaattccgtgacaacggggtacggaggcgtgagggctctctgcggatggactccgtctagcggagccacccccaggaaccgactgcttcttcagctccttgggtctcctggcaggaggtactattccctgcccccacatcaaaaggttcctctgccctctctcagcccgacaatgcaagccggaactatcgcccgatgggagaaaaaggagggtgacaagattaatgaaggcgatctgattgcggaggttgagaccgataaggccacggtcggattcgagtcactcgaggagtgttatatggccaaaattctcgtggcggagggcactagagatgtgccaattggagctatcatttgcattacggtggggaagccagaggacattgaggccttcaaaaattacactctcgactcctctgccgcacctacaccacaggccgcacccgctcctaccccagctgctaccgcctcgcctccaaccccatccgcccaggcgcctggcagctcatatccaccccacatgcaggtgctgttaccggctctgtctccaacaatgacgatgggtaccgtccaacgctgggagaagaaggtcggcgagaagttgtccgagggcgaccttttggctgagattgaaaccgataaggcaaccatcggcttcgaggtccaggaagaaggatacctcgctaagatcttggtacctgaggggaccagagacgtacctctgggcacccctttatgcataattgtggagaaagaagcagatatttccgcctttgccgattataggcccactgaggtcacagacctcaaacctcaggtccctccccctacaccccctcctgtcgctgctgttcctcccacccctcagcccctggccccaactccttctgccccttgtccggctacccctgccggacctaagggcagagtgtttgtgtccccactggccaagaagttagccgtggagaagggcatagatctcacacaggtgaaaggaaccggcccagatgggaggataacaaagaaggatatcgactcattcgttcctagcaaggtggctcccgcacctgccgcagtagttccgccaaccggacccggtatggccccagtgccaaccggtgttttcaccgacatcccaatctccaacatcaggagggttattgcacagcgcttaatgcagagtaagcagacaattccccattattatttgtctatcgacgtgaacatgggagaggtcttgctagtgcggaaagagctcaacaaaatcttggaaggacgcagtaagattagcgttaacgatttcatcatcaaggcttccgctttggcttgcctgaaggttcccgaagcaaactcctcttggatggataccgtcattcgacagaaccacgtggtggacgtctctgttgctgtatctacccccgcagggctgataacgcccatcgtgttcaacgctcacatcaagggggtggagaccatcgcaaatgatgtggtgagcctcgctactaaggcccgagaggggaagcttcaaccacacgagttccagggaggcactttcaccatttctaatctcgggatgtttggcattaaaaactttagcgctataatcaaccccccacaagcctgtattctggccatcggcgcatccgaggataagctagtccctgccgacaacgaaaagggctttgacgtggcttcaatgatgtctgtcactttgtcctgtgaccaccgcgtggtcgatggggctgtgggcgcacaatggctggctgaattcaggaagtaccttgagaagcctatcaccatgctcttatag

SEQ ID NO: 220771 - DNA, 678 bp, synthetic construct
  misc_feature 1..678: note = Description of Artificial Sequence: Synthetic coding sequence
  source 1..678: mol_type = other DNA
atgtggagagtttgcgccaggcgagctcaaaatgttgccccatgggctgggctggaagcccgatggactgccctgcaggaagttcccggtaccccaagggtgacctcacgctctggtcctgcacccgctcgacgcaactccgtgacaaccggatatgggggagttcgggctctctgcggctggactccatcgtctggagccaccccgcgaaaccgcctgctcctgcaactccttggttcccctggcagacgatactattcactgccccctcaccagaaagtaccactgcctagcctttcccctaccatgcaagccggaacaattgccagatgggagaaaaaggagggggataagatcaatgagggggacctgatagctgaggtcgagaccgacaaggcaactgtaggcaaaccagaagacatagaggcttttaaaaactatactttggactcatctgcggctccgaccccccaggccgctcccgctcctacccccgctgctacagcaagtcctccaaccccaagcgcccaggcgcctggttccagctaccccccacacatgcaggtccttctgccagccctgagtcctaccatgaccatgggtaccgtccaaagatgggagaaaaaggttggtgagaaactgagtgagggcgacctgttggctgagatgtctttatag

SEQ ID NO: 220772 - DNA, 1257 bp, synthetic construct
  misc_feature 1..1257: note = Description of Artificial Sequence: Synthetic coding sequence
  source 1..1257: mol_type = other DNA
atgcaggcgggaaccatagcccgttgggagaaaaaagagggggataaaattaacgagggcgatttactggcagagatcgaaacagataaggctacaattgggttcgaagtgcaggaagaagggtatctggccaagatccttgtgcccgagggcacacgagacgtgccacttgggacacctctctgtatcatcgtggaaaaggaggccgacatatccgcttttgcagattacaggcccactgaggttacggatcttaagcctcaggttccacctccaacccctccaccagtcgccgctgtgccacccacacctcagcccctggctcctacgccatcagccccttgccctgcaacccctgctgggccaaaaggaagagtcttcgtgtctcccctcgcaaaaaaactcgcggtagaaaagggcattgatcttacgcaagtgaaaggcaccggccctgatggtcgtattaccaaaaaggacatagacagcttcgttccttcaaaagttgctccagcaccagccgctgtggtcccccctactggacctggtatggccccagtgcccactggtgtttttaccgacatcccaatcagcaacataaggagagtgatagctcagaggctcatgcagtccaagcagactatccctcactactatctaagtatcgacgtaaatatgggcgaggtcctgctggtgaggaaggagcttaacaagatcctggaaggaaggtccaaaatttcagtgaacgactttattatcaaggctagcgcccttgcctgtctgaaggtcccagaggccaattcctcctggatggacactgtgattaggcaaaatcatgtcgtggacgtgagtgtcgccgtgagtacgccagcaggtcttattacacccattgtgttcaatgcccacattaagggggtggagactatcgctaatgacgtagtcagccttgccacgaaggctagagaaggcaaacttcagccacacgaattccagggaggaacattcacaatctccaatctggggatgttcgggatcaagaatttcagtgcaattattaacccccctcaggcctgcattctcgccataggcgctagcgaggacaaactcgtgcctgctgacaacgagaaggggttcgacgtggccagcatgatgagcgtaacactgtcctgtgatcacagggtagtcgatggcgcagtgggagcccagtggctggccgaatttcgcaagtatctggagaaacccatcacaatgctgctgtag

SEQ ID NO: 220773 - DNA, 1104 bp, synthetic construct
  misc_feature 1..1104: note = Description of Artificial Sequence: Synthetic coding sequence
  source 1..1104: mol_type = other DNA
atgacatggctgcagtcaaagccacaaagactccaaaacctctctcagagggaaatgagcggaggccgaaagacatccgttcaggtaccaagtccagctaacggcgtaatcgaagcgctgctggtgccagacggcggaaaggtagaaggcggaacccccctgtttactctgaggaaaaccggagccgctccagcaaaggcgaagcccgcagaagcccctgcagccgcagcgccaaaggctgaacccacagctgccgcagtgccccctccagcagcacctatccccacccaaatgccccctgtcccgagccccagtcagcccccatctggaaagcccgtgagcgccgtgaaacccaccgtagcaccccctctcgctgagcctggggctggcaagggcttgcgttccgagcacagggagaagatgaaccgcatgaggcagcggattgcccagcgtcttaaggaggcccagaacacctgcgcaatgctcaccacgtttaacgagattgacatgagtaatattcaagaaatgcgagcgcgacacaaggaagccttcctgaaaaagcacaatctcaagctcggctttatgagcgcattcgtgaaggcgagtgcatttgctttacaagaacagcctgtcgtgaatgcggtgatagacgatactacaaaagaagtcgtttatagggactacattgacatcagcgtggcggtcgccactcctaggggtctggtggtgcctgttatccggaatgtggaggctatgaacttcgccgacatagaacggaccattaccgagcttggcgagaaggcgaggaagaacgaactggcaatagaagatatggatggcggtacttttacaattagtaacggaggagttttcgggtccctcttcgggactcctataatcaacccccctcaaagcgccatactgggcatgcacgggatcttcgaccggcctgtagccattggcggaaaggtcgaggtgcgcccaatgatgtacgtggctttgacttatgaccaccgccttatcgacggcagggaagccgtgacttttctgagaaagatcaaagccgctgtcgaagatcccagagtgctgctgttggatctatag

SEQ ID NO: 220774 - DNA, 1362 bp, synthetic construct
  misc_feature 1..1362: note = Description of Artificial Sequence: Synthetic coding sequence
  source 1..1362: mol_type = other DNA
atgctgagtcgctcacggtgcgtctctagagccttctcacgcagtctgagtgccttccagaagggcaactgccctctgggtagacgttcactgccaggggtgtcactctgtcaggggcctgggtatcctaacagtcgtaaggtggtgatcaacaacagtgtattctctgtgaggttctttcggacaaccgcagtgtgtaaggatgacctggtgacagttaagacgcccgcatttgccgaatcagtcactgaaggcgacgttcgatgggaaaaagctgtaggtgacacagtcgctgaggacgaggtggtatgcgagattgaaaccgataagacctcagtacaggtacctagtcctgccaatggtgttattgaggctctcctggttcccgatggcggaaaggtggaaggcggaacaccgctgtttaccctaagaaagaccggagccgctcctgccaaggcaaagcccgcagaggccccagcggcagcagcaccgaaagcagagcccaccgcggctgcggtgcctcctccagctgcccctatccctacacagatgcctcctgtaccttctccgtctcagcctcctagcggcaagcctgtgtctgcagtgaagcccaccgtcgcaccaccactcgccgaacccggtgcagggaaaggcctgagaagcgagcaccgcgaaaaaatgaataggatgcggcagcgcattgcgcagagactaaaggaggcccagaatacctgtgcaatgctgacgactttcaacgagattgacatgtccaacatacaggagatgagggcaagacataaagaggcgtttctgaagaaacataacctgaaattaggtttcatgagtgctttcgttaaagcctccgccttcgccctccaagaacaacccgttgtgaacgcagttatcgatgatacaaccaaggaagtcgtctatagggactatatcgatatttcagtggctgtcgcaacccccagaggactggtggtgcccgtgataaggaacgttgaagcaatgaatttcgccgatattgagagaacaatcactgaactcggtgaaaaagcgcgaaagaacgagctggccatagaagacatggatggagggacctttaccatctctaacggcggagtgttcggaagcctgttcggcactcccatcataaaccctccccagagcgcgatcctcggcatgcatgggattttcgatagacctgtggccattggcggaaaggttgaagtgcgcccaatgatgtatgttgctctcacttacgatcacagattaattgacggacgagaggcagttacctttctgaggaagatcaaggctgcagtggaggaccccagggtgctgctgctcgatctgtag

SEQ ID NO: 220775 - DNA, 282 bp, synthetic construct
  misc_feature 1..282: note = Description of Artificial Sequence: Synthetic coding sequence
  source 1..282: mol_type = other DNA
atggacagacttcagacagcgttgcttgtggtgttggtccttctggccgtggcattgcaagccactgaggctggcccttatggcgcaaacatggaagacagtgtgtgttgtcgggattatgtccgctaccggctgccgctgcgtgtggtgaaacatttttactggacaagtgattcttgtcctagacctggggtcgtacttctcacattcagggacaaggaaatctgtgcagatccacgagtgccctgggtgaaaatgatcctcaacaaattgtcccagtag

SEQ ID NO: 220776 - DNA, 1560 bp, synthetic construct
  misc_feature 1..1560: note = Description of Artificial Sequence: Synthetic coding sequence
  source 1..1560: mol_type = other DNA
atggccgcaccgtcccggctactcatacgcggtggcagggttgtgaacgacgacttctccgaagtggctgatgtgttggtggaggatggggtcgtgcgcgctctggggcacgatctgttgcctcccggaggggcacctgcagggctccgggttctcgatgctgccggaaaactggtgttgcccggagggatcgatacccatacacacatgcaattccctttcatgggatcaagatccatagatgacttccatcagggaaccaaagccgctctgtccggtggcacaacaatgatcattgattttgccatacctcagaagggaggatctttgattgaggcgttcgagacatggcgctcttgggctgatccgaaagtgtgttgtgactatagcctgcacgtggcggtgacatggtggtccgaccaggtcaaagaggagatgaaaattctggtccaggacaaaggtgtcaattcatttaagatgtttatggcttataaagatctttatatggtcaccgacctggaactgtacgaggctttctctagatgcaaagagatcggcgcaatcgcccaagtgcatgctgagaacggcgacttgatagcagagggtgcgaaaaagatgctcgccctggggatcactggtcccgaaggccacgagctttgtcggccagaggccgtggaagccgaggccacactgagagcaataaccatcgcttccgctgttaattgcccgctctatatagtgcatgtcatgagcaaatcagcagccaaggtaattgccgatgccagacgcgatggaaaagtggtctacggcgagcctatcgccgcttcgcttggaacagatggaactcactattggaataaggagtggcatcatgcagcacaccatgtgatggggccacctctgcgtcccgaccctagcacccctgatttcctgatgaatttgctggcaaacgacgatttaacaacaactggaactgataactgcaccttcaacacttgtcagaaagctttagggaaagacgactttaccaagatccccaatggtgtgaacggagtggaggatcgcatgagcgtcatttgggagaaaggggtgcactcaggaaagatggacgagaatcggttcgtggctgtgacctccaccaatgccgcaaagatttttaacctgtaccccaggaaggggagaatcgccgtgggatcggatgcagacattgtcatttgggaccccaaggggactagaaccatctcggccaagacgcatcaccaagccgtcaattttaacattttcgaggggatggtctgccacggagttcccctggtaactataagtcgcggaaaggtcgtttacgaggcaggtgtattttcagtcacagcaggcgatggcaaatttattccaagaaagcctttcgcagaatatatttacaaacgcatcaaacagcgggatcggacatgtaccccaacccccgtggaacgcgcaccatacaaaggcgaagttgccacactgaagtcgcgcgtgaccaaagaggacgccactgcaggtacgcgcaaacaggcccatccttag

SEQ ID NO: 220777 - DNA, 1719 bp, synthetic construct
  misc_feature 1..1719: note = Description of Artificial Sequence: Synthetic coding sequence
  source 1..1719: mol_type = other DNA
atgtcataccagggtaaaaaaaatataccacggatcacaagcgataggttgctgatcaagggtgggaagatagtgaatgacgatcagtccttttatgccgacatatatatggaagatgggttaatcaaacaaatcggcgagaatcttatcgtgcccggaggggtgaagacaatcgaagcccattcgagaatggtaatcccaggtggtatagacgtccacacccggtttcagatgccagatcaggggatgaccagcgctgacgacttttttcaaggaacaaaagctgcacttgccggagggacgaccatgatcatcgaccatgtggtgccagaacccggaacttccttgctggccgcattcgatcaatggagggaatgggccgactcgaagagttgttgcgactactcgctccacgtagatatctccgagtggcacaaaggcatacaggaagagatggaagctttagtgaaggaccatggcgtcaatagcttcctggtgtacatggccttcaaggaccgctttcagttgaccgactgtcaaatctacgaagttctgtctgtgatccgtgatattggagctatcgcacaggtccacgccgaaaacggagacatcatcgccgaggaacagcagcgcatcctcgacctgggcattactggtcctgaaggccacgtattgtccagaccagaggaggtggaggcagaagctgtaaaccgggcaatcaccatcgccaatcaaacaaactgcccactgtatataacaaaggtgatgagtaagtcgtcggccgaggttattgcccaagcccgaaagaagggaaccgttgtttacggtgagcctattactgctagcctggggactgacggcagccactattggtccaagaactgggccaaggccgcagcctttgtaacctctccaccccttagtcctgaccccaccacacctgactttctgaattcactgctctcttgcggtgacttgcaagtgacaggatctgcacactgcacttttaatactgcccagaaggccgtgggcaaggataatttcaccttaattcccgaaggaactaacggtaccgaagaaagaatgtctgtaatttgggacaaggccgtagtgacggggaagatggatgagaatcagtttgtggccgtcacgagcaccaacgcagccaaagtgttcaatctctaccctagaaagggaaggatcgctgtcggatctgacgctgacttggttatttgggatccagattccgttaaaactatatccgccaaaacacataactcctcactcgaatacaatatttttgaggggatggaatgtaggggatccccactcgtcgtcatttctcagggtaagatagtgctagaggatggcacccttcatgtcactgagggctccggtcggtacatccccaggaaaccattcccagacttcgtttacaagagaattaaggcgaggtctaggctcgccgagctgaggggtgtccccagaggcctgtacgacggccctgtgtgcgaagtcagcgtcacccccaagaccgtcaccccggctagctctgcgaagacctctcctgcaaaacagcaggcaccacctgtacgcaatctgcaccagtccggattttcactctccggcgctcagatcgacgacaacatcccgcgtagaaccacgcaacgtatcgtcgcaccccctggcggaagggccaatatcacctcattaggatag

SEQ ID NO: 220778 - DNA, 1611 bp, synthetic construct
  misc_feature 1..1611: note = Description of Artificial Sequence: Synthetic coding sequence
  source 1..1611: mol_type = other DNA
atggaggatggtctgataaagcagataggggaaaacttgatcgtgcctggaggcgttaagaccatcgaggctcactctcgcatggtcatccccggaggcattgacgttcacacccggtttcagatgccagaccagggcatgacctctgccgacgattttttccagggtactaaagccgctctcgccggtggcactacgatgatcatcgatcacgtggtcccggagcctggtacctcgctcttagcggcatttgaccagtggagagagtgggcagactccaagtcctgttgtgactattctctccacgttgacatttcagagtggcacaaaggcatccaggaggaaatggaagctctggtgaaggatcacggcgtaaactcgttcctcgtgtacatggccttcaaggaccggttccagctgacggactgccagatttacgaagtcctcagcgtgatcagggacatcggtgcgattgcccaggtgcacgctgagaatggagatatcattgcggaggagcagcagcgcattctggatttaggaattacggggcctgaaggacatgtgttgtcccgccctgaggaagtggaggccgaagcagtgaatagagccataaccatagccaaccaaacaaattgcccactctatataacaaaagtcatgtcgaaaagttccgccgaagtcattgctcaggcacgaaagaaggggacggtggtttatggcgagcccataactgcgagcctggggaccgacggttcccactattggtcaaaaaactgggcaaaagccgcagcctttgttacttccccccctttaagccctgacccgaccactcctgacttcctcaatagtctcctgagctgcggagacctccaggttaccggcagtgctcactgcacctttaacacagcgcagaaggccgttggcaaggacaactttaccttaattcctgagggaacaaacggcacggaggaacggatgtccgtgatctgggataaagctgtggtgaccggaaagatggatgaaaaccaatttgttgctgtcacaagcactaacgctgcaaaagtgtttaacctgtatccaagaaagggacgcatcgctgtaggtagcgatgccgacctggtcatttgggatcctgatagcgtgaaaaccatttctgccaagacacataactcttcccttgaatataatattttcgagggtatggagtgccgcggttctccgttggtcgtgatctcacaagggaagattgtgctggaggacgggaccctgcacgtaaccgagggttccggcaggtacattccgaggaagccttttcccgacttcgtttacaagaggattaaagccaggagtcggctggccgaactgagaggggtgccaaggggcctctacgacggccctgtctgtgaggtgtctgtgactccaaagaccgtgacaccagcttccagcgctaagacatctcctgccaagcagcaggcaccacccgtgcgtaatcttcaccagtccggcttcagtctgagtggcgcacagatcgatgataacataccgaggcgaaccacgcagaggatcgtggctcctcccggaggcagagccaatatcacatcactggggtag

SEQ ID NO: 220779 - DNA, 1719 bp, synthetic construct
  misc_feature 1..1719: note = Description of Artificial Sequence: Synthetic coding sequence
  source 1..1719: mol_type = other DNA
atgtcataccagggtaagaagaacattccacgcataacctcggaccgcctccttatcaaaggcggtaaaatcgtgaatgacgatcagtccttctatgccgatatctatatggaggacgggctgatcaaacagattggtgagaatctaattgtgccaggcggtgtcaaaactatcgaggcccacagtcgcatggtcatcccagggggtatagatgtccacacccgattccagatgcccgatcagggcatgacatctgctgacgattttttccagggaaccaaggccgcactggccggtggcaccacaatgattattgaccacgtcgtgcccgagccaggcaccagccttctggcggcatttgaccagtggcgggaatgggccgattcaaagtcctgttgtgattatagtctccatgtcgatatatcagagtggcacaagggcatccaggaggaaatggaggctctggtgaaagaccacggtgtgaatagttttctggtatacatggcttttaaggacaggtttcagcttactgactgtcagatctatgaagtgctgtccgtgatcagggacataggggcaattgcccaggtgcacgcagaaaatggggatataatcgcggaggaacagcaaaggatcctcgatttagggatcaccggcccagaaggccatgtcctaagtcgacctgaggaagtggaggcagaggcagtgaaccgcgcaatcaccatcgcgaatcagacgaattgcccactgtacattaccaaggtgatgtccaaatcctcggctgaggtcattgcccaggccaggaaaaaggggacagtggtttacggcgaaccaatcactgcatccttgggaaccgatggcagccactattggagcaaaaactgggcaaaggcagctgccttcgtgacctcaccacctctgtcaccagatccgaccacccccgacttcctgaactcattgctctcatgcggcgatttacaggttaccgggagcgcacattgcactttcaataccgcacagaaggccgtgggcaaggataactttactcttattcctgagggtacgaatggaaccgaggaacgaatgtccgtcatctgggacaaggctgtcgtcaccggaaaaatggacgaaaaccaattcgtggcagtgacatccacaaacgctgcaaaggtgtttaacctctatccgcgaaagggccgtattgctgtcggcagtgatgccgatctagtgatctgggatcccgacagtgtcaaaacaatcagtgctaagacccacaactccagccttgagtacaacattttcgaggggatggagtgtcgtggctcacccctggtcgttataagccaggggaagattgtgttggaggatggcactttacacgtgactgaagggtccggaaggtatatacccaggaaacctttcccggattttgtgtacaagcgtataaaggctaggagtcggctggctgaactgcgcggagtgccccgtgggttgtacgacggccctgtctgcgaggtctccgtgactcccaagaccgtcactcctgcctcctcagctaagactagtccggctaagcaacaagcccctcctgtccgcaacttgcatcagtctggtttctctctgagtggcgcacaaatcgatgacaatattccacgcaggactacgcagagaatcgttgcacccccaggaggtcgggctaacatcaccagcctgggctag

SEQ ID NO: 220780 - DNA, 1611 bp, synthetic construct
  misc_feature 1..1611: note = Description of Artificial Sequence: Synthetic coding sequence
  source 1..1611: mol_type = other DNA
atggaggatggcttgattaaacagatcggcgaaaacctgatagtgccagggggtgtcaagactatcgaagcccattcccggatggtgattccagggggtattgacgttcacacacggtttcagatgccagatcagggaatgacctctgcagatgattttttccaggggacaaaggccgcactggctggagggaccactatgatcattgaccatgtggtgcccgagcctgggaccagcctactggcagcattcgatcagtggcgggagtgggccgactctaaatcctgttgcgactattccttgcatgtggacatttccgagtggcacaagggtatacaggaggaaatggaggctctggttaaagaccatggtgtgaattcattcctggtttatatggcattcaaggacagattccagctgactgattgtcagatttacgaggtgttgtccgtgattcgcgacataggggcaatcgcccaggtgcacgctgagaatggagatatcatcgctgaagagcaacagcggatcctggacctaggcatcactggacctgaaggtcatgtcttgagccggccagaggaggtggaagccgaagcagtgaatagggccatcaccatcgccaaccaaacaaattgcccactgtatataacaaaagttatgtccaaatcctccgctgaggtcatcgcacaagccagaaagaaagggactgtggtttacggagagccgatcactgcttcactcggaacggacggttcacattactggtcaaaaaattgggctaaggcagctgcctttgtgacttctcccccattgagtcctgatcctactacgccagacttcctgaactctcttcttagttgtggagacctacaggtgacaggcagtgcccactgcacctttaataccgcacagaaggccgtcgggaaggacaactttactctgattcccgagggtaccaacggcaccgaggagcggatgagcgtcatatgggacaaagctgtggtgaccgggaagatggatgagaaccagttcgtagcagtcacaagtaccaacgccgcaaaagtttttaacctataccctcggaaaggaagaatcgcagtcggctccgacgcagacctagttatctgggatcccgattcggttaagactatatccgccaagacccataatagcagcctggaatacaacatttttgaagggatggagtgcagggggtctcctctggtcgtcatttcacagggaaaaattgtcctagaagacggcacattacacgtcactgagggatctggacggtacatccctcgtaagccatttcccgatttcgtgtacaagcgcattaaggctaggtcccgactggctgaactgaggggtgttccgaggggcctctatgatgggcctgtatgtgaagttagcgtgacacctaaaaccgtcactcccgcttctagtgcaaagaccagcccggctaagcaacaggcaccgccagtgcgtaatcttcaccagtcgggattcagcctgagcggggctcaaatagatgacaacattccacggcgtaccactcagcggatcgtggctccccctggcggacgggcaaatataacaagccttgggtag

SEQ ID NO: 220781 - DNA, 597 bp, synthetic construct
  misc_feature 1..597: note = Description of Artificial Sequence: Synthetic coding sequence
  source 1..597: mol_type = other DNA
atgagcgtaatctgggacaaggccgtcgttacagggaaaatggatgagaaccagttcgtggcggtgacttctaccaacgctgccaaggttttcaatctatacccaaggaaaggccgaattgccgtagggtctgacgccgatctggtgatttgggatcctgatagtgtcaagactatttttgaggggatggagtgtcgtggatcacccctggtcgtaatctcgcaggggaagattgtgctcgaggatgggacgttacacgtaacggaaggcagcggccgatatatccccaggaagccctttccagactttgtgtacaagagaatcaaagccaggtctagacttgccgagcttcggggagttcccaggggactgtatgatggccctgtctgcgaagtgtccgtaaccccaaaaacggtgacaccagcttcaagcgcaaagacctcccctgccaagcagcaagcccctcctgtgcgaaacctccatcaatcagggttcagcttgtccggagcacaaattgacgataacatacctagacgaacaacacagaggatagtcgcacctcccggaggccgagcgaatatcacctcattaggatag

SEQ ID NO: 220782 - DNA, 2055 bp, synthetic construct
  misc_feature 1..2055: note = Description of Artificial Sequence: Synthetic coding sequence
  source 1..2055: mol_type = other DNA
atggcttccgggcgacggggatgggactcctcacacgaagatgatctccctgtgtatctggcccgtcccggtacaactgatcaggtgcctagacagaaatatggaggaatgttttgtaatgtggaaggagccttcgagtccaagacgctggattttgacgccctatctgtgggccaaagaggtgccaaaaccccacggagcggacaaggttctgatagagggtcagggtcgcgcccaggtattgagggggatactccgagaaggggtcagggacgcgaagagagtcgtgagcccgctcccgctagccccgctcctgctggtgtggagatcaggtctgctaccggaaaagaggtcctccagaatctgggtcctaaagacaaaagcgaccggctgctgatcaagggaggacgaattgttaacgacgatcaatccttttatgcggacatatacatggaggatggactgataaagcagataggcgacaatctgatcgtgccagggggagtgaaaacaatcgaggctaacggaaagatggtgatccccggaggaattgacgtccatacccatttccagatgccttataagggcatgactacggtggacgactttttccaggggaccaaggccgcactggcagggggaaccactatgattatagatcacgtggtgccagaaccagaatcctccctcactgaggcatatgagaaatggagggagtgggcagatgggaaatcatgttgtgattatgcactgcatgtagatataactcactggaatgatagcgtgaaacaggaagtacaaaacctgatcaaagataagggtgtcaacagctttatggtgtacatggcttacaaggatctgtaccaggtcagtaacacagaactgtatgaaatcttcacctgcctaggtgagcttggcgcaatcgctcaggtgcatgctgaaaatggagacataattgcgcaagagcagaccaggatgctggagatgggaataacaggcccagaaggccatgtcttatcgcgcccagaagagctcgaggctgaggcagtcttccgagctatcaccattgcttcccagaccaactgtcctttatatgtaaccaaggtgatgtcaaagtcagccgctgacctgatcagccaggcgagaaaaaaggggaacgtagtctttggcgagcccatcactgccagcttgggaattgacgggacacactactggtccaagaactgggccaaggccgctgcgtttgtgacaagccctccgctgtcacccgaccccacaactccagactatatcaacagcctgctggccagcggggatcttcaactgagcggttccgcacattgcaccttcagtacagcacaaaaggcaatcggaaaggacaattttaccgcgattcctgagggtacgaacggggttgaggaacgcatgtccgtaatctgggataaggccgtcgcaaccgggaaaatggatgagaaccaatttgttgctgtcacctcgacgaatgccgctaagatttttaatctttatccacgaaaaggccgtattagcgtggggtccgactccgatcttgtcatttgggatccagacgccgttaagatagtctctgcaaagaaccatcagagcgctgccgaatacaatatcttcgagggtatggaactgcgaggggcaccgttagttgtcatttgccaagggaaaattatgctggaggacggcaatctacacgttactcagggggctgggagattcataccctgctcccctttttctgattacgtatataaaaggattaaggctaggcggaagatggctgacctccacgccgttccaaggggaatgtatgacggccctgtttttgatctgacgacaactcctaaggggggtacccccgctggttctgcaagggggtctcccacacgaccaaatccacccgtacggaatctgcaccagtcaggattctccctgagcggcacccaggttgacgaaggagtcagatctgcaagcaagagaatcgtcgcccctcccggaggcaggagcaatattacctccttatcctag

SEQ ID NO: 220783 - DNA, 1713 bp, synthetic construct
  misc_feature 1..1713: note = Description of Artificial Sequence: Synthetic coding sequence
  source 1..1713: mol_type = other DNA
atgtcatatcagggtaaaaagaacatccctcgaattaccagtgacaggctgctgattaaaggtggcaggatcgtgaacgacgatcagagtttttacgcggatatttacatggaggacggtctgattaagcaaattggggataatctcattgtgcctggcggagtaaaaacaatcgaggctaacggcaagatggtgattcctgggggaattgatgttcatacccattttcaaatgccctacaagggcatgactactgtggatgatttttttcagggcacgaaggccgcactggcaggaggcaccaccatgataatcgatcacgtcgttccggagcctgaaagcagtctgacagaggcctatgaaaaatggagggagtgggctgacgggaaatcatgctgtgactacgcccttcacgtcgacattactcattggaatgatagcgtgaagcaggaagtccagaatcttatcaaggacaaaggcgtcaattcatttatggtgtacatggcgtataaagacctctaccaagtatccaacacagagctatacgagatttttacatgtcttggagagttaggtgccattgcccaagttcatgccgaaaacggagatattattgcccaggagcagaccaggatgctggagatggggatcacaggcccagagggtcacgtgctgtctcgtccagaagaactcgaggccgaggccgtgttccgcgctatcacaatcgctagccagactaattgtcctctctacgtcaccaaggttatgagcaaaagtgcagccgatttgatctctcaggctcggaagaaaggtaacgtagtgtttggcgagccaatcaccgcttcactgggaattgatggcactcactattggagtaaaaattgggccaaagcggcagcgttcgttactagtccccctttgtcccctgaccctacgactcccgattacatcaactcactgctggcgtccggcgacctgcagctgagcgggagcgcccattgtaccttttccacagcccagaaggcaattgggaaggataactttactgccattccagaggggaccaatggcgtggaggagcggatgagcgtgatctgggacaaggctgtggcaactgggaagatggacgagaaccaatttgtggccgttacgagtaccaatgccgcaaagatcttcaacctgtacccccgaaaggggcgaatctccgtggggtcagacagcgacctggtcatctgggaccctgacgctgtgaaaatcgtctcagctaagaaccaccagtctgcagcggagtataacatctttgaggggatggagctgcgcggtgcacccttggtggtcatatgtcagggaaagataatgttggaagacggcaaccttcacgtcacccagggtgcgggacgattcattccttgctcccccttctcagactacgtgtacaaacgcatcaaggctaggcgtaaaatggctgatttacacgcggtgccacggggaatgtatgatggaccagtctttgacctcactaccacaccaaaaggcggaacccccgctggttcagccaggggcagccccactaggccaaatccccctgtcaggaacctgcatcagtccggattctcgctgtcaggtacacaggttgatgagggagtcaggtctgcatctaagcgaatcgtggcgcctcccggtggaaggagcaatatcacctccctcagttag

SEQ ID NO: 220784 - DNA, 279 bp, synthetic construct
  misc_feature 1..279: note = Description of Artificial Sequence: Synthetic coding sequence
  source 1..279: mol_type = other DNA
atgagctatcagggcaagaagaacatacctcgcataacttctgatcggctgttgattaagggcggtcgcatcgttaatgatgatcagtctttttacgccgacatatacatggaagacggcctgattaagcagattggcgacaatctaattgttccgggtggagtgaagacgattgaagcaaacgggaaaatggtgatacctggtggcattgatgtgcatacccactttcaaatgccttacaaaggcatgaccactgtcgatgatttctttcaggggtag

SEQ ID NO: 220785 - DNA, 591 bp, synthetic construct
  misc_feature 1..591: note = Description of Artificial Sequence: Synthetic coding sequence
  source 1..591: mol_type = other DNA
atggacgaaaatcaattcgtggcggtgacctccactaatgccgctaaaatattcaatctgtatcctcggaaaggtaggatttctgtgggaagtgactccgacttggttatttgggacccagacgctgtcaaaatcgtgagcgccaagaatcatcagtctgctgccgaatacaatattttcgaaggaatggagctgcgaggggcaccactggtcgttatctgtcagggaaagattatgctggaggacgggaacctgcatgttacccagggagccggaagatttataccatgttcacctttctccgactatgtgtacaaacgcataaaggccagacgaaagatggccgacctccacgcagtgcccagaggaatgtacgatggccctgtgttcgacctgaccactaccccaaagggaggcacccctgccggttccgctcgcggttcccccacccgtcctaatccccctgtccgaaatctgcaccagtccggatttagtctctctggaacccaggtggatgagggcgtgaggagcgctagcaagcgaattgtagcaccccctggaggtagaagtaacatcacttcactctcatag

SEQ ID NO: 220786 - DNA, 1719 bp, synthetic construct
  misc_feature 1..1719: note = Description of Artificial Sequence: Synthetic coding sequence
  source 1..1719: mol_type = other DNA
atgtcattccaaggcaagaagagtatccctaggattaccagtgaccggctgctgatacgaggaggccgtatcgtgaacgacgatcagtcattctatgctgacgtgcatgtcgaggatgggctgatcaaacagatcggagagaaccttatcgtccccggaggtattaagacaattgacgcgcacggactcatggtgttgccaggaggggttgacgtgcatacacgtctgcagatgccagtcctgggcatgaccccagccgatgacttttgtcagggaaccaaagctgctctcgccggaggaaccacaatgatactggaccacgtttttccagacacgggagtcagcttgcttgctgcatacgagcagtggagggagagagccgactcagccgcatgttgtgattactctcttcacgtggatatcaccaggtggcacgagtcaattaaggaagaactagaggccctggtcaaggaaaagggcgtgaatagctttctggtgtttatggcctacaaagaccgatgtcagtgcagcgatagccagatgtacgaaatcttctccatcattagggacctcggagcgctggctcaggttcacgccgaaaacggcgatatcgtcgaggaagagcagaaaaggttattggaactgggtattactggacctgagggacacgtgttatctcatcctgaggaagttgaggccgaggcagtatatcgcgctgtgacaatcgccaagcaggctaattgccctctgtacgtgaccaaagttatgtcaaaaggcgctgctgatgctatcgcacaggctaagcgtagaggtgtggtggttttcggcgaaccaattacggcatctctcggcaccgacggatcacactactggagcaaaaattgggccaaggctgccgcatttgtgactagccctccagtgaatcccgatcccaccacggcggaccacctcacatgtttactgagttctggtgacctgcaagtcactggctccgctcattgcaccttcaccacagcacaaaaggcagtcggtaaagacaattttgcactgatacctgaagggaccaatggcatcgaggaacggatgagtatggtgtgggagaagtgcgtggccagtggtaagatggacgaaaacgagtttgtggctgtaaccagcacaaatgcagccaagatttttaacttctacccaaggaagggacgggtggcagttggatccgacgccgatctcgtgatatggaaccccaaggctacaaaaattatctcagcgaagacccataatctcaatgtcgagtataacattttcgagggcgtcgagtgtcgtggtgcgcctgccgtcgtaatttcacaggggagagttgctcttgaagatggaaaaatgtttgtgactcctggcgctggtcgctttgtcccacgaaagaccttcccagactttgtgtacaagcgaatcaaggcaagaaataggttagcggaaatacacggagttccgcgtgggctgtacgacggtccagtgcacgaggtgatggttcctgcaaaacccggtagtggtgcaccagcacgggcatcttgtccaggcaaaatctcagtgcctccagtgcggaatttgcaccagagtggattctccctgtccggctcccaggccgacgaccacatcgcgcgaaggacagcccagaaaattatggccccacctggaggacgtagcaatatcacctctctctcttag

SEQ ID NO: 220787 - DNA, 1239 bp, synthetic construct
  misc_feature 1..1239: note = Description of Artificial Sequence: Synthetic coding sequence
  source 1..1239: mol_type = other DNA
atgcccgtcctcggcatgacccccgctgacgatttctgccagggcactaaagcagccttggctggaggtacaaccatgatcctcgatcatgtgtttccagacacaggtgtatcgctccttgcagcctacgaacagtggagggaacgagcagactcggccgcatgctgcgattatagtcttcacgtcgatatcacccgctggcacgaatcaataaaagaggaactggaggccctggtgaaggagaagggagtaaattctttcctggtgtttatggcatataaggacagatgccagtgtagcgacagtcagatgtacgagattttttccataatccgcgaccttggagcattagctcaggtccacgcagaaaatggggacatcgtggaggaggtggaggctgaggccgtataccgagctgttaccattgcgaagcaagcaaattgtcccctatacgtcaccaaagtgatgtctaaaggagctgccgatgctatagcccaggccaaacgcaggggcgtggtcgtgttcggcgagcccattactgctagtctcggcaccgatgggtctcactactggtctaaaaattgggctaaggccgctgccttcgtgaccagtcctcctgtgaatcctgatcctacgacagccgaccacctaacctgcctgctctccagtggcgatcttcaggtcacaggaagtgcccattgtaccttcacaacagcccagaaggctgtgggaaaagacaacttcgcgcttatacccgagggcaccaatggaattgaggaaagaatgagtatggtctgggagaagtgtgtggcatccggtaagatggatgaaaacgaatttgtggcagtgacctccacaaacgccgctaagatcttcaacttctaccccaggaagggcagggtggcagtgggtagcgatgctgatctggttatctggaatccgaaggcaaccaaaatcatcagtgccaaaacgcacaacttgcttgccgaaatacatggagtcccaaggggcttgtacgacggcccagtgcatgaggtaatggttccagcgaaacctggatccggggctccagcacgcgcatcctgtcccggtaaaatctctgtaccccctgttagaaatctgcatcagtccgggttttctttaagcggatcccaagccgatgaccatatcgcgaggaggaccgcccagaagatcatggctccacccggaggtcggtcaaacattacctcgctcagctag

SEQ ID NO: 220788 - DNA, 1239 bp, synthetic construct
  misc_feature 1..1239: note = Description of Artificial Sequence: Synthetic coding sequence
  source 1..1239: mol_type = other DNA
atgccagtcctcggcatgaccccggctgacgacttctgccagggcaccaaggccgctctcgctggcggaaccaccatgatcttggaccacgtgtttcctgacacgggagtgtcgctgctggccgcatacgagcagtggagggaacgcgctgacagtgctgcttgctgcgattactccctgcacgttgacatcacacggtggcacgagagtattaaagaggaactcgaggcgttggtcaaggagaagggggtcaatagttttctggtgttcatggcatacaaagatagatgccagtgcagtgacagtcagatgtacgagatcttctccattatccgcgacctgggtgctctggcccaggtccacgccgaaaacggagatatcgtggaggaagttgaggcagaggcagtctatagggctgtgactatagcaaaacaggctaactgtcctctctatgtgaccaaggttatgtcgaaaggggcagcggacgcaatcgctcaggccaaacggagaggtgtggtcgtctttggcgaacctatcacggccagccttggtaccgacggctcacactattggagcaaaaactgggccaaggccgcagcctttgtgactagtccccctgtgaatcccgatcccaccacagctgatcacctcacatgtttgcttagcagcggagacttgcaggtaacaggttctgctcactgcaccttcaccactgcccaaaaggctgtgggaaaggataacttcgctttgatccctgaaggtaccaatggcatcgaggagcgcatgtccatggtatgggaaaagtgcgtcgccagcggaaagatggacgagaacgaatttgtcgccgtgacctctaccaacgcagcgaagatctttaatttttatcccagaaaaggcagagtagccgtcggcagcgatgctgatctggtcatatggaatccaaaagcaaccaaaatcatcagtgccaaaacacacaacctgctagccgaaatccacggagtacctcggggactctatgatggacccgtgcacgaagtgatggtgcctgctaagccaggaagtggtgccccagcccgtgcctcttgcccaggcaagattagtgtgcccccagttcggaaccttcatcagtccgggttctcactgagcggaagccaggcagacgaccacatcgctagacggactgcccaaaagattatggccccacccggagggaggtccaacattacctcactctcatag

SEQ ID NO: 220789 - DNA, 1695 bp, synthetic construct
  misc_feature 1..1695: note = Description of Artificial Sequence: Synthetic coding sequence
  source 1..1695: mol_type = other DNA
atgctcgcgaattcagcgagcgttcggatactaattaaaggcggaaaagtggtcaatgacgactgcacccatgaagctgatgtctatattgagaatggcattattcaacaagtgggacgggaactgatgatcccagggggtgccaaagtcatcgacgctactggcaaattggttattcccggtggcatcgacacaagtacgcactttcatcagacctttatgaacgccacatgcgtggatgatttctaccatggaacgaaggctgccttggttggtggcacgaccatgataatagggcatgtgctccctgacaaggagacttcactagtggatgcctatgagaagtgtagaggattggctgaccctaaagtgtgctgcgattacgcactccatgtcgggataacttggtgggcaccgaaagttaaggccgagatggaaaccttggttcgagagaaaggcgtgaactctttccagatgttcatgacgtataaggatctctatatgcttcgcgattccgagctataccaggtgctacatgcctgtaaggatattggggctattgcccgtgtgcacgccgagaatggtgaactggttgcagaaggggcaaaggaagccctcgacctgggaatcaccggtccagagggaattgaaattagccgccctgaagaactggaagcagaagccacacaccgtgtcatcacgatcgcgaacaggacacactgtccaatctatctcgttaatgtatcgtccatttcggccggagatgttatcgccgctgcaaaaatgcagggaaaggtggtgctggcggagaccactaccgcccacgccaccttgaccgggttgcattattatcaccaggattggtcccacgctgccgcatatgtaaccgtgccccctctgagactcgacaccaatacaagtacataccttatgtcccttctagccaatgacaccctgaatatagtagccagtgatcacaggccttttaccacaaagcagaaagccatgggcaaggaggactttactaagattccacatggagtcagtggagtgcaagaccgcatgagtgttatctgggagcgcggagtcgtggggggaaagatggacgaaaaccgatttgtggctgttacgtcgagcaatgcggcaaagctgctgaacctgtacccccgtaagggcagaatcatccctggagcggatgccgacgtggtcgtctgggatcctgaagccacaaagaccataagtgcctctacacaggtccagggaggggatttcaacctctacgaaaacatgcggtgtcacggagtgcctctggtaacaatctctcggggacgcgttgtgtacgaaaatggcgtgtttatgtgcgccgagggcaccggaaagttctgccctctacgttcctttcccgacacagtgtataaaaagctggtgcagcgggagaaaacactgaaggtcagaggtgtggatcgtacaccttacctcggcgatgtggcggtcgtagtgcatccaggcaagaaagagatgggaacacccctggccgataccccaaccagaccagttacccggcacgggggtatgcgcgatctgcacgaatcaagtttctctctgagcggctcacagatcgatgatcatgtgccgaaacgggcatcggcaaggatcctcgctccgcctgggggtagaagcagtggaatttggtag

SEQ ID NO: 220790 - DNA, 1695 bp, synthetic construct
  misc_feature 1..1695: note = Description of Artificial Sequence: Synthetic coding sequence
  source 1..1695: mol_type = other DNA
atgctcgccaattccgcaagcgtgagaattttgatcaagggcggaaaagtggtgaacgatgattgcactcatgaggccgatgtgtatattgaaaacggcatcatacagcaagtcggcagagaactgatgattcccggtggggcaaaggtgatcgatgccacgggaaaacttgtgatccccggaggaatcgatacctccacccatttccatcagacttttatgaatgctacatgtgtcgacgatttctatcatggaacaaaagctgccctggtgggtggaaccacaatgataataggccacgtgctacctgacaaagagactagcctcgtggatgcatacgaaaaatgtcgtggattggctgacccgaaggtttgctgcgactatgcactgcacgtgggcattacttggtgggcccctaaggtcaaggctgagatggaaactctggtgcgagaaaaaggggtgaactctttccagatgttcatgacttacaaagacctatacatgctccgggatagtgaactgtatcaagtcctgcacgcatgcaaggacatcggggctattgccagagtacatgcagaaaacggcgagctcgtggccgagggtgctaaagaggctcttgatttgggcattacggggcctgagggaatagaaatctcacgacctgaagaactcgaggctgaagcaacacaccgggtgatcactattgctaatagaacacattgtccaatctacctagtgaacgtctccagtatatccgccggagatgtgatagccgctgccaaaatgcagggcaaagtcgtgttggcggagactaccactgcccacgccaccctgactggcctgcattattatcatcaggactggagccatgctgccgcatacgtcacagtgccacccctcagactggacaccaacactagcacttatttaatgagcctactggcaaatgacaccctgaacatcgtagcctctgatcacaggcccttcacgaccaaacagaaagcgatgggtaaagaagattttaccaaaatcccccatggagtgagcggggtacaggaccggatgtcagttatctgggagcggggagtcgtggggggtaagatggatgagaaccgtttcgtggccgtgaccagctctaacgcagcaaaactgctcaatctttatcctaggaaggggaggatcatcccaggcgctgacgcggacgtggttgtatgggatcctgaggctactaaaaccatttctgcctccactcaagtgcagggcggtgactttaacctctacgagaacatgcggtgtcatggagtaccgctggtgactatcagtagggggagggtagtctacgagaatggcgtgttcatgtgtgcagaaggcacaggcaaattctgcccccttcgttcattccccgatactgtttacaaaaagttagtacaacgtgaaaaaacgctgaaggtgaggggcgttgataggaccccctatttgggcgacgttgctgtggtggtgcacccaggcaaaaaggagatgggcacacccttggccgacacgcctactcgacccgtgacccgccatggcggtatgagggatttgcatgagagctccttctcactctctggcagccagattgatgatcacgtgcctaagcgcgctagcgccagaatactcgcgcctccaggcggacgtagcagtggcatctggtag

SEQ ID NO: 220791 - DNA, 573 bp, synthetic construct
  misc_feature 1..573: note = Description of Artificial Sequence: Synthetic coding sequence
  source 1..573: mol_type = other DNA
atgctcgccaactcggcaagcgtgagaatcctcataaaaggcggaaaagtggttaacgacgactgcacccacgaggccgatgtgtacattgagaacggaattatccagcaagtcggccgtgagctaatgatcccagggggtgcaaaggtcatcgacgcaacaggaaagttagtaattccagggggaattgacacaagcacccacttccaccagacattcatgaatgccacctgtgtggatgatttctaccacgggaccaaggctgcgctcgtgggcggaaccacaatgattatcgggcatgtgctcccagacaaggaaacgtccttggtggatgcttacgagaaatgcagaggtctggctgacccgaaagtatgctgtgattacgcactgcatgtcggaattacctggtgggcccctaaagtaaaagccgaaatggagacccttgtgcgtgaaaagggcgttaattcgtttcagatgttcatgacttataaggacctgtacatgctgagagactctgagctgtaccaggtgcttcacgcctgtaaggatataggagctattgcccgtgtctag

SEQ ID NO: 220792 - DNA, 525 bp, synthetic construct
  misc_feature 1..525: note = Description of Artificial Sequence: Synthetic coding sequence
  source 1..525: mol_type = other DNA
atgttggcaaactccgccagtgtgagaatcctgatcaagggcggaaaagtggtcaacgacgattgtactcacgaggccgacgtgtatattgaaaacggaatcatacaacaagtaggccgagagttaatgatccccggtggggctaaagtgattgatgcaacaggaaagctggtgataccagggggaatcgacacttctacccattttcaccagactttcatgaatgccacatgtgtggatgacttttatcatggcactaaggccgcacttgtcggcggaactacgatgattattgggcatgtcctgcctgacaaagagacgtcactggttgacgcctacgagaaatgtcgaggactcgccgatcccaaagtgtgctgtgattatgccctgcacgtagggataacatggtgggcaccaaaagtaaaggccgaaatggaaactctagtccgggagaagggcgtgaatagttttcagatgtttatgacatacaaggatttgtacatgctcagggatagtgagctgtag

SEQ ID NO: 220793 - DNA, 498 bp, synthetic construct
  misc_feature 1..498: note = Description of Artificial Sequence: Synthetic coding sequence
  source 1..498: mol_type = other DNA
atgttagccaactccgctagtgtgaggatcctgataaaagggggaaaggtcgtcaatgatgactgcacacacgaggcagacgtgtatatcgaaaatgggattatccaacaggtggggcgtgagctaatgattcccggaggtgctaaagtgatcgacgctactggtaaactcgtgataccaggcggaattgacacttccacacacttccaccagacctttatgaatgccacctgtgtcgacgatttttaccacggaaccaaggccgcactggtgggaggaacgactatgatcatcgggcacgtcctgcctgacaaggagactagcctggttgatgcctatgaaaagtgtagaggcttagccgatcccaaggtgtgctgtgattacgctctccatgtcggcattacatggtgggccccaaaagtgaaggccgagatggaaactttggtccgggagaagggtgtgaattcttttcagatgttcatgacctataaggactag

SEQ ID NO: 220794 - DNA, 522 bp, synthetic construct
  misc_feature 1..522: note = Description of Artificial Sequence: Synthetic coding sequence
  source 1..522: mol_type = other DNA
atggctccggtcctaagtaaagatagtgctgatattgagtctattctcgcactgaaccctaggacacagacccacgccacccttcgatctactagcgccaagaagctggacaaaaagcactggaaacgcaacccagataaaaactgcttcaactgtgagaagttggaaaacaactttgacgacatcaagcatacaacactcggtgagcgtggcgctttgcgtgaggctatgcggtgtctcaaatgcgccgatgccccatgtcagaaaagttgccccaccaatctcgatattaagagtttcatcacaagtatagctaacaaaaattactacggtgcagcaaagatgatcttttccgacaatcccttgggattgacttgtggcatggtatgtccaacctcagatttatgtgtagggggatgtaacctctacgcaacggaggagggcccaattaacattggcggactgcaacagttcgccactgagacactcatccttgccttttccctgatgaaccacctgtag

SEQ ID NO: 220795 - DNA, 3078 bp, synthetic construct
  misc_feature 1..3078: note = Description of Artificial Sequence: Synthetic coding sequence
  source 1..3078: mol_type = other DNA
atggctcccgtgttaagcaaggattctgcagatatagagtccattctcgcgctgaatccaaggacacagacccacgcaactctgcgttcaacctctgccaagaaactagacaaaaaacactggaaacggaatccggacaagaattgcttcaactgcgagaaactggagaacaacttcgacgatatcaagcacactacactgggggaacgcggtgcacttcgtgaggcaatgagatgcctcaagtgcgcagatgcaccatgccagaaatcttgccccaccaacctggacataaagagcttcataacctctattgccaataaaaattattatggagccgctaaaatgatattttcagacaatccactgggcttaacgtgtggaatggtttgcccaacttccgatctctgtgtgggagggtgcaatttgtacgccacagaggaagggccaatcaacatcggcggactgcagcaattcgcaacagaagtgttcaaggctatgtcaatcccgcagattcggaaccctagtctcccacctccggagaagatgagtgaagcatattcagcaaagatagccctgttcggcgctggcccagctagtatttcttgcgcctcatttctggcgaggctcgggtacagcgatatcaccatttttgagaaacaagagtatgttggcggtctcagtacgtccgaaatcccccagttccgactaccgtacgatgtggtcaattttgaaatcgagctgatgaaagacctcggagtgaaaataatctgtgggaagagcctatcagtgaacgagatgacgctgagcaccctgaaggaaaaaggatataaagccgctttcatcggcattgggctaccagagcctaacaaggacgcaatcttccaaggcctgactcaggatcaagggttttacactagtaaagattttctgcctcttgtagctaaagggtcaaaagccggaatgtgcgcatgccattcaccattgccctcgattaggggcgtggtgattgtccttggtgccggagacacggccttcgattgcgcgacttcagccctgagatgtggcgcacgtcgtgtgttcattgtcttcagaaaaggatttgtgaatattagggctgtgcctgaagaaatggagctggcaaaagaagagaagtgtgaattcttgcccttcctgtcaccacgtaaagttattgtaaagggcggaaggatcgtcgctatgcagtttgtgagaactgagcaagacgagacaggcaagtggaacgaggacgaggatcagatggtccacctgaaggccgacgtagtgattagcgctttcgggtctgtgctgagcgacccaaaagtgaaggaggccttatcccctattaagttcaatcgctggggcttgcccgaggtcgatcccgaaacgatgcaaaccagcgaggcctgggtgtttgcaggaggcgatgtcgttggcttagctaatacgaccgttgagagtgtcaatgatggtaaacaggctagttggtacattcacaaatatgtacagtcacaatatggggcaagtgtgagcgctaaaccagaactgcccctcttctacacacctatcgacttggtcgacataagcgtagagatggccggtctgaaattcatcaaccccttcggcttagccagcgcaactcccgcaaccagtacatctatgataagacgggcattcgaggcagggtggggcttcgcactaaccaaaaccttttcactagataaagatattgtcacgaatgtttcaccaagaataatccgcggtaccacgtcagggcctatgtatggccctggccagagctcattcttaaacatcgaactcatctctgagaagaccgccgcatattggtgccagagcgtgacagagctgaaggccgatttcccagataacatcgtgattgcttcaattatgtgcagctacaacaagaatgattggaccgagcttgcgaagaagtcagaagattcaggagcggatgcattagagttaaatctctcttgtccacatggtatgggcgagcgcggaatgggtctggcatgcggtcaggaccccgaactggtaaggaacatctgtcgatgggtccgacaggcggtgcagattccctttttcgccaaacttacccccaacgtgacagatatcgtttccattgccagggctgctaaggagggcggagctaatggcgttaccgctacgaacactgtcagcgggctgatggggttgaaatctgatgggacaccttggcccgctgttggtatcgctaagcggacaacgtatggcggtgtgagcgggaccgccatacgcccaatagctctgagagccgtgacttccatcgctagggcccttcctggattcccaatcctggctacagggggaatcgactccgcggagtctggtttacaattcttgcactctggagcttccgttctgcaggtgtgttctgctatccagaaccaggacttcaccgttattgaggactactgtaccggacttaaggccttactgtatctgaagtcaattgaagaactccaggattgggacgggcagtcacctgctactgtatcacaccagaaaggaaagcctgtaccacgaatcgcagagctcatggataaaaagcttcctagcttcgggccttacctcgagcagcgcaagaaaattatagccgagaataagatacgtcttaaagaacagaacgtggcattttctcctttgaagcgcaattgctttattccaaagcgacccatacctaccattaaagatgtcatcggcaaggctctccagtacttaggaacattcggagaattgtcgaacgttgagcaggtggtggcaatgatcgatgaggagatgtgtataaactgcggcaaatgctacatgacctgcaatgactccggctatcaggccatacagtttgatcccgagactcatctgcccacaatcaccgatacatgtacagggtgtactctttgcttatctgtttgtccgatagttgactgtataaaaatggtctcacggaccacaccttatgaaccaaagcgcggagtgcctctgtcggtcaatccggtgtgctag

SEQ ID NO: 220796 - DNA, 471 bp, synthetic construct
  misc_feature 1..471: note = Description of Artificial Sequence: Synthetic coding sequence
  source 1..471: mol_type = other DNA
atggcccctgttctgagcaaggatagcgccgacatcgaaaactgcgaaaaattggagaataacttcgacgatatcaaacacacgacccttggagagcgcggagccctccgtgaagccatgcgctgtttgaagtgtgcagacgccccttgccagaaaagttgcccaacaaaccttgacattaagagcttcattacatcaatagccaataagaactactacggcgctgccaagatgatctttagtgataaccccctggggctgacgtgcggtatggtgtgtcccacatcagatctgtgtgttgggggatgcaatctatatgccaccgaagaaggtcccatcaatattgggggtttacaacaattcgctactgaggttaacgggctgttgcatttccagaactccgtcagtctgtggttccagaaaacagctaatattagcttcctttcctgcggctctctgcaggacgcctag

SEQ ID NO: 220797 - DNA, 1482 bp, synthetic construct
  misc_feature 1..1482: note = Description of Artificial Sequence: Synthetic coding sequence
  source 1..1482: mol_type = other DNA
atgattctcaattctctgtccttatgttaccacaacaagctgatcctagctccaatggtgcgggttggaaccctgccaatgaggctactcgccctggattacggcgcagacatcgtctactgcgaagagcttatagacctgaagatgattcagtgtaaacgcgttgtgaacgaagtattgagcaccgtggatttcgtggccccagatgaccgcgtcgtgttcagaacttgtgaacgggagcagaaccgagtcgtctttcaaatgggtacttctgatgccgagagagcactcgcagtggccaggctggttgagaatgacgtcgcaggaattgatgttaatatggggtgtcctaaacagtattctactaaaggagggatgggcgcagctctcctgagtgatccagataaaatcgagaagatcctctctaccctcgttaagggcactcgcagacccgtgacctgtaagattaggatcctgcccagcctggaggacacattgtctctcgttaagcggattgaaagaactgggatcgctgccattgccgtccacgggaggaagcgggaggagcgccctcagcaccccgtgtcatgcgaagtaatcaaagcaattgcagacactctctccattccggtaatcgctaacggcggttcccacgatcacattcaacagtactcggatattgaagacttcaggcaggccaccgctgcttcctctgtgatggtcgcacgtgcagccatgtggaatccctctatattcttgaaggaggggctgcgaccactagaggaggttatgcagaagtatatacgatatgcggtgcagtatgacaatcactacaccaataccaagtactgcctgtgccaaatgctgagggaacaactggagagcccacagggaagactgcttcacgcagcgcagagtagcagagagatatgcgaagcatttgggctcggcgctttctatgaagagactacccaggagcttgatgcccagcaagctcgtctgagcgccaagaccagcgagcagaccggggagccagcagaggataccagcggagtgataaagatggcagtcaagtttgaccgtagggcctaccccgctcaaattaccccgaaaatgtgcctgttagaatggtgtagaagagagaaactggcacagcccgtctatgaaacggttcagagacccctcgatcgactcttctcttctatcgtcacagtcgccgaacagaagtaccagtcgaccttgtgggacaaaagcaagaaactcgcggagcaggccgcagcgattgtatgcctgcgaagtcagggactccccgaagggagattgggggaggaatctccctctctgcacaagcggaaaagggaagcccctgatcaggaccccggaggaccccgagctcaggagctcgcccaacccggagacctgtgcaaaaaacctttcgtcgccctgggctcaggagaggagtcccccttggagggctggtag

SEQ ID NO: 220798 - DNA, 1482 bp, synthetic construct
  misc_feature 1..1482: note = Description of Artificial Sequence: Synthetic coding sequence
  source 1..1482: mol_type = other DNA
atgatcctaaattcactcagtctgtgttaccacaataagctgatcttggcaccaatggtcagggtgggcaccctgcccatgaggctgttggctctggactacggggctgatatcgtctactgtgaggaactcatagatctgaaaatgatccaatgtaagcgagtggtgaacgaggtcctatctacagtagattttgtggccccagacgaccgagtcgtatttcgtacatgcgagagggagcagaaccgggtcgtttttcagatggggacaagcgacgcagagcgtgccctggctgtggcaagattggtcgaaaatgatgtggcaggcatcgatgtgaatatggggtgcccaaaacagtatagcactaaaggcggtatgggggcagcactgctttccgatcccgacaagattgaaaagatcttaagcaccctggtgaaaggaaccaggcggccagttacatgcaagatccgaattctaccaagcctagaagatactctttccctggttaaacggatcgaaagaaccggcatcgccgcaattgcagtacacgggagaaaaagagaggaaagacctcagcatcccgtgtcctgcgaggtgataaaggctatcgctgacaccctcagcatccccgttatcgccaatgggggaagccacgatcatattcagcagtatagcgatatagaggatttcaggcaggctacggcagctagttccgttatggtcgctagagccgcaatgtggaatccatccattttcctgaaggaaggtctgcggccactggaggaagtgatgcagaagtacatccgctacgctgtgcagtatgataaccactacacaaacaccaagtactgtctatgtcaaatgctgagggaacagctggaatctccgcagggacggctcctccatgccgctcagtcttctcgggagatttgcgaggcattcggcctgggagccttctatgaggagacgactcaggaactcgatgcgcagcaggcacgactgtccgcaaaaacctccgagcagacgggcgaacccgctgaggacacgtccggcgtaattaaaatggccgttaagtttgaccggagggcctacccagcacagattacccctaagatgtgtctccttgaatggtgtagaagggaaaaacttgcgcagcccgtatatgagacagttcagaggcctctggatagactgtttagtagtatcgttaccgttgcggaacagaaataccaatcaactctttgggacaagtcaaagaaattagccgagcaagctgccgctatcgtatgcttaaggtctcaaggcttgcctgagggacgattgggagaggagagccccagtctgcataaacggaaacgggaggctcctgatcaagacccaggagggcctcgtgctcaggagttggctcagccaggcgacctgtgcaaaaaaccttttgtggctctcgggtctggggaagaatccccactggagggctggtag

SEQ ID NO: 220799 - DNA, 1377 bp, synthetic construct
  misc_feature 1..1377: note = Description of Artificial Sequence: Synthetic coding sequence
  source 1..1377: mol_type = other DNA
atgattctcaattctttatctctatgctatcataacaagctgatccttgctcccatggtgagagtgggcactctgcctatgcgccttcttgcccttgactacggagccgatatcgtgtactgcgaggagctgattgacctgaagatgattcagtgcaaacgcgtcgtcaatgaggtcctgagcaccgttgacttcgtggctcccgatgacagggtggtgttcagaacctgtgaacgtgagcagaatcgggtagtgttccagatgggaggcatgggagccgcactgctgtccgacccagacaaaatcgaaaagatcctatccacgctggtgaagggtactaggaggccagtgacctgtaagatcagaatactccctagtttggaagataccttgtcactcgtgaagagaatcgagcgcacgggcattgccgcaattgccgttcacgggagaaagagagaagaaagaccccagcaccctgtgagttgcgaggttataaaggctatcgccgatactttgagcatccccgtaattgccaatggtggaagtcacgatcatatccagcagtacagcgacatcgaagacttccggcaggctacagcagcttcctccgtcatggtcgctcgggcagccatgtggaacccaagtatctttctgaaggagggcttgcgacctttggaggaggtgatgcagaagtatatcagatacgccgttcagtacgacaatcactatacaaataccaagtactgcctgtgtcagatgcttagggaacaactggagtcccctcaggggaggcttcttcacgcggctcagtcttcccgcgagatctgcgaagcttttggcctgggagcattctatgaggaaacaacccaagaactcgacgcccagcaggcccgactaagcgcaaaaacgtccgagcagacaggggaacccgctgaagacacttccggggtgatcaaaatggctgtgaaattcgataggcgggcttatccagcacagatcacgcctaagatgtgcttgctcgagtggtgtcgtcgggaaaagctagcacaacccgtgtacgagacagttcagaggccactggacagactcttctcatccattgtaacagtggctgaacagaagtaccagagtactctctgggataagtctaaaaagctggccgagcaggctgcagccattgtatgtttacgctcacaaggacttcccgagggacgcttgggcgaggagtcgccctcactgcataagcggaagagggaagcaccagatcaagatcctgggggtcctagggcccaggagctggcgcagccgggagacttgtgcaagaagcccttcgtcgctctgggctccggagaagagagcccactggagggctggtag

SEQ ID NO: 220800 - DNA, 858 bp, synthetic construct
  misc_feature 1..858: note = Description of Artificial Sequence: Synthetic coding sequence
  source 1..858: mol_type = other DNA
atggcaggactgggccatcctgccgcattcgggcgtgctacccatgctgtagttagagccttgcccgaaagtctgggccagcatgctctacggtccgcgaagggggaagaggtggatgtggcacgcgcagagaggcagcaccaactttacgtgggagtgcttgggagtaagctgggtcttcaggtggtcgagctgcccgcagatgaaagcctgcctgactgcgttttcgtggaggacgtagcagtcgtctgtgaggaaacagctcttatcacgaggccgggagccccaagcagacgcaaggaagttgatatgatgaaagaagcactggagaaactgcagctgaacatcgtggagatgaaggacgagaacgcaacacttgacggcggagatgttctgtttacagggagggaattctttgttggcctatctaaacggacaaaccagaggggagccgaaatattagcggacactttcaaagattacgcagtttctactgtccctgtagcagatggcctgcatctgaagtcattttgtagcatggccggacccaacctgatcgctatcggttcaagcgagagtgcccagaaagccctcaagatcatgcaacagatgtctgaccaccgttacgacaagttaacggtaccggatgatatagccgcaaattgcatctatctgaatattcccaataaagggcatgtgcttctacaccgcactcccgaagagtaccctgaaagcgctaaagtgtatgagaaactgaaagaccatatgctgattcccgtgtctatgagcgaactggagaaggtggatggtctgctgacttgctgcagcgtactcatcaataagaaggtcgactcttag

SEQ ID NO: 220801 - DNA, 579 bp, synthetic construct
  misc_feature 1..579: note = Description of Artificial Sequence: Synthetic coding sequence
  source 1..579: mol_type = other DNA
atgtggctgtacggcttgggccaggttgatatgatgaaagaagccctggaaaagttgcaactcaacatcgtggagatgaaggacgaaaatgctacattggacggtggagatgtgctctttaccgggagggagttcttcgtcgggctatctaagcgcaccaatcagcggggtgcggagattcttgcggacacctttaaggactacgctgtttcgaccgtgccagtggcagacggcctgcatctgaagtcgttttgctctatggcaggccctaatttgatcgccatcggtagttctgaatcggctcaaaaagccctaaagattatgcagcagatgtcagatcaccggtatgataaactgactgtgccagatgacatcgccgctaattgtatatacctcaatatccccaacaagggccacgttctgttgcataggacccccgaggagtaccccgagtctgcaaaagtttacgagaagttaaaggatcacatgctcatccccgtgagtatgagtgagctggaaaaagttgacggattattgacctgctgctctgtgctgatcaataaaaaggtggattcttag

SEQ ID NO: 220802 - DNA, 549 bp, synthetic construct
  misc_feature 1..549: note = Description of Artificial Sequence: Synthetic coding sequence
  source 1..549: mol_type = other DNA
atgatgaaagaggccctcgaaaagttacaactcaatatcgtggagatgaaagacgagaatgcaaccctggacggcggtgacgtgctgttcacaggcagggaattcttcgtgggactgagtaaacgcacgaaccagcgcggagccgaaattcttgccgatacctttaaagactatgcagtaagcaccgtgccagttgccgatggactccacctaaaatccttctgctcgatggcaggccctaacctgatcgccattggctcctctgaatcagctcaaaaggctctaaaaattatgcaacagatgtctgaccaccggtatgacaagctgacggtgcccgacgacatagcagctaactgtatatatctcaatattcccaacaaaggacatgttctgctgcataggactcccgaagagtacccagagtccgctaaggtgtacgagaagttgaaggatcatatgcttattccagtgtctatgtccgagctggagaaagtggatgggctcctcacatgctgttctgtactcataaataagaaggttgacagctag

SEQ ID NO: 220803 - DNA, 858 bp, synthetic construct
  misc_feature 1..858: note = Description of Artificial Sequence: Synthetic coding sequence
  source 1..858: mol_type = other DNA
atggccggtctagggcatccagccgctttcggtcgcgctacgcatgcggtcgtacgagctctccctgagtccctgggccagcatgcgctcaggagcgcaaagggtgaagaggtggatgtcgctcgcgcagagagacagcatcagctgtacgtgggggtattaggatctaagctgggactgcaggttgttgaactaccagctgacgagagcctgcccgactgcgtgtttgttgaagatgtcgccgtggtctgtgaagagaccgcattgataacacgaccgggagctccatctcgccgaaaagaagttgacatgatgaaggaggctctagaaaagctccagctgaacatcgtggagatgaaagacgagaatgccactctcgatggaggcgacgtgctcttcactggtagagagttctttgtaggcctgtctaaaagaactaatcagagaggagcagaaattctggccgataccttcaaggattacgcagtttcgacagtgccagtcgccgatgggctccacctgaagtccttctgcagcatggccggacccaatctgattgcgatcggatctagtgagagcgcccaaaaggcccttaagattatgcagcagatgagcgaccaccgttacgacaaattaaccgtccccgatgatatagccgcaaactgtatttacctgaatattcccaacaaagggcatgtgctgctgcacaggactccagaggaatatcccgagagtgccaaagtctacgaaaaactgaaggatcacatgctgatcccagtaagcatgagtgagttagagaaagtagacggcctgctgacctgctgctcagttctgataaacaagaaagttgacagttag

SEQ ID NO: 220804 - DNA, 558 bp, synthetic construct
  misc_feature 1..558: note = Description of Artificial Sequence: Synthetic coding sequence
  source 1..558: mol_type = other DNA
atggtggatatgatgaaggaagcactcgagaagttgcagcttaatatcgtggaaatgaaagatgagaacgccactctggacggtggagacgtcttattcacaggcagagagttctttgtcgggctgtctaaacggaccaaccagcgaggcgcagagattctggccgacacatttaaagattatgccgtgtctacggtgcctgtcgccgatggcctccaccttaagtcattttgttcaatggcaggcccaaatcttatcgcgatcggcagctcagaaagcgcccaaaaggcgctgaagatcatgcaacaaatgagcgaccatcgttatgataaactcaccgtcccagacgacatcgctgctaattgcatctatctgaacattcctaacaaaggtcatgtgctgctccacaggacgcccgaagagtatcccgagtccgcaaaggtctatgaaaagttgaaagatcacatgttaatacccgtctcgatgagcgagctcgagaaagtagatggtctgctcacctgctgcagcgtcttgatcaataagaaggtcgactcctag

SEQ ID NO: 220805 - DNA, 858 bp, synthetic construct
  misc_feature 1..858: note = Description of Artificial Sequence: Synthetic coding sequence
  source 1..858: mol_type = other DNA
atgggcacaccaggggagggactgggacgatgttcacacgctctgataaggggagtgccagagagcttggctagcggcgaaggggcaggcgcaggtctgccagccctggatctcgcgaaggcacagagggaacacggagtcttgggtggcaagctgaggcagcggctggggctgcaattgttggagctgccacccgaggagtctctgcccctgggaccactgttgggcgataccgccgtgatccagggcgataccgcccttattactagaccctggtcgccggcaaggcgccctgaagtggatggggtccgcaaggccttgcaggacctgggactccgaatcgtggagattggcgatgagaatgccaccttggatggcacagacgtcctattcaccggaagagagttcttcgtggggctgtcaaaatggacaaatcatagaggcgctgagatcgtcgccgatacattccgggattttgcagtgtcaaccgtccctgtgtccggcccaagtcaccttagaggcttgtgcgggatggggggtcctcgaactgttgtggcaggatcctccgacgctgcacagaaggccgtcagggccatggcggtgctgacagaccatccttatgcctctctgaccctgcctgatgacgcggctgcagactgtctgtttctgcgacctggtctgccgggagttcctcccttcctactccatagaggaggcggagacctaccaaactctcaggaggccctgcagaagttgagcgatgtgactttggtgccagtttcctgttccgaactggaaaaggccggtgctgggctctctagtctctgcctggtgttgtctactagaccccatagctag

SEQ ID NO: 220806 - DNA, 858 bp, synthetic construct
  misc_feature 1..858: note = Description of Artificial Sequence: Synthetic coding sequence
  source 1..858: mol_type = other DNA
atggggacaccaggggagggactcggtcggtgctcccacgccctgatcagaggcgtacctgaaagtctcgctagcggggagggggctggtgccggtctaccagccctggacctggccaaggcccagagggagcatggcgtactgggcggaaagctgcgccagcgtttaggcttacagctgctggaattaccacctgaagagagtcttcctctgggaccgctgctcggcgataccgctgtaatccagggagataccgccttgatcacccgcccatggagtcctgcccgtaggcccgaagtggacggcgtgaggaaagccctgcaggatctgggactccggattgtggaaattggagatgagaacgccaccctggacggcacggatgtactgttcacaggcagagagttctttgtgggcctgtcaaaatggacaaaccacaggggcgctgagatcgtcgccgataccttcagggactttgcagtgagcacggtgcccgtttccggcccatctcacttgagggggctgtgcggcatggggggtcctcgtacggtcgtggccggaagctcagacgccgctcagaaggccgtgagagccatggccgtgctgactgaccacccctacgcctccttgacgctcccggatgatgcagccgctgactgcctatttttacgtcctgggctccccggtgtccccccattcctcctgcacagggggggaggagacctgccaaattcccaggaggcattgcaaaagctgtcggatgtcaccctagtccctgtcagctgctcagagctggagaaggccggtgctggattatcctccctttgtctcgtgctgtcaacacgacctcactcctag

SEQ ID NO: 220807 - DNA, 858 bp, synthetic construct
  misc_feature 1..858: note = Description of Artificial Sequence: Synthetic coding sequence
  source 1..858: mol_type = other DNA
atggggacgcctggggagggattaggcaggtgttcccatgctctcattaggggggtccctgagtcacttgcctccggcgagggtgcgggtgccggtctgcctgccctggatctcgctaaggcgcagagggaacacggtgtgctgggtggcaagctgcggcagagactaggcttgcaacttctggagctcccacctgaggagtccctgcctctcggccctctgcttggtgacactgctgtcatccagggcgacaccgcactcattacccgtccctggtctccagctcgtagaccggaggtggatggtgtgcgcaaagcactgcaggaccttggactgcgtattgtggagataggagacgagaacgcaacgctggacggcacggacgttcttttcaccggtcgggagtttttcgtcggtcttagcaagtggaccaatcaccggggagccgaaattgtggccgacacattccgggatttcgcagtgtcaacagtaccggtttccggtccttcccatcttcggggactgtgtggcatggggggacctcggacagtggtggctggctcctctgacgccgctcagaaagctgtacgtgcgatggccgtgctgacagatcatccatatgcttccttaaccctgcctgacgacgccgcagcagactgcctttttctgcgaccgggtcttccgggagtgccgccatttctactgcatagaggtggcggtgatttgcccaatagccaggaggcgctgcagaaactatccgatgtcaccctcgtgcccgtcagttgtagcgagttggaaaaggcaggagcgggtctgtctagcctttgtttagtgctgagcacacgcccacactcatag

SEQ ID NO: 220808 - DNA, 858 bp, synthetic construct
  misc_feature 1..858: note = Description of Artificial Sequence: Synthetic coding sequence
  source 1..858: mol_type = other DNA
atgggaacccccggagagggactcgggaggtgcagccacgcccttattcgcggtgttcctgagtctctggcatctggtgagggagcgggagcagggcttcctgccctggatctcgccaaggctcagcgagagcacggggtgctaggtgggaaactcaggcagagactgggcctgcaactgttggaactccccccagaagaatctctgcctcttgggccattgctgggggataccgctgtgattcaaggtgacaccgccctgatcactaggccttggtctcctgccaggcggccagaggttgatggtgtgcggaaagctctgcaggatctggggctacggatcgttgaaataggtgacgagaacgcgaccctggacggcacagatgtcctctttacaggcagggaattcttcgtcggactgagcaaatggacaaaccataggggcgcagaaattgtggccgatactttcagggatttcgccgtaagtaccgttcctgtgtcagggccttctcatttgagaggactctgcggaatggggggacccagaactgttgtcgccggaagtagcgacgctgcacagaaagcagtgcgcgctatggctgtcctcaccgatcacccctatgccagtctgacactgcccgacgacgctgccgcagattgcctatttctgcggccaggcctccctggcgtgccaccctttctgctccataggggcggaggggatttgccgaacagtcaggaggcgcttcagaaactgagcgacgtgacactggttcctgtttcctgtagcgagctggagaaggccggagccggactttcctccctctgtttagtgctgtccacccggcctcactcatag

SEQ ID NO: 220809 - DNA, 858 bp, synthetic construct
  misc_feature 1..858: note = Description of Artificial Sequence: Synthetic coding sequence
  source 1..858: mol_type = other DNA
atgggaacacctggcgaagggctgggacgctgtagccacgccttaatccgaggggtgcctgagtcccttgcttccggggagggtgcaggagccggtctgccggcattagatttggcaaaagctcagagggagcatggcgttctgggcggaaaactcaggcagcggctggggctccagctgcttgaactgccccctgaggagtctctgccattgggtcctctgctgggagatactgccgttattcagggcgataccgccctcatcacccggccatggtcacccgctcggagaccagaggttgacggtgtgcgcaaagcgctacaggatctcgggcttaggattgtcgagattggcgatgaaaatgccaccctggacgggaccgacgtgcttttcacgggccgtgagttctttgttgggctctccaagtggactaatcatagaggtgcagaaattgtagctgatacattccgcgacttcgcagtctctaccgtccccgtgtcaggccctagtcatctccgaggtttgtgcggaatgggaggtccgaggactgtcgttgcaggctcctctgacgcggctcaaaaggccgttagagctatggcagtgctcactgaccacccctacgcctctctgacactgccggatgatgccgctgccgattgtttgtttctcaggcctggcttgccaggggtgccacccttcttgctacatcgtggaggcggagacctgcccaactctcaagaagctttacagaaactctccgacgtcactctggttcccgtctcctgtagcgaactcgagaaagctggagcaggactgagcagcctgtgtttagtgctgagtactcgccctcacagctag

SEQ ID NO: 220810 - DNA, 858 bp, synthetic construct
  misc_feature 1..858: note = Description of Artificial Sequence: Synthetic coding sequence
  source 1..858: mol_type = other DNA
atgggtactccaggggagggactggggagatgcagccacgccctgatacggggtgtacctgaaagcctggcaagtggggagggtgcaggggctggactcccggcactggatctggcgaaagctcaaagggaacacggggtgctcggtgggaagctgcggcagaggctaggcttgcaacttctggagcttccacctgaggagtcccttcccctaggccctctcctcggtgacactgccgtaattcagggggataccgccttgatcacgcgcccatggtcacccgctagacgcccagaagtagatggggtgcgaaaggccctgcaggatctgggtttgcgcatcgtagaaattggcgacgagaacgccaccctcgacggaaccgacgtcctcttcactggtcgggaattcttcgtgggactgtccaaatggacaaaccataggggcgcagagatcgtcgccgacactttccgggactttgctgtctcaacagtacccgtgagcggaccatcacacctcagggggctgtgcgggatggggggtcctagaacagtagttgccggtagtagcgacgcggctcagaaggccgtcagagccatggccgtcctgaccgatcatccctatgccagtctaactctgcccgatgatgctgcagccgactgtctgtttttacgacccggactgcctggcgtgccacctttcctactgcatcgcggtgggggagatctgccgaatagtcaggaggctctacaaaagctgtccgatgtgacactggtgccggtttcgtgtagcgagctggaaaaggccggtgccggtctgtcatctctgtgtctcgtcctgagcaccaggccacattcgtag

SEQ ID NO: 220811 - DNA, 858 bp, synthetic construct
  misc_feature 1..858: note = Description of Artificial Sequence: Synthetic coding sequence
  source 1..858: mol_type = other DNA
atggggacccccggagaaggtctggggcgttgctctcacgcactgattcgaggagtgcccgagagcctggcatctggcgagggcgcaggagctggattaccggctctggatctggctaaggcccagcgggagcatggagttcttggaggcaaattacgccagcgcctgggcctgcagcttctcgagctgcccccagaagagtccttacctctgggtcctctgctgggcgatacagccgtgatccagggcgacaccgccctaatcacccggccttggtctcccgctcgccgtcctgaagttgacggagtgcggaaggctctgcaggacctggggctgcgcattgtggaaatcggggacgaaaatgcgacgctggacggcacagacgtgctgtttaccggcagagagttctttgtggggctgtctaagtggacaaatcaccgcggagccgagatcgtcgctgacacctttcgcgacttcgccgtttccactgtgcccgtgtcagggccttcgcacctccgcggactttgcgggatgggcggtcctcggacggtggtggccggttccagtgatgcagcccagaaggcagtgagagcaatggcagttctaactgatcacccctacgctagcctgacactaccggacgacgccgctgcagactgccttttcctccggcctggattgcctggcgtcccaccattcctactacatcgaggaggcggagacctgcctaactctcaggaggccctacaaaaactgagcgatgtgaccttggtccctgtgtcatgttccgagctcgaaaaagccggtgccggtctgtcaagcctatgcctagtgctcagtacccgcccacacagctag

SEQ ID NO: 220812 - DNA, 567 bp, synthetic construct
  misc_feature 1..567: note = Description of Artificial Sequence: Synthetic coding sequence
  source 1..567: mol_type = other DNA
taacggagacccgaggtcgacggcgtaagaaaggccctgcaggatctgggactgcgaatagtagagatcggcgacgagaacgccacattggacggcaccgacgtgctgttcacaggtcgggaattttttgttggattatcaaagtggactaaccacaggggagccgaaatagttgccgacaccttcagagacttcgccgtgtccaccgttcccgttagcggacccagccacctaagaggactttgcggcatggggggaccaagaaccgtcgtggcaggctccagcgatgccgctcagaaagctgtgcgaatgacccagttgctgacagtcagtttctttgtacttggttgtttagtgtgtcccctgtcaagttgcaccgtggaagtcggaatttgtccgactgccagaaggcactgccggagtagcctgatgtctccatggtatttgtgtcccgctcaaaattggagacgtctggcaccagggtcggcaccgtcagcctggtgtagtgcccacgcccctaccgccgagggcctggcactgggatattgctggcctggagtggggtag

SEQ ID NO: 220813 - DNA, 567 bp, synthetic construct
  misc_feature 1..567: note = Description of Artificial Sequence: Synthetic coding sequence
  source 1..567: mol_type = other DNA
tgaaggaggcccgaggtagacggggtgcggaaagccttacaggatctggggctgcgcatcgtcgaaataggcgatgagaacgctactctggacggcaccgatgttttgttcactggcagggaatttttcgtgggactgtccaagtggacaaaccaccggggtgcagagatagtggccgacaccttccgcgacttcgccgtctctaccgtacccgtcagcggcccatctcacctgcgcggactgtgcggaatgggtggacccaggaccgtagtggccggaagctccgacgccgcacagaaggcggtaagaatgacacagctactcaccgtgagcttcttcgtcctcggctgccttgtgtgtcccttatcgagctgcactgtggaagtcgggatctgcccaactgcacgcagacattgtcgaagttccctgatgtcgccatggtatctttgccccgcacaaaattggcggcgtctggccccaggaagcgcgcctagtgcctggtgttcagcccacgctccaacagcggaaggcctggcccttggctattgctggccgggtgttggttag

SEQ ID NO: 220814 - DNA, 858 bp, synthetic construct
  misc_feature 1..858: note = Description of Artificial Sequence: Synthetic coding sequence
  source 1..858: mol_type = other DNA
atgggaacccccggtgaggggctcggcagatgctcacatgctctgatcagaggcgtccccgaatccttggcatcaggagaaggcgctggcgctggccttcctgcattggacttagctaaggcccagagggaacacggcgtccttggaggcaagcttaggcagaggctgggactgcagttgctggagctgcccccagaggaaagtctgccactcggcccactactgggcgatactgcggtgatccaaggggacaccgcgttgatcacaaggccctggtctcccgctcgcaggcctgaggtagacggcgttcgcaaggccctgcaggatctgggtttacgcatcgtggagattggggatgaaaatgccaccctggacggaacagacgtcctgttcacaggccgtgaattctttgtgggactgagcaaatggacaaatcaccgcggagctgaaatcgtagccgatactttcagggactttgcggtgtcaaccgtgcctgttagcggaccatctcacctgagaggcttatgcggtatgggtggacccagaaccgtggtggctggctcaagcgatgccgcacagaaggctgttcgagctatggctgtcctgacagatcacccctatgcttcactgacgctccctgatgacgcagctgcagattgcctgttcctcaggccaggcctgcctggggtccccccattcttgttacatcggggagggggagacctcccaaattcacaggaagcactccagaaactcagcgatgtgacacttgtgcctgtgtcctgctcagagctggagaaggcaggagcgggactgtcctcattgtgcctggtgctttcaacccgccctcattcatag

SEQ ID NO: 220815 - DNA, 858 bp, synthetic construct
  misc_feature 1..858: note = Description of Artificial Sequence: Synthetic coding sequence
  source 1..858: mol_type = other DNA
atggggacacctggggagggactgggaagatgctcccacgccctgatcaggggggttcccgaatcacttgctagcggagagggagctggcgctggcctgcccgcactcgatctcgctaaggctcagcgtgagcacggggtcttgggaggtaaactgcggcaacgcttgggtttgcagcttttagagctccctcccgaggaatctctgccgctgggaccgcttttaggggatacagctgttattcagggagatacagctctcattactagaccttggtcgcctgctagacgcccagaagttgacggagtccgcaaggcgctacaggacctgggcctgaggattgtcgagattggagatgagaacgctacactcgacggaactgatgtgttgttcactggacgtgagttctttgtcggactgagtaagtggaccaatcaccgtggtgctgagatagtcgcagacacatttcgggatttcgcagtgagtaccgtgcctgtctccggcccttcccatcttagagggctttgcggcatggggggtccccgaactgtcgtggccggatctagtgatgctgcacaaaaagctgtgcgcgctatggctgtgctgaccgaccatccatacgcttcactgactctccctgatgatgccgctgccgattgtctctttctccggcctggactgcccggtgttcccccttttttgctgcacagggggggaggagatttaccaaacagccaggaggccctgcagaaactctccgacgtcacactggtacccgttagctgctctgagctagagaaggccggtgcaggcctctctagcctgtgtctggtgctgagcacaagaccacattcatag

SEQ ID NO: 220816 - DNA, 858 bp, synthetic construct
  misc_feature 1..858: note = Description of Artificial Sequence: Synthetic coding sequence
  source 1..858: mol_type = other DNA
atggggaccccaggcgaggggctgggtcgctgtagtcacgcattaattcgcggtgtgcctgaatctctcgccagtggagaaggggcaggcgctggactgccagcgctggaccttgctaaggcacagagagaacacggtgtactgggcggtaaactccgtcaaagactggggctacaactgctggaattgccccctgaggaatctctgccactggggcctctcctgggtgacaccgccgtgatccaaggagatactgccctgatcacacgcccttggagccccgctagacgcccagaggtagacggcgtgcggaaagccctacaggaccttggcttaaggattgttgaaatcggcgacgagaacgcgacactggatgggaccgatgtattatttacgggccgagaattcttcgttggtctctcaaagtggacgaatcataggggggctgaaattgtcgctgacacattcagagacttcgccgtctcaacagtcccggtgagcgggcctagccatcttcggggtctatgtggcatgggcggacctcggaccgttgtggccggatcttccgacgcagcacagaaggccgttcgggcaatggcggtgctaaccgaccacccatatgctagcctaaccttgcctgatgatgccgctgcagactgcctatttctgcgccctggactcccaggagtgccgccatttttgcttcaccgtgggggaggtgacttgccaaattctcaggaggccctgcagaaactctccgacgtgaccctggtgcctgtgtcctgtagtgagctggagaaagcaggagcaggtctttcttccctttgtcttgtcctttctacccggcctcactcatag

SEQ ID NO: 220817 - DNA, 711 bp, synthetic construct
  misc_feature 1..711: note = Description of Artificial Sequence: Synthetic coding sequence
  source 1..711: mol_type = other DNA
atgggaactcccggagaaggcttgggcaggtgcagccacgcgcttatcaggggagtgcccgagagtcttgcctctggtgagggtgcaggagctggcctcccagctctcgatttggccaaagcccagagagagcacggtgtccttggagggaagctcaggcagcgtctcggtctccagctgttagaattgccaccagaggagagcctccctctcggtccactccttggcgacaccgccgttatccaaggagatacagctttgattacacgtccatggtcgcccgcacgcaggcctgaagtcgacggagttcgaaaggctctacaggatcttgggttaaggattgtagaaatcggcgatgagaatgccactctcgacggcacagatgtgctttttactggccgtgagtttttcgtggggctgagcaagtggaccaatcacagaggcgcagaaatcgtggcagatacctttcgggattttgcagtgtcaacagtgccagtgtccggtcccagccacctgcgcggtttatgtggaatgggagggcctcggacggtggttgcgggaagttcggatgcggctcagaaagcggtccgcgcaatggcagtgctgaccgaccacccttacgcctctctcactctacccgatgacgcagctgccgattgtctgttcctgagacccggactgcccggtgtgcccccattcttgctgcactag

SEQ ID NO: 220818 - DNA, 681 bp, synthetic construct
  misc_feature 1..681: note = Description of Artificial Sequence: Synthetic coding sequence
  source 1..681: mol_type = other DNA
atgggtactccgggagaaggcttgggcaggtgctcgcatgcactgatccggggagtgcccgaatcgcttgcatcaggcgagggagcaggggcaggactccccgcactggatttagcaaaggcccaacgagagcatggagtcttgggtggcaagcttagacagaggctgggcctccagctgctggagctgcctccggaagagtcattaccacttggtccactactgggtgatacagctgtgattcaaggagacactgccctgatcacaaggccttggtcacccgctcggcgtcctgaagttgatggagtgcgaaaagcattacaggacctgggcctccgcattgtggaaataggagatgagaatgcaacattggacgggacggatgtgctgtttactggcagagaattctttgtcggcctatccaaatggactaatcataggggcgctgagattgtagcagacactttccgcgacttcgccgtcagcaccgtgcctgtttccgggccaagccaccttaggggcctctgcgggatgggtggacctcgcaccgtggtggcagggtcttcagatgccgcacagaaagcggtcagagccatggccgtcctgacagaccacccctacgcctcactgacattgcccgatgatgccgcagctgattgcctgttcctccgtcctggttag

SEQ ID NO: 220819 - DNA, 711 bp, synthetic construct
  misc_feature 1..711: note = Description of Artificial Sequence: Synthetic coding sequence
  source 1..711: mol_type = other DNA
atgggcaccccaggtgagggattagggagatgttcccatgcactgatccgcggagtgcccgaatccctcgctagtggcgagggggcaggggctgggctcccagccctcgacctggctaaagcccaaagggagcatggcgtcttgggcggaaaactgcggcaacgtctggggttgcagctcctggagcttccaccggaagagagcctgcccctcggaccattgctgggagataccgccgtgatacagggggacactgcgctaattacccgcccatggtcacctgctcggagacctgaagtagacggtgtcagaaaggctctccaggatttaggactcaggatcgtcgagataggcgatgaaaacgcaacccttgatggtacagacgtactgttcactggccgagaattcttcgtcgggctctctaagtggaccaatcaccgtggagctgagattgtagctgacacgttcagggattttgcagttagcaccgttcctgtcagtggtccttctcatttacggggattgtgcggcatgggcggaccaagaaccgtcgtcgccggtagcagcgatgccgcacaaaaagcagttagggctatggccgtactgacagatcacccttatgctagccttactctgccagacgacgccgctgctgattgcctgttcttaaggccaggattacctggagtacccccttttctgctccactag

SEQ ID NO: 220820 - DNA, 858 bp, synthetic construct
  misc_feature 1..858: note = Description of Artificial Sequence: Synthetic coding sequence
  source 1..858: mol_type = other DNA
atgggtacaccaggcgagggacttggcaggtgcagccatgccttgatccggggtgtgccagaaagcctggctagcggagaaggagccggagccggactcccagccttggatcttgccaaggcgcagcgcgagcacggggtgctgggaggcaagttgcgacagcggctggggctgcagctgcttgaattgcccccagaggagtccctgcccctgggtccactgctaggcgacacagcagtcatacagggtgacaccgctctgattacacgcccttggagccctgcaagacgacctgaggtggatggagttcgaaaagcactgcaggacctgggactgcgtatcgtcgagattggtgatgaaaacgctaccttggatgggacagacgtgttatttaccggccgagaattttttgtggggctgtcaaagtggacaaaccatcggggtgcagagattgttgctgacaccttccgcgacttcgccgtatctaccgtccctgtatcaggtcctagtcacctcagaggcctgtgcggtatgggtggccctcggaccgtcgtggctggatcgtcagatgcagcccagaaagccgtgcgtgcaatggctgtcttaacagaccatccgtatgcctcattgaccctgccggacgatgctgccgcagattgcctcttccttcggccaggccttcccggtgtcccccctttcctgctgcatcgagggggtggcgatctccccaattcgcaggaggctttgcagaaattaagtgacgtaaccctggtgccagtgagctgcagtgagcttgaaaaggcaggagcaggtctgtcttctctctgtttggtccttagtacacgtcctcacagctag

SEQ ID NO: 220821 - DNA, 858 bp, synthetic construct
  misc_feature 1..858: note = Description of Artificial Sequence: Synthetic coding sequence
  source 1..858: mol_type = other DNA
atgggtactcctggcgaaggactcggacggtgctctcacgccctgatccgcggtgtcccagaaagtctagcatcaggagaaggggcaggagcgggattacccgcacttgacctagccaaggcccaaagagagcatggcgtgctggggggaaagctgagacagcgactaggccttcagctcctcgagcttcctcctgaagagagtttgcccctgggacctcttctgggagacacagccgtgatccaaggtgacacagccctgattacccgcccatggtcgccagccagacgccctgaggttgacggggtaagaaaggccctgcaggacctcggtctgcgtatcgtcgagattggggacgagaacgctactctcgatgggactgatgttctctttactggcagagaattcttcgtgggtcttagtaaatggacaaatcatagaggggcagagatcgtggctgatacttttagggacttcgctgtcagcacagtgcctgtgtcaggaccctctcacctgcggggtttgtgtggcatgggcggtcctcgaactgtagtggccggatcgtctgatgctgctcagaaagcagttcgagccatggccgtgctcacggaccacccatacgccagcctgacacttccggatgatgcggctgccgattgcctgtttctgagacctggccttcccggtgtgcctccctttctcctccacaggggaggtggcgatcttccgaattcccaggaggcactccagaagctgagcgacgtgacactggtcccagtgagttgctctgaactcgaaaaagccggagccggattatccagcttgtgcctggtcttgagcactagaccccactcctag

SEQ ID NO: 220822 - DNA, 858 bp, synthetic construct
  misc_feature 1..858: note = Description of Artificial Sequence: Synthetic coding sequence
  source 1..858: mol_type = other DNA
atggggacaccgggtgaaggtctgggaagatgtagccacgctctgattcgcggtgtgcccgaaagcctggcctcaggagagggcgcaggggctggcttgccagcactggatttagccaaggcgcaaagagaacacggggttttagggggtaaactgcgacagagactgggcctccaactactggagctccccccagaggagtctttgccactggggcctttgctcggcgacacagcggtgatccagggagacaccgcactgatcacccggccttggtcccctgccaggagacccgaagtggacggcgtgagaaaagcactgcaagacctcggactccgaatcgttgaaatcggcgacgaaaacgccacactcgatggcactgatgtactgttcactggtcgagagttctttgtgggattgagtaaatggaccaatcacagaggcgcagaaattgtcgctgatactttccgggattttgccgttagcacagttcccgtctcaggcccttcccacctccgcggactgtgtgggatggggggacccaggacagtggtcgccggaagtagcgacgcagcccagaaggccgttagagccatggccgtcctgacagatcacccttacgccagtctaactttgccggatgatgccgctgccgactgtctgtttctgcgacccggactgcctggtgtccctccattcctactccatcgagggggaggtgatcttccgaattcccaggaggcacttcaaaagctgagtgatgtaaccttggtgccagtgtcctgctccgagcttgagaaagcaggggcaggtctgagttcgctgtgcctcgtgctgtctacgaggccccactcttag

SEQ ID NO: 220823 - DNA, 681 bp, synthetic construct
  misc_feature 1..681: note = Description of Artificial Sequence: Synthetic coding sequence
  source 1..681: mol_type = other DNA
atggggactcccggagaagggctgggacgatgcagtcacgcgctcataaggggggtgcctgagtcacttgcctcgggagagggtgccggagccggtctccccgcactcgacctcgcaaaagcacaacgcgagcacggagtgctgggaggaaaactgaggcagcggctaggtctccagctgctagagctgcccccagaagaaagtctaccgttagggccattactaggcgacactgccgtcatccaaggggatactgcccttattactcggccatggtcacctgcccgtcgcccagaggtcgatggcgtgcgcaaggcactgcaggacctgggcttgaggatagtagagatcggggacgagaacgccaccttagatggcacagatgtgctgttcactggtagagaattctttgtggggctgtccaagtggactaaccaccgcggagcagaaatcgtagctgacacctttagggattttgcagtatccactgtgccagtatcgggtcccagccacctccggggtttgtgtggcatggggggacctcgcactgtagtagccggttccagcgatgccgctcagaaagctgtgcgcgctatggcagttctgaccgaccacccctatgctagccttactctccctgatgacgcagcagctgattgtctcttcctgcggccaggttag

SEQ ID NO: 220824 - DNA, 858 bp, synthetic construct
  misc_feature 1..858: note = Description of Artificial Sequence: Synthetic coding sequence
  source 1..858: mol_type = other DNA
atgggcacacctggcgaaggcctgggcaggtgcagtcacgccttgatccgcggtgtaccagagtcgctggcttctggcgagggcgctggtgccggacttccagctctcgacttagcgaaagcccagagggagcacggggtcctgggcggtaaattgcgccagaggctagggcttcagttgctggagctgcctccagaggagagcttgccgctgggccctctgctgggggacaccgcagtcatacagggcgataccgccctgataaccaggccttggtccccagccagacgacccgaagtagacggagtgaggaaagctcttcaagacctgggacttagaattgtagagattggcgatgagaacgccactttggatggaacggacgtcctatttactggcagagaatttttcgtggggctcagcaaatggaccaaccatcgaggagccgagatcgtagcagatactttcagggacttcgccgtgtcaacagtgccagttagcgggccttcccatctgagaggcctctgcggaatgggtggcccaagaacggtggtggcaggaagttctgatgccgctcaaaaagcagtgcgagcaatggccgtgctgacagaccatccctacgcatccctgactttgcccgacgatgctgccgcagactgcctttttcttcggccaggcctccccggagtgcctccctttttgctgcataggggcggtggcgaccttccaaacagccaggaagctctccagaaactgtccgacgtcaccctggtgccagtgtcttgtagcgagttagagaaggccggagcaggactcagctccctgtgtctcgtgttaagtactcgaccgcattcatag

SEQ ID NO: 220825 - DNA, 681 bp, synthetic construct
  misc_feature 1..681: note = Description of Artificial Sequence: Synthetic coding sequence
  source 1..681: mol_type = other DNA
atgggaacgcccggagaaggtctcggcaggtgttcacacgcactgatccggggtgtgccggagtctttggcctccggcgagggcgcaggtgctgggctgcctgccttggacctggccaaagcacagcgggagcacggtgtcctgggcggaaagcttagacaacggttaggactgcagctgctagaactgccaccggaggaaagtttgccattgggtcctctgcttggcgacacggccgttattcagggggacacagcactcattacgagaccatggtctcctgctcgacgccctgaagtcgacggggttcggaaagcccttcaagacctcgggcttaggatcgtggagattggagacgaaaacgctaccttggatggcacagacgtgctcttcaccggccgtgaatttttcgtaggtctgagcaaatggactaaccaccgcggagccgagatcgtggccgacacttttagagactttgccgtgtcaactgttcctgtgtccgggccttctcatctgagaggactttgcggcatgggaggccctcggacagtcgtggccggatcctccgatgccgctcagaaagcagtacgcgcaatggcagtgctgactgaccatccatacgcttccctcacattacccgacgatgccgcagccgattgtctgttcttgcgacccggatag

SEQ ID NO: 220826 - DNA, 681 bp, synthetic construct
  misc_feature 1..681: note = Description of Artificial Sequence: Synthetic coding sequence
  source 1..681: mol_type = other DNA
atgggtacgcccggagagggcctgggtagatgtagtcacgctcttatcaggggcgtgccagaatccctcgcatctggagaaggggctggagccggactgcctgccttagacctcgctaaagcacagagagaacacggggtgcttggagggaagcttagacagcgcctgggactgcagcttcttgaactccccccagaagaatccctcccgctaggccctctcctgggcgatactgctgttatccagggagacacggctctgatcacacggccatggtcccccgcaagaagaccggaagtggatggagtgcgtaaggccctgcaggaccttggcctgcggatcgtggagattggcgatgagaatgccactctggacggaaccgacgtgctctttacaggacgcgagtttttcgtgggcctgagcaagtggacaaaccaccgcggtgctgaaatcgtggcggatactttcagagatttcgccgtatctacagtccctgtgtctggtccttcccatcttcgcggactgtgtggcatgggaggcccaaggactgtcgtcgcaggctcgtctgacgctgcacagaaggcggttcgcgctatggcagtgcttaccgaccacccttatgcttccctgacactgccagacgacgccgctgcagactgtttgttcctgagaccaggatag

SEQ ID NO: 220827 - DNA, 858 bp, synthetic construct
  misc_feature 1..858: note = Description of Artificial Sequence: Synthetic coding sequence
  source 1..858: mol_type = other DNA
atgggcaccccgggtgaaggcctaggcagatgttcccatgctctaataagaggagtcccagaatccttggcgagcggcgagggagctggagctgggctcccagctctggatttggctaaagcgcagcgggagcacggcgtcctggggggaaagctgcgccagagattggggctgcaactactcgagttgcctcctgaggaatcactgcctttaggcccactcctgggggacaccgcagtaatccagggcgacactgccctgattacccggccatggtcaccagccagacgcccagaagtggacggggttcggaaggcccttcaggacctgggactccggatagtggaaatcggcgacgagaatgctaccttggacggcactgatgtgctgttcactggtagagaattctttgtgggcctgagcaaatggaccaaccaccgcggagccgagattgtggccgacacatttagggacttcgccgtctcgaccgtgccagtgtccgggccttcccacttgcggggactctgtgggatgggaggccctagaaccgtggtggcaggctctagcgacgccgctcagaaagctgtgcgggcaatggccgtgcttaccgaccacccttacgctagtctgactctcccagatgacgcagcagccgactgtctgtttctgcggccaggcttacctggggtgcccccttttctgctgcaccggggtggcggagatctgccaaactctcaggaagccttgcagaagttatccgacgtaacactggtgcctgtgtcctgcagcgagttagagaaagccggagcagggctgtcctccctttgtcttgtcttatcgacgcgaccacactcatag

SEQ ID NO: 220828 - DNA, 681 bp, synthetic construct
  misc_feature 1..681: note = Description of Artificial Sequence: Synthetic coding sequence
  source 1..681: mol_type = other DNA
atgggtaccccgggagaaggcctggggcgttgttcccatgcgctgattcgtggagtgcctgagtccctggcatccggtgagggtgcgggtgctggtctccctgctttagatctggccaaagcgcagcgggaacatggggtgctcggcggaaagctccgacagagacttgggctgcaattgttggagctgcctccggaggagtcactccccctaggtcctctgctgggcgacacagctgtgatccagggcgacaccgctttgattaccagaccctggagccccgcaagacggccagaagtcgacggcgtacgaaaggcactgcaagatctcggcctccgcattgtggagatcggagacgagaacgctactcttgacggaacggatgtgctgtttactggacgcgagttttttgttgggctcagcaagtggactaatcaccgaggagctgagatcgtcgctgacacatttcgggatttcgcggttagcacagtgcctgtgagcgggccatcacacctaaggggcctctgtgggatggggggtcctagaactgtggtcgcgggttcatctgatgccgcacagaaagctgtgcgcgctatggctgtcctcaccgatcacccttatgcgtcacttactctgccagatgacgcggcagcggattgcctgttccttagaccgggatag

SEQ ID NO: 220829 - DNA, 567 bp, synthetic construct
  misc_feature 1..567: note = Description of Artificial Sequence: Synthetic coding sequence
  source 1..567: mol_type = other DNA
tagcgtaggcctgaagtggacggagtcagaaaggcccttcaggacctggggctcaggattgtggagattggcgatgagaacgctacgctagacggcactgacgtcctattcaccgggagggaatttttcgtggggctctcaaagtggacgaatcataggggtgccgagatcgtggccgatacttttcgcgatttcgccgtgtccaccgtgccagtgagcggaccctcccacctcagagggctgtgtggcatgggcggacctaggactgtagtggctggctcttccgacgctgcacagaaagctgtcaggatgactcagctccttacagtgtcctttttcgtgctgggatgtctggtctgtccactgtcctcttgtacggtggaagtggggatttgcccaactgccaggagacactgcaggtcatcattgatgagcccatggtacctgtgtccagcccagaactggcgacgcctggcaccaggctccgctccgagtgcttggtgtagcgctcacgcgcctacagcggagggtctggcgctcggctactgttggccaggcgttggttag

SEQ ID NO: 220830 - DNA, 567 bp, synthetic construct
  misc_feature 1..567: note = Description of Artificial Sequence: Synthetic coding sequence
  source 1..567: mol_type = other DNA
tagagaaggcctgaggtggatggagttcgcaaggctttacaggatctgggcttgcgaatagttgagatcggcgacgagaacgccacgctggacgggacggatgttctgtttacagggcgagagttttttgtgggattgagtaagtggactaatcaccgcggtgctgagattgtagcggacacctttcgggattttgcagtgtctaccgtgccagtgagcggaccaagtcatctcaggggcctatgtggcatggggggtccgagaaccgtggtggctggctcgtcagacgctgcccagaaagccgtgcgaatgactcagctgctaaccgtgagcttcttcgtcctgggttgtctagtatgccctctaagctcttgcacagtagaggtgggcatttgccctaccgccaggcgccattgcagatcaagcctgatgagcccttggtacttgtgccccgctcagaattggagacgactagcgccaggatcggcgccttccgcgtggtgctccgctcacgcccctacagctgaaggactggccctaggctactgttggcccggagtgggttag

SEQ ID NO: 220831 - DNA, 681 bp, synthetic construct
  misc_feature 1..681: note = Description of Artificial Sequence: Synthetic coding sequence
  source 1..681: mol_type = other DNA
atggggacacccggagaaggcctcggtcggtgtagccatgcgctcatcagaggagtccctgagagcttggcatctggggagggagcgggagctggactgcctgcactggatcttgctaaggcccagagggagcacggggtcctgggcggaaaactgcgccagcgcttgggcctccagttgttggaattaccacctgaggaatccctgccccttggcccactgctgggcgatacagctgttattcagggagacactgcactgattacacgaccctggtcccctgcgcgacgcccagaagtggatggcgtgcgaaaggccctgcaggatctggggcttaggatcgttgaaatcggtgatgagaatgctactctggatggcacagacgtgcttttcaccggcagagagttttttgtcgggctttctaagtggacgaaccataggggcgcagagatcgttgcggataccttcagagattttgctgtatcaacggtccctgtaagtggaccttcccatctgaggggactgtgtgggatgggcggacctagaactgtagtggccggatcaagcgatgctgcccaaaaggctgtgcgggctatggctgtgttgaccgaccacccttatgctagcctgacccttcccgatgacgctgccgcagattgtttgttcctgagacctggatag

SEQ ID NO: 220832 - DNA, 858 bp, synthetic construct
  misc_feature 1..858: note = Description of Artificial Sequence: Synthetic coding sequence
  source 1..858: mol_type = other DNA
atgggcacccctggggaaggcttgggtcggtgcagtcacgccctgatccgaggggtacctgaatccctagcatcaggagagggcgcaggtgcaggcctccctgcactggacctagccaaagctcagcgcgagcacggcgtgttgggagggaaacttcgccaaagacttggacttcaacttctagagctacctcccgaggagtctctgcctctggggccactcctaggggacaccgctgtaatacaaggtgataccgcgctgataactaggccctggagtcctgcaagaagaccagaggtggatggcgtccggaaggctctgcaggatctaggcctgcgcattgtcgagattggcgacgagaatgccacactcgacgggacggacgtgttatttaccggaagagaatttttcgtgggactgagcaaatggactaaccatcgcggagcagagatcgttgcagacaccttcagagatttcgctgtctctacggtacccgtgtcaggcccttcacacctgcggggactttgtggcatggggggtccacgaaccgtagtcgctggtagtagtgacgccgctcaaaaggctgtcagggccatggccgtgctgactgaccacccatacgcttcactaacactccccgatgatgccgctgcagactgcctctttttgcgaccgggactcccgggagtgcccccattcttgctgcatcgcggaggcggtgatctacctaattcccaggaagctttacagaagttgtctgatgtgaccctagtgccagtgagctgcagcgagttagagaaggccggagccggactctcatctctatgtctcgtactaagcaccaggccacactcctag

SEQ ID NO: 220833 - DNA, 711 bp, synthetic construct
  misc_feature 1..711: note = Description of Artificial Sequence: Synthetic coding sequence
  source 1..711: mol_type = other DNA
atggggacccccggtgagggcctaggaagatgttctcacgccctcataagaggggtgcctgaatcattggcttctggcgaaggcgctggggctggcttgccagccttggacctggcaaaagcacaacgggagcacggcgtcctcggaggaaagctgcgtcagagactcgggctccaactgttagaactacctcccgaagaaagtttgccactaggacccctcttaggcgatactgccgttattcagggagacacggctcttatcacaagaccctggagtccagctcgcagaccagaagtggatggagtcagaaaagctctccaggaccttggcctgcgcatcgtggaaatcggcgacgagaatgctactttagacgggacggacgtattgtttacagggagagagttcttcgtggggttatctaaatggacaaaccacaggggtgccgagatcgtcgcagacacattccgggatttcgccgtgtcaacagtaccggtaagtggtccttcacaccttcgaggcttgtgcgggatgggtgggccaagaactgtcgttgcgggatcttcggacgcggcacagaaggcggtccgcgcaatggctgtactgacagaccacccatacgcaagcctgactctccccgatgacgcggctgctgactgccttttcctgcgcccaggattgcctggagtcccaccatttctcttgcattag

SEQ ID NO: 220834 - DNA, 711 bp, synthetic construct
  misc_feature 1..711: note = Description of Artificial Sequence: Synthetic coding sequence
  source 1..711: mol_type = other DNA
atgggcactcccggagagggtctggggaggtgttcccacgctctgatccggggtgtgcctgagagcctggcatcaggcgagggagcaggagctggactgcctgccttggacctggcaaaagctcagcgagagcacggagttctcgggggaaagttaaggcaacgactaggcctccagctcctcgagctcccacccgaagaatcactgccactggggccattgttgggcgacacagctgtgattcagggcgatactgctctgattactcgaccctggagtcccgcacgacggccagaggtagatggagtccgtaaggcactgcaggatctcggtttgcggattgtggagattggcgatgaaaacgctacactggacgggacagatgttctgtttacagggcgagagttcttcgtcggcctttcaaagtggacgaatcatcggggagccgaaatagtcgctgacacctttcgcgactttgctgtctctaccgtcccagtaagcggtccaagtcacctgcgcggtttgtgtgggatgggtggacctagaaccgtggtcgctggcagctccgacgccgctcagaaggccgtcagggccatggctgtgctgacagaccacccatacgcaagtctcacactgccagacgacgcagccgctgactgtctgttcctgcgcccagggttgcctggagtgcctccatttctgttgcactag

SEQ ID NO: 220835 - DNA, 858 bp, synthetic construct
  misc_feature 1..858: note = Description of Artificial Sequence: Synthetic coding sequence
  source 1..858: mol_type = other DNA
atgggcaccccaggagagggactcgggagatgctctcatgccctaatacgcggagtgccagagtctctggctagcggagagggagccggtgccggtctgccagccctggacctggctaaggctcagcgagaacacggggtgctggggggaaagctgcgccagcggctgggtctacaactgctggagctgcccccagaagaaagcttgcccctcgggcctctcctgggagataccgccgtcatccagggtgacaccgccttaattacgcggccatggagccccgcaagacggccagaggtagatggcgtccgtaaggcattacaggacttggggctccgtattgttgagatcggcgatgagaacgccacactagatgggacagatgttctgttcactgggagagaattcttcgtcggcctgagtaaatggaccaaccacaggggcgctgagatagttgcagacacctttcgggattttgctgtatctactgttccagtctctggtccatcacacttgcgcggattgtgcgggatgggtggccctaggaccgtagtggccggaagcagtgatgccgcacaaaaagctgttcgagcgatggcagtcctgacagaccatccatacgcgagtctgaccctccccgacgatgccgctgctgattgtctctttttgcgccctgggctgcctggagtgccccctttcctcttacaccgcggagggggtgacctgccaaactcgcaagaagcacttcaaaaactgagcgacgtcacacttgtgcccgttagctgctccgagctcgaaaaagcaggagccggtctcagctcgctgtgtctggtgctcagcacccgcccacactcttag

SEQ ID NO: 220836 - DNA, 678 bp, synthetic construct
  misc_feature 1..678: note = Description of Artificial Sequence: Synthetic coding sequence
  source 1..678: mol_type = other DNA
atgggcacaccgggtgagggattaggtcggtgttcccacgccctaattagaggcgtacctgagtctctcgctagcggtgagggagcaggggcaggcctgcctgccctggacttagccaaggcccagcgtgagcatggcgttctgggcggaaaactccgccagagactgggcctgcaactattggaattaccacctgaagagtcccttcccctgggccctctgctgggggatacggccgtgatccagggcgacacggcactaatcactcggccatggagcccagcacgcaggccagaagtggacggtgtccgtaaggctctgcaggatctggggttacggattgtagagataggagacgaaaacgcaacacttgacggaacagacgtcctgtttactggacgcgaattttttgtaggattgagcaaatggactaaccaccgcggagctgaaatcgtggccgacacgtttagggattttgctgtttctactgttccagtgagtggcccttcacacttaaggggtttgtgtggaatggggggtccacggacagtggtagccggttctagtgacgcggctcaaaaggctgtgcgcgctatggcagtgttgacagaccacccatacgcttctctgacactccccgacgacgcagcagctgattgcctgtttctgagaccctag

SEQ ID NO: 220837 - DNA, 858 bp, synthetic construct
  misc_feature 1..858: note = Description of Artificial Sequence: Synthetic coding sequence
  source 1..858: mol_type = other DNA
atggggacgccaggtgagggcctcggcagatgtagccatgcgctgattcggggtgtcccagagtcacttgccagtggggagggcgcaggagccggattaccggctctcgatctggccaaagcccagcgggaacacggcgtgctggggggtaaactgcgacagcgtttgggcctacaattactcgaactaccaccagaagagtccctgccgctaggccctttacttggagatactgccgtgattcagggtgatacagccctgatcacaaggccgtggtcaccagcacgccgtccggaggtcgatggagttagaaaggccctgcaggacttaggtcttcgcattgttgagatcggggacgagaatgctaccctggacgggacagatgttctcttcactgggagagaattctttgtgggactaagcaagtggacaaaccataggggcgctgaaatagtggctgacacctttagggattttgctgtgtccaccgttccggtttctggccctagtcatctaagaggattatgtggcatgggcggaccgagaacggtggttgctggcagctctgacgcagcacagaaggctgttcgtgccatggcagttctgaccgaccatccttacgcctcgctaaccttgcctgatgacgctgcggcagattgtcttttcctcagaccagggttacctggcgtgcccccttttctgctgcacaggggcggtggggatttgcctaactcacaggaagccctgcagaagttgagcgacgtcaccctagtgcccgtgtcttgctctgagctagagaaagcgggagccggacttagttccctgtgcctggttcttagcacacggccacactcctag

SEQ ID NO: 220838 - DNA, 567 bp, synthetic construct
  misc_feature 1..567: note = Description of Artificial Sequence: Synthetic coding sequence
  source 1..567: mol_type = other DNA
taaaggagacctgaggtcgacggcgtacggaaagcgcttcaggacctgggcctcagaattgtggagatcggcgacgaaaatgccacattggacggcacagacgtactctttacgggccgtgagtttttcgtcggccttagcaaatggacgaaccaccgtggagcagagatcgtggccgatacgtttagagattttgcagtctccacggttccagtcagtgggccaagtcacttgcgtgggctctgtgggatgggaggacctcgcacggtagtcgcgggtagctctgacgcggctcaaaaggccgtacggatgacacaactcctgacggtgagcttcttcgtcctggggtgtttagtgtgtccgctgagcagctgcacggtggaggtcgggatttgccccactgccagaaggcactgccgttcatcgttgatgagcccctggtatctttgtcctgcacagaattggcgacgcctcgctcccggaagtgccccttcggcctggtgtagtgcacatgcgccaactgcagaaggacttgcactgggatactgctggcccggagttggctag

SEQ ID NO: 220839 - DNA, 567 bp, synthetic construct
  misc_feature 1..567: note = Description of Artificial Sequence: Synthetic coding sequence
  source 1..567: mol_type = other DNA
tagagaagaccagaagtggatggcgtgcgcaaggccctgcaagatctcgggctgagaatcgtggagattggggacgagaatgctacccttgacgggactgacgttttattcactgggcgagagttcttcgtgggactgtccaaatggaccaatcatcggggtgctgagatagtagccgacacttttcgggacttcgcagtctctaccgtgccagtgtccggaccttctcatctgcgcggactgtgtggaatgggcggtccgaggaccgtggtggctgggtctagcgacgctgctcagaaggcagtaaggatgacacagctacttaccgtgtcctttttcgtcctggggtgtctggtgtgcccactgtcatcctgtaccgtcgaagttggcatctgcccaacagctcggcgtcactgcaggtcatcccttatgagtccttggtacttgtgcccggctcagaactggaggaggctggcccctggttcagccccatctgcctggtgtagtgcccatgcccctacagccgagggactggcgctaggttactgctggccaggagtgggatag

SEQ ID NO: 220840 - DNA, 858 bp, synthetic construct
  misc_feature 1..858: note = Description of Artificial Sequence: Synthetic coding sequence
  source 1..858: mol_type = other DNA
atgggaacccccggagaggggctgggccgttgcagccatgcactgatccgtggcgtccccgagtctcttgcttctggcgagggggcaggagccggacttcccgcacttgacctggccaaggctcagagggagcacggcgtattgggaggcaaactgcgccaacggctgggcctgcagctcctggaattacccccagaggaatctctcccgctgggtcccttacttggagatacagcagtgattcagggggacaccgcactgataaccagaccttggagcccagcgaggcgcccagaggttgacggcgtgcgcaaggcgctgcaagacctgggcctacggattgtcgagatcggggacgaaaacgccacgctagatgggactgacgtgttgtttactggcagggagttctttgtgggcctgagcaagtggactaaccatcggggagctgagatagtggccgatacgttccgggattttgccgtaagtaccgtcccggtctccggacccagtcacctaagggggctctgcgggatgggtggaccgaggaccgtggtggcgggatcatccgatgccgctcagaaagctgtgcgtgcaatggctgttctgacagatcacccttacgcctcgctcacactgcctgacgacgccgctgccgattgtctgtttctgagacctggactccccggagtccctccatttttgctgcaccgcggtggcggtgacctgcccaactcgcaagaggccttgcagaagctgtccgatgtgactctggtacccgtctcatgtagtgagctagagaaagctggagcaggattatcctctctctgtctggtactgtctacgcgcccacactcatag

SEQ ID NO: 220841 - DNA, 711 bp, synthetic construct
  misc_feature 1..711: note = Description of Artificial Sequence: Synthetic coding sequence
  source 1..711: mol_type = other DNA
atgggcacaccaggagaagggcttggcaggtgttcacacgcactgattcggggagtgccagagagcctagcctctggcgagggcgcaggggcaggactgcccgctctagacttggcaaaggcccaacgtgaacacggcgttttggggggaaagttgcgccaaaggcttggcttgcagctgctggaattaccgcctgaagaatccctgccccttggtcccctccttggtgataccgccgtgattcagggtgacacagccctgatcacaagaccctggtctcccgctcgcagacccgaggttgacggggtgagaaaggccttacaggatctgggcctgagaattgtggagatcggggacgagaatgcaaccctggacggcaccgatgttctattcactggtcgcgagttcttcgtgggcctcagcaagtggaccaatcatcggggtgctgaaatcgtagcagacactttccgggatttcgccgtcagcactgtcccagtgtctggcccttcgcacctcagaggtttatgtggaatgggcggacctaggaccgtggtggcagggtccagcgatgctgcgcagaaagcggtgcgcgctatggctgtgctgacggatcacccttacgcctcactgacacttcctgacgatgcagcagctgactgcctatttctccgacctggccttcctggcgtccccccatttctgctgcattag

SEQ ID NO: 220842 - DNA, 567 bp, synthetic construct
  misc_feature 1..567: note = Description of Artificial Sequence: Synthetic coding sequence
  source 1..567: mol_type = other DNA
tgaaggcggccagaggtggatggggtccggaaggctttacaagacctaggattgcggatcgtggagataggtgatgagaacgctacactggatggcactgatgtgttatttaccggtcgagagttttttgtaggccttagcaaatggactaaccatcggggagcagagatagtcgccgacacattccgcgattttgccgtcagcacagtaccagtctccggcccaagccacttacgcggtctgtgtggcatggggggtccgcgaacagtggttgccggatcaagtgacgccgcacagaaagctgtcagaatgacccaactgctgaccgtgagcttctttgttctggggtgcctggtgtgcccccttagcagctgcaccgtcgaagttggtatctgccccacggcccgacgccattgtcggtcgtcactaatgagcccttggtatctgtgtccggctcagaattggcggaggctcgcgccaggctccgctccttcagcctggtgtagtgcacacgcaccaactgccgagggtttggcacttggctattgttggccaggcgttgggtag

SEQ ID NO: 220843 - DNA, 858 bp, synthetic construct
  misc_feature 1..858: note = Description of Artificial Sequence: Synthetic coding sequence
  source 1..858: mol_type = other DNA
atgggaacacccggtgagggccttggcaggtgttcccatgctctgatccgaggcgttcctgagtcgttggcatctggtgaaggtgcaggtgcgggactgcccgcactggatcttgcaaaggctcaacgcgagcacggtgtgctaggcggtaagcttcggcaacgattaggtcttcagctgctcgaattgcctccagaggagagtctccccctcggaccactgctgggtgatactgccgtgatacagggcgacacagctctgattacccgaccatggtcccctgctagacgacccgaggtggatggggtgcgcaaagccctgcaggatttgggcctcaggatcgttgaaatcggagacgaaaacgccaccctggacggtactgacgtcctgttcacgggcagagaattctttgttggactgtctaaatggacgaatcaccggggagcggagatcgtggcagacacgttccgcgatttcgcagtctcaactgtccctgtgtccggtccatcacatctgcgcggactctgtgggatgggagggccacggacagtggttgctggatcttctgatgccgcacagaaagccgtgcgcgcaatggccgtgctcacagaccacccctacgcgagcctgaccttgcccgacgatgcagccgctgattgcctcttcttacggcctgggttgccaggtgtacctcccttcctcctccaccgcggagggggtgacttacctaactcacaggaagccctgcagaagctctccgacgtgaccctggtgccggtatcttgctctgagcttgaaaaggcaggggcaggcttgagcagcctgtgtcttgtgctgtcaaccagaccacacagctag

SEQ ID NO: 220844 - DNA, 858 bp, synthetic construct
  misc_feature 1..858: note = Description of Artificial Sequence: Synthetic coding sequence
  source 1..858: mol_type = other DNA
atgggaacaccaggcgaagggttgggccgatgttcacacgccctgattcgcggtgtgcccgagtccttagctagcggagaaggcgcaggggctgggttgcctgctttggacctagccaaagcgcagcgagaacacggagtgcttggcggaaaattacggcagagactggggttacagctcctagagctgcccccagaggagtctctccccttagggcctcttcttggagatacagccgtgatccaaggcgacactgccctgatcaccagaccttggtctcctgccaggcggcctgaggtcgatggggtcagaaaagctttgcaagacctgggcttgcggatcgtagagatcggcgacgagaatgctaccctggatggcaccgatgtgctttttactggacgcgagttctttgtaggcttgtccaagtggaccaatcatcgcggtgctgagatcgtggcagataccttccgagatttcgctgttagtaccgtgcccgtcagcgggcctagccatctccggggactgtgtggcatgggcggtccgaggacggtcgtcgccggatcatctgatgccgctcagaaggccgtgcgagccatggcggtgttgacagaccatccctacgccagcctgacactccccgatgatgcagccgctgattgtctgttcctccggcctggactgcctggtgtacccccattcctgctccatcgcggtggtggcgacttacccaactcccaggaggctctacagaaactgagtgatgtcaccctggtgccggtgtcctgcagtgagttggaaaaagcaggagcaggattgtcaagcctatgtctcgtactatcaacacggccacacagctag

SEQ ID NO: 220845 - DNA, 711 bp, synthetic construct
  misc_feature 1..711: note = Description of Artificial Sequence: Synthetic coding sequence
  source 1..711: mol_type = other DNA
atgggcactcccggagaaggtctgggcaggtgttcgcacgccctaataaggggggtacccgagtccctggcttctggtgagggcgctggcgcagggctcccagcattagatctagccaaggcccagagggagcatggggtcctgggtggcaaactgagacagcgcctaggattgcagctgctggagcttccgcctgaagaatctctgcctcttggtcccctccttggcgacacggcagtcatccaaggagataccgctctcattactcggccatggtccccggctagacgtcccgaagtagacggagtaagaaaagctctgcaggacctgggcctgcgcatcgtggaaataggggacgagaacgccacccttgatggaaccgacgttctctttactgggagagagttcttcgtaggactgagcaaatggactaaccaccgaggcgctgaaattgtggcggacacgtttcgggactttgccgtcagcaccgtccccgtgtcagggccaagccatctgcggggactgtgcggcatggggggacccagaacagtggtcgccggaagctcagatgccgcacagaaggcggttcgcgctatggccgttctgactgatcatccgtatgcctctctgactctgcctgacgacgctgccgcagattgtctttttctgaggcctggtcttccgggagtgcctccatttctcctgcattag

SEQ ID NO: 220846 - DNA, 711 bp, synthetic construct
  misc_feature 1..711: note = Description of Artificial Sequence: Synthetic coding sequence
  source 1..711: mol_type = other DNA
atgggaacgcccggtgaagggctagggagatgtagccacgctctcatcagaggcgtgcctgaaagcctcgcgagcggcgagggcgctggggcaggattacctgctctcgacctggctaaggcacaaagggagcacggtgtgctgggagggaaactcagacagcggttgggtttgcagttattggagctgcctcctgaggagtcacttccactgggtcctctgctgggagatactgcagtaattcaaggagataccgccctgatcacacgtccctggagccctgccaggagaccagaagtggatggggtgagaaaggccctgcaagatctcggcctgcgcatcgtcgagataggcgatgaaaacgcaacactagacggaacagacgttctattcactggccgagaattcttcgtggggctgagtaaatggacaaatcataggggtgccgagatcgtggcagatacattccgggacttcgcagtgagcaccgttccagtgtcaggaccatctcacctgagaggactgtgtggcatgggcggaccaaggactgtcgtggcgggatcgagcgacgctgctcaaaaggctgtgcgggcaatggcagtgctgactgatcacccttatgcttcactcacacttccagatgacgccgcagctgattgcctatttttacgaccagggctgcccggagtgcctccatttctgttacattag

SEQ ID NO: 220847 - DNA, 2601 bp, synthetic construct
  misc_feature 1..2601: note = Description of Artificial Sequence: Synthetic coding sequence
  source 1..2601: mol_type = other DNA
atgctccggcctggagcacaattgctgcggggactcctgcttcgatcttgccctcttcaagggtctccagggagacccaggtcagtatgcggacgagaaggggaagaaaagcccccactgagtgctgagactcagtggaaagatcgagctgagaccgttatcatcggaggtggctgcgtaggggtatcgctggcctatcacttggccaaggcgggaatgaaggacgttgtgctgctggagaaatctgagttgactgccggaagcacctggcacgctgccggactgactacttatttccatcctggcatcaatcttaaaaaaatccactacgacagtatcaagctgtatgagaaattagaggaagagacgggccaagttgtcggattccaccagccagggagcatccgattggccacaactcctgttagggtcgacgagtttaaatatcaaatgactcgcactggctggcacgcaacagagcagtatctcatcgagccagagaaaattcaggagatgtttcccctcctgaacatgaacaaagtgttggcagggctttacaatcccggagatggacacatcgacccttactcccttaccatggctctggcagccggagctcgtaagtgtggcgcactgttgaagtatcccgcaccagtgacgtccctgaaagccagatccgacggcacttgggacgttgagaccccgcaggggtctatgcgggctaaccggatcgtaaacgctgcgggattttgggctagggaggtgggcaagatgattggcttagagcacccattaatccccgtccagcatcaatacgtggtcacgagtactatatcagaggtgaaggctctgaagcgggaacttcctgtcctccgtgacctggaggggagctactatttacgacaggaacgcgatggcctcctgttcggcccttacgaatctcaggagaagatgaaagtgcaagactcatgggtcactaatggcgtgccacctggatttgggaaggagctgttcgaaagcgatttggacagaattatggagcacattaaggcagccatggaaatggtgcccgtgttgaagaaggccgacatcatcaatgtggtgaacggccctattacctactcgcctgacatcctgccaatggtgggaccccaccagggagtgcgaaattactgggttgcgatcggatttggctacgggatcatccacgccggtggggtgggaaaatacttatccgattggatcctgcatggcgagcccccattcgacttaatcgaactggaccctaatagatatggcaaatggaccacaactcagtatactgaggcaaaggcccgagaaagttatggttttaacaacatcgtcgggtaccccaaggaggagagattcgccggaaggcctacccaaagagtgtctgggttataccagcggcttgagagcaagtgttccatgggcttccatgcaggctgggaacagccccattggttctacaagccaggacaggacacccagtatcgtccttcgttccggcgaacaaattggtttgaaccagtaggttctgaatacaagcaagtaatgcagcgtgttgctgtcacagacttgtcaccatttgggaaattcaatattaaaggtcaagatagtattcgactactggaccacttgttcgccaatgttatccccaaggtaggatttaccaatataagccatatgttgacacctaaaggcagagtgtatgccgaacttaccgtttctcaccaatcacccggtgaattcctgttaataacagggagtggatccgaattacacgacttgagatggatagaggaagaagctgtcaaaggtggatacgacgtcgagatcaagaatatcaccgacgagttaggagtgcttggtgtcgcaggaccccaggcaagaaaggtgctgcagaaactgactagtgaggacttgtccgatgacgtcttcaaattcctccagacgaaatccttaaaggtgtcaaatattcctgtgactgctatccgcatctcctacactggagaactcggttgggagctgtatcataggcgggaagacagtgtcgcgttgtacgacgccataatgaacgccggacaggaggaaggcatagataattttggaacgtatgcaatgaatgctttgcgcttagaaaaagcgttccgtgcatggggactggagatgaattgcgacactaatccattagaagctggtctggagtattttgtgaagttgaataaacctgctgacttcataggaaaacaggctcttaagcagattaaagccaaggggctgaagcgcaggctcgtgtgtctgaccttggccacagacgatgtcgatcctgaagggaatgagtcaatttggtataacggtaaagtcgtgggcaataccacttccggatcttacagttactccattcagaagagtttggcattcgcatacgtcccagtgcagctatctgaggtaggacagcaggtggaagtggagttactggggaaaaattaccccgctgtaattatccaggagccgctggtactgacggaaccaacaaggaacagactgcagaagaaaggtggaaaggacaagacgtag

SEQ ID NO: 220848 - DNA, 1722 bp, synthetic construct
  misc_feature 1..1722: note = Description of Artificial Sequence: Synthetic coding sequence
  source 1..1722: mol_type = other DNA
atggagcgccaatctcgcaactcagacaattggagatggctgtgctggtgtgagtctggcctttcgcccggacagtctagggacgagagatgcggcccagccggtgagattcgagctcacggttggatttatctggcaagacgattttgggcgagagaagtaggcaagatgataggtctcgagcatccccttattcctgtgcagcatcagtatgtggttaccagcaccatctccgaggtgaaagccctgaagagggagttgccggtgctccgtgatctggagggcagttactaccttagacaagagcgcgatggcctgctgttcggcccttatgaaagtcaggaaaaaatgaaggtgcaggattcttgggtgactaatggcgtcccacctggattcgggaaggagctgttcgagtcagatttggatagaattatggaacacatcaaggccgctatggaaatggtccctgttctcaagaaagccgatatcatcaatgttgttaacggcccaattacctattcacccgacatattgccaatggtgggcccacaccaaggcgtcaggaattactgggtggcgattgggtttggctacgggatcattcatgctggaggcgtcggcaaatatttaagtgactggatcctacatggagaacccccatttgatctgatcgagctggaccctaatcgctacgggaaatggaccaccacacaatacacagaggcgaaggcgagagagagctatgggtttaataatatcgtcggttatccaaaggaagagcgcttcgctggacgacctacacagcgggttagcggcttatatcagaggctggagtccaaatgctccatgggctttcacgccggatgggagcagccgcactggttttacaaacctggacaagacactcaatacagaccttccttcaggcgcactaactggttcgaaccggtcggatctgagtataaacaggtaatgcagcgggtggccgtgacggacctgtcgcctttcggaaaatttaatatcaaagggcaagacagtattaggctgcttgatcaccttttcgcaaatgtgatccccaaggtaggctttaccaatataagtcacatgcttacgcctaaggggagagtgtatgctgaactcaccgtgagccatcaatctcccggtgagtttttgctgattacggggagcggatcagaattgcacgatctgagatggatcgaggaagaggcggtcaaaggtgggtacgacgttgaaatcaagaacattacagacgagctgggcgtacttggggtggcaggccctcaggcccgtaaagtgctgcagaaactgacttctgaggatctgagtgacgacgtgtttaaattcttgcagactaagagcctgaaggttagcaatatcccagttactgccataaggatttcctacaccggggagctaggctgggaactctatcaccgcagagaggacagtgtagcgttgtatgacgcaatcatgaatgccggtcaggaggagggcatcgacaactttggcacctatgctatgaacgctctgcgcctggagaaggccttccgggcatgggggctggaaatgaattgcgatactaatccgctcgaggcgggtctagaatattttgttaaattaaacaaagatcagaactcttgtttcgctcattttaaggaagaaaatggctgggttagcagatgggccatccgcccttattag

SEQ ID NO: 220849 - DNA, 1842 bp, synthetic construct
  misc_feature 1..1842: note = Description of Artificial Sequence: Synthetic coding sequence
  source 1..1842: mol_type = other DNA
tacctgattgagccagagaaaatccaggaaatgttcccgctgcttaacatgaacaaagttctggccggtctttataatcctggtgatggccacatcgacccgtactccctcaccatggcacttgcagccggtgcaagaaagtgtggcgctctcctcaaataccctgcccctgtcacaagtcttaaggccagatccgacggaacctgggatgtcgagacgcctcagggcagcatgcgtgccaatcgcatcgtgaacgcagccggtttctgggctagggaagtgggtaagatgatcggactggaacaccctctaattcccgtccagcaccagtacgtggttactagcacaatcagcgaagtcaaagcgctgaaacgggaactgccagtgttacgggacttggaagggagctactatctgcggcaggaaagggacggcctattgtttggaccatatgagtctcaggagaagatgaaggtgcaggattcatgggtgacgaacggagtgccccctggatttggaaaagaactgttcgagtccgatctggatagaatcatggaacacattaaggccgcaatggaaatggttccagtccttaagaaagcggatataatcaacgtggtgaatggtcctattacatatagcccagacatcctgccgatggttggtccacatcagggagtcagaaactactgggtcgctataggttttggttatggcatcatccacgcaggaggagtaggtaaatatttatcagattggatcctgcacggagaaccacccttcgacttgatcgaactggatcccaacagatacggtaaatggacaaccacgcaatatacagaagccaaagcaagagagagctacggattcaataacattgtggggtatcccaaggaggagcgcttcgccggtcgcccaacccaaagggtttcgggtctgtatcaaagactcgaaagtaaatgctcaatgggctttcatgctggatgggaacagccccattggttttataagccaggacaggacactcagtaccgtccctcgttccgcagaaccaactggtttgagccggtcggcagcgaatataaacaggtcatgcagagagtcgcagttactgatttgagccctttcggcaagtttaacattaaggggcaagacagcattaggctcctggatcatctgtttgcaaacgttatccccaaagtgggtttcaccaacatttcacacatgctcaccccaaaagggagagtctacgctgagctgactgtatctcatcagagccccggagagtttctgctgattactggttcagggtccgagttacatgacctccgttggattgaggaagaagccgtcaaagggggttacgacgtggaaatcaagaatatcaccgacgaacttggcgttctgggagtcgcgggtccgcaggcacgcaaagtgctccaaaagcttacgtctgaagatctctccgacgacgtcttcaaattcctccagacaaaaagcctgaaggtctctaacatccccgtgaccgctatccgaataagctacacaggggaactgggatgggagttgtaccataggcgggaggatagcgttgctctgtacgatgccattatgaacgccggacaagaggaggggattgataatttcggaacatacgccatgaatgcgttgcgtctcgaaaaggccttcagggcctggggtctcgagatgaattgtgatacaaatcccctggaggctggacttgaatactttgtgaaactcaataaggatcagaactcttgcttcgctcactttaaggaagagaatgggtgggtgtctcgctgggccatccgtccttattag

SEQ ID NO: 220850 - DNA, 1875 bp, synthetic construct
  misc_feature 1..1875: note = Description of Artificial Sequence: Synthetic coding sequence
  source 1..1875: mol_type = other DNA
atgactcgaacaggatggcacgctacggagcagtacctcatagagcccgagaagattcaggaaatgtttcctctgctaaacatgaataaggtcctcgcaggtctttacaaccctggagacggtcatatcgatccttacagtctcaccatggcccttgccgcaggtgcacggaagtgtggcgctctgctgaagtatccggctccggtgacctccctcaaagcacgatctgacggtacatgggacgtggaaacgcctcaaggatctatgagagccaaccgcatagttaatgctgccggattctgggcgcgagaagtcggcaaaatgataggactggagcatcccctcatccctgtccagcaccagtacgtcgtgacgtcgacaatcagtgaagtgaaggccctgaaaagagagctgcctgtactgagggacctggagggcagctactacctgcggcaggagagggatggactgctgttcggtccttatgaaagccaggaaaaaatgaaagtgcaagacagctgggtgaccaatggtgtgccgcctgggtttggcaaagaactgtttgaatctgatctggataggatcatggaacacattaaggccgcaatggagatggttcccgtgctcaaaaaggctgatatcatcaacgtggtgaatggccctatcacgtacagtccagatatactgcctatggtgggcccacaccagggagtacgcaactactgggtagctatcgggtttgggtatggcataattcacgcagggggagtgggaaagtacctgtcggactggatcctgcacggggagcccccatttgatctcattgagctcgatcctaatagatatggaaagtggaccacaacccagtataccgaagcaaaggcacgcgagtcctacgggttcaataacatcgtgggctatcctaaggaagagcggttcgctggaaggccaacacaaagagtttccggcttgtatcagcggttggaatctaaatgcagcatggggttccatgccggttgggagcagccacattggttctataagccaggacaggatacgcaatatcgtccatcctttcggaggaccaattggttcgaacctgttggctcggagtataaacaggtgatgcaacgcgtcgcagttaccgacttgtctcctttcggaaaattcaatatcaagggacaggatagcattcggctcctggaccatcttttcgcaaacgtgatacccaaagtcgggtttacgaacatctctcacatgcttacacctaaggggagagtgtacgcagagctgactgtctcgcatcagtctccaggggagttcctactcatcactgggagtggctccgagctgcacgacttgcgttggatcgaagaggaagctgtgaagggaggctatgatgtggagataaagaatattacagatgagctgggggtgttgggagtggcgggtccccaggctagaaaggtgttgcagaagctcacctccgaggacctgagcgacgatgtctttaagtttctgcagactaaaagtctgaaagtgtcaaacattcccgtaacagctatacggatcagctacaccggagagctaggatgggaactttaccaccgcagagaggactctgttgccctgtacgatgcaattatgaacgctggccaagaagagggcatagacaatttcggtacctacgcgatgaatgcattgagactggagaaagctttcagggcctgggggttggagatgaattgtgataccaatcctctcgaagccggactcgagtactttgtaaagctcaataaagaccaaaacagttgttttgctcattttaaagaagaaaatgggtgggtcagccgctgggcgatccgtccatactag

SEQ ID NO: 220851 - DNA, 1185 bp, synthetic construct
  misc_feature 1..1185: note = Description of Artificial Sequence: Synthetic coding sequence
  source 1..1185: mol_type = other DNA
atgtggagctgttggagaaaccagagcagccggttggacctcccaggtacgcagtatggaataattcatgccggtggcgtgggaaaatatttgtcggattggatcttacacggagagccaccgtttgatctaattgagctggatcctaaccgctacggcaagtggacaactacccaatataccgaagccaaggctcgggagagttacggattcaacaacatagtgggctatccgaaggaagagcggttcgctggaaggcctacccagagagtaagtggcttataccagcgacttgaaagcaagtgctcaatgggtttccacgctgggtgggaacagcctcactggttttacaagcccggtcaggatacacagtataggccgtccttccgtcggactaactggttcgaacccgtcggctcagaatacaaacaggtaatgcaacgagtggcagtgaccgaccttagtccattcggtaagttcaatatcaagggccaggatagcatacgtttgctggatcacctatttgcaaatgttattccaaaggtaggctttactaacatcagccatatgctcactcctaaggggagggtctatgcagaactgaccgtgtctcatcaatcgccgggagagttccttctaatcaccggctctggcagtgaactgcacgatctgagatggatcgaagaggaagctgtgaaagggggatacgacgtcgaaattaaaaacatcactgacgaactgggagtcctgggagtggcgggtccccaggccagaaaggttctacaaaaactgacttccgaagacctgtccgatgatgtgtttaagttcctgcaaacgaagtcactgaaagtaagtaacatcccagtgacggccatccgcatcagctacactggggagcttggttgggaactgtaccaccggcgagaagactctgttgccctttatgatgccattatgaacgctggacaagaggaagggattgacaattttggcacgtacgcaatgaacgcccttaggctggagaaggcctttagggcctggggcctagaaatgaattgcgacacaaatccgttggaggcaggactggagtactttgtgaagctgaacaaagaccagaatagttgttttgcacatttcaaggaggagaacgggtgggtgtctagatgggctatacgtccatactag

SEQ ID NO: 220852 - DNA, 4730 bp, synthetic construct
  misc_feature 1..4730: note = Description of Artificial Sequence: Synthetic coding sequence
  source 1..4730: mol_type = other DNA
atggcggaacgaggcctggagcctagccctgcagccgtcgctgcgcttccacctgaagtccgggcacaactggccgagcttgagctggagctaagtgagggcgacatcacacagaagggatacgagaaaaaacggtccaaattgctttccccttatagtccccagacacaggaaacagacagcgcagtgcagaaagaactaagaaaccagactcctgcgccttcagctgcccaaaccagtgcgccatctaaataccacagaacccgctctgggggagccagggatgagcgctatcgatcagacatccacacagaggccgtacaagctgctttggcgaaacacaaagaacagaaaatggcactgcccatgcccaccaaacgacggtctacgtttgttcagagtcccgctgacgcctgcactccgcctgacacttcctctgcctccgaagatgaaggctcactgcggcgtcaagccgcacttagtgcagcactgcagcagtcactgcagaatgctgaaagttggatcaatcgatctatacaggggtcgagtactagctctagcgcaagtagcacactttctcacggagaggtgaagggcacatccggcagcctagccgacgtcttcgcaaacacgcggatagaaaatttctccgctccaccagacgtgacaacaacgacctcctcttcgagttcatcgagctctatccgccctgccaacatcgatctccctcccagtggcatcgtaaagggaatgcacaaagggtccaaccgaagcagcctgatggatactgccgacggagtgcctgtatcttcccgggtatctactaagatccagcagctgctgaacaccttgaagaggccaaagaggccgcctctgaaggagttctttgtagatgactctgaggaaattgtggaggtcccgcaaccagacccaaatcaacctaagccagagggcaggcagatgacccccgtcaagggggagcccctgggggtgatatgcaactggcctcctgctctggaaagtgcattgcaaagatgggggacaacacaggccaagtgttcttgcctaaccgcgctcgacatgacggggaaacctgtgtacaccttaacttacgggaagttatggagtcgaagcctgaagctggcctacacactgcttaataagctgggcacgaaaaatgagcccgtcctcaaacctggagatagggtggccctggtttatccaaacaatgaccccgtgatgttcatggttgccttttacgggtgtctgcttgcagaagtgattcccgtgccaattgaagtgccattgacccgtaaggatgccggagggcagcagattgggttcctgttggggtcatgtggcatcgctctggccttgacctcagaggtatgcctgaaagggttgcccaagacccaaaacggggagattgtccagtttaagggctggcctcggctgaagtgggttgtgacagacagtaaatatctgagcaagccacctaaggattggcagcctcacatatccccagctggaaccgagcccgcatatatcgagtataagactagtaaggaggggtctgtcatgggtgtcactgtgtctcggctggccatgctgtcgcattgtcaggcgcttagccaagcatgcaactatagtgagggcgagaccatagttaacgttttggatttcaagaaagacgctgggctgtggcatggaatgttcgctaatgttatgaataagatgcacactatttctgttccatacagtgtgatgaaaacgtgtccactgagctgggtgcagagagtccatgctcataaggccaaagttgctcttgtaaaatgtagagaccttcattgggctatgatggcccatcgcgaccagagagacgtttccctgagcagccttagaatgcttattgtaacagacggagcaaacccttggtccgtgagtagctgtgatgcattcttaagcctgttccagtcccacggccttaaacccgaggcaatttgtccctgtgcaacaagcgcagaggccatgactgtcgccataaggaggcccggagttccgggagcacctctgccgggtagggccatccttagtatgaatgggctgtcctacggtgttattcgcgttaatacagaggacaaaaactccgccctgactgtgcaggacgtagggcatgtgatgcccggtggcatgatgtgcattgtcaagcctgacggtcctccgcaactctgcaaaacagacgaaatcggtgagatttgtgtgagtagtaggacaggcggtatgatgtactttggactcgctggagtgactaagaacaccttcgaggtgattccagtcaattctgctgggtctcccgtcggcgacgtcccgtttattaggtctgggctgctggggttcgtggggcctgggtccctggtcttcgtggtcggaaagatggatggtctgctaatggtgagcgggcgacggcacaacgccgacgacatcgtggcaacgggactggccgtggagtccatcaagaccgtgtaccggggtcggatagctgtgtttagtgtgtctgttttctacgatgaacgcatcgtggtggtggcggagcaacgccctgacgcaagcgaggaggacagtttccaatggatgagcagagtactccaggctatagacagtattcaccaggtgggcgtctactgtctggccttggtgcccgctaacaccctgccaaaaactccgctgggcggtattcacatctcccaaaccaaacaactatttctcgaaggatccctgcacccttgtaacattctgatgtgccctcatacgtgtgtcaccaatttgcctaagcctaggcagaagcagcctggcgtaggccctgcaagtgtgatggtaggaaaccttgtcgcgggaaagcgtattgcccaggcagctggtagagatctgggtcagattgaagaaaacgatctcgtcaggaagcaccagtttttagccgagatcctccagtggcgcgctcaggcaactcccgatcatgtgctctttatgctcctcaacgctaagggtaccacggtgtgtactgcgtcctgcctccagctgcacaagcgggcagagcgaattgcgtcggtcttaggagacaagggccatctgaacgccggagataacgtggttttactgtacccacccggaattgagctgatagccgcattctatgggtgcctgtacgctgggtgcatacccgtcacggtgcggcctccacatgcccagaatctcacagccactctgcctaccgtaaggatgatagtcgacgtgtctaaggcagcatgtatattaacctctcagactctgatgcggctcctgcgcagccgagaagccgctgcagccgtggatgttaagacgtggccgacaatcattgatactgacgatctccctaggaagaggctgcctcagttgtacaaacctcctacccctgaaatgttagcctacctggactttagtgtttccactactggaatgctcactggcgtgaagatgtctcactctgctgtgaatgccctgtgtagagcaattaagttacagtgcgaactgtatagttctcgtcagattgcaatttgtttggatccatactgtggccttgggtttgctctgtggtgtttgtgctctgtctattccggccatcagtcggtgctgatcccgccaatggagctggagaacaacctgtttttgtggctgagtacagtgaatcagtacaaaataagggataccttttgctcatactcagtcatggagctgtgtactaagggactcggcaatcaggttgaagtgctgaagacgagaggcataaacctttcttgtgttaggacgtgcgtagtcgtggccgaggagcggcctcgggtcgcactgcaacagagtttcagtaagctgtttaaggacattggactaagccccagagccgtcagtactactttcggctcgagggtaaacgtcgccatttgcttgcagggcacctcaggtccagatccaactactgtgtatgttgatctgaagagtctgcggcacgaccgagtgaggctcgtagagaggggtgcaccccagagtcttctgcttagcgagagcggcaaaatattacctggggtcaaagtagtcatcgttaatccagagaccaaagggcctgttggcgacagccacctgggcgaaatctgggtgaatagcccacacacagcatccggctactataccatctatgattccgaaaccttgcaggccgaccacttcaacacccgcctcagctttggcgacgcggctcaaactctgtgggccaggacaggctacctgggctttgtacgcaggacagaactgacagccgctacaggggaacggcacgacgcattgtatgtggtcggggctctggacgagaccctggagctgcgtgggctgcgttatcaccctatcgacatcgaaacctcagtcagcaggattcacagaagcattgccgagtgcgccgtattcacttggaccaatttactggtggttgtggtcgagctctgcggttcagagcaggaagccctggacttggtccccctagtaactaacgtcgtccttgaggagcattatctcatcgtcggagtagtagttgtggtggaccctggcgtgattccaatcaactctcgtggcgagaaacagaggatgcatcttcgcgatagttttctggccgaccagctggaccctatctatgttgcctataacatgta

SEQ ID NO: 220853 - DNA, 1179 bp, synthetic construct
  misc_feature 1..1179: note = Description of Artificial Sequence: Synthetic coding sequence
  source 1..1179: mol_type = other DNA
atggccgagcgtggattggaacccagcccagctgcggtggcagctctgccgcctgaggttagggcgcagctggccgagctggagctcgagctgtctgaaggggacatcactcagaaaggttacgaaaagaagagatctaagctactgtctccatattccccacaaactcaggagacggactcggctgtgcagaaagaactcaggaaccagacacctgctccttcagcggctcagacatcagctccctctaaatatcaccgtacaaggtctggtggagcacgggatgaacgctaccgaagtgagttcagtcttgtccgtatctattctgaagatattcataccgaagccgttcaggccgcattggccaagcacaaagagcaaaaaatggccttaccaatgcccacaaaaaggagatccaccttcgtgcagtcccccgctgacgcatgtacgccccctgacacaagcagcgcctctgaagacgagggctcccttaggagacaggctgcgctttcagcggctctgcagcagtccctgcaaaatgctgaatcatggatcaatcggagcatccagggctcatctacatcaagtagcgcgtccagcacgttatcccacggggaagtcaaaggtacctcagggagcctggcagatgtgtttgcaaatactcgaatagagaactttagcgctccccctgatgtcactaccaccactagctcctcctcttctagcagctccatccgccctgctaacatcgacctcccaccttctggtatcgttaaggggatgcataaaggatcaaatcgctcctccttgatggatacagccgacggcgtgcccgtgtcatctcgagtgtccactaagatacagcaactcctcaacacgctgaagcgccctaagcgccctcccctgaaggagttttttgttgatgattcagaggagattgttgaagtgccccaacccgaccctaatcagccgaagcccgaaggacggcagatgaccccggtgaaaggggagcctttaggcgttatttgtaattggccgccagccttggagtccgcactccagagatggggcaccacgcaggctaagtgttcatgcttaacggctttggacatgacggggaagcccgtgtatactctgacatatggcgaatcagcacggttccagattctgctgtcctag

SEQ ID NO: 220854 - DNA, 4671 bp, synthetic construct
  misc_feature 1..4671: note = Description of Artificial Sequence: Synthetic coding sequence
  source 1..4671: mol_type = other DNA
atggccgacagatcactagaaggaatggctctccctctagaagtcagggcacggttagccgagcttgaactcgaactctctgaaggggatataactcagaaaggctatgaaaagaaacggtccaaacttatcggggcatacctcccgcagcctcctcgggtggatcaggctctgccccaggaacgtcgcgcacccgtcactccaagctcggccagcagatatcatagacggaggagtagtggatctagggacgaaaggtacagaagcgatgttcatacagaagccgtgcaggctgctctcgcgaagcataaggagaggaaaatggccgtgccaatgccctccaagcggcgatcactggtggtgcagacatccatggacgcttacacacccccagatacaagctccggcagcgaggacgaaggttccgtgcagggagatagccaggggactcctacatcatcgcagggaagcattaacatggagcactggataagtcaagctattcatggcagcactacgtcgaccacaagttcttcctcgacacagtccgggggaagtggggctgcccacagactcgccgacgtgatggctcagacacacattgaaaatcacagcgctccgcctgatgtaaccacttacacctccgagcacagcatacaggtggagcggccacagggatccaccggctccagaaccgcaccaaagtacggtaacgccgagttgatggaaacgggagacggggtgcctgtgtcttctcgtgttagcgctaagatacagcagctcgtgaataccctgaaacgtccaaaacgccctccattaagggaattctttgtggacgatttcgaggaactgctcgaggtgcagcagccagatcctaatcagcccaagcctgaaggcgctcagatgctggccatgagaggagaacagctgggcgtggtcaccaactggcccccaagcctcgaggccgctctgcaacgctggggcaccatctcccctaaggcaccatgtctgaccacaatggacacaaacggaaagcctctgtacattctgacgtatggcaaactctggactcgctccatgaaagtggcatattccatcctgcataagttgggcaccaagcaggagccgatggtacggcctggagaccgggttgccctggtatttcccaacaacgacccggcagcctttatggctgctttctacgggtgtctgttagccgaagttgtgcctgtacccattgaggtcccactgacacggaaagacgcaggttctcagcagatcgggttccttcttggttcctgcggcgtaacagttgccctgactagcgacgcttgccacaagggtctgccaaagtcccccaccggcgaaattccccagttcaagggctggcctaagctgctctggtttgtgacagaatcgaagcacttgagtaagcctcccagagactggttcccgcatatcaaggatgcaaataacgataccgcctatattgagtacaagacctgcaaggacggcagcgtgctcggagtgacagtgacaaggacagcactgttaactcattgccaggcgctcactcaggcctgtggatacaccgaggctgagacaatcgtgaacgtattggatttcaaaaaggacgttggactgtggcacggaattctcacgtcagtgatgaatatgatgcatgtcattagcatcccgtactccttaatgaaggtgaaccccctgtcttggattcagaaggtgtgtcaatataaagccaaggtcgcatgtgtgaagagtcgggacatgcattgggcgctggttgctcacagagaccagcgcgacatcaacctcagtagtctccggatgctaatcgtggccgatggcgctaatccatggagtataagcagctgcgacgcatttctaaatgtttttcagtctaaaggcctgcggcaggaagtgatctgcccatgcgcctccagccctgaggcattgaccgtggccataagaagacctaccgacgattcaaatcagcccccaggacgtggcgtgctaagtatgcacggattgacatatggggtaatccgggttgactcagaggagaaactctcagtgttgaccgtccaagatgtgggattagtaatgcccggtgcaatcatgtgttcagtcaaaccagacggggttccccagctctgtaggactgatgagatcggcgagctgtgcgtttgcgctgtcgctacaggaacctcctattacggcttgagtggcatgactaaaaacaccttcgaggttttccccatgacctcttcaggcgcacctatctctgagtatccttttattagaacagggctcctcggatttgttggtccaggagggctggtgttcgtggtagggaagatggacggattgatggttgtaagtgggaggagacataatgctgacgacattgtggctaccgcactggccgtggagcctatgaagttcgtctatcgtggcaggattgccgtgttcagtgtgacagtgttacatgatgagcgtatcgttattgtcgccgagcagcggccagactcaaccgaggaggattcgttccagtggatgtccagggtcctgcaagccattgactcaattcatcaggtcggagtgtattgtctggcattggtgcccgcaaacacacttccaaagactccgttaggcggtatccacctgtccgagaccaaacagctctttctagaagggagcctgcacccatgtaatgtcctcatgtgtccacacacttgcgtgaccaaccttcccaagccaaggcagaaacagccagaaatcggccctgcgagtgtgatggtcgggaacctggttagtggcaagaggattgcacaggcaagcgggcgagacctgggtcagattgaagataatgatcaggcccgtaaattcctctttctgtcggaggtcctccagtggagggctcaaacgacccccgatcacatactgtacaccctgctgaattgccggggtgcaattgctaattccttgacatgtgttcagctacataagcgggcagagaaaatcgctgtgatgttaatggaaaggggccatctccaggatggagaccacgttgccctcgtctaccctcctggcattgatctgatcgccgcattctacggctgtttatacgccggatgcgttcccatcactgtgcgccctcctcacccacagaacatcgcaaccacattaccgaccgtgaaaatgattgtggaggtgagtagaagtgcctgtttgatgaccacgcagctaatttgtaaactgctgaggagtcgcgaggctgctgccgctgtcgacgttcgcacttggcccctgatcttggatacggatgatctgcccaagaaacgtcctgcccagatttgtaaaccatgtaaccccgatactttagcatatctggacttctccgtaagcacaaccgggatgctcgccggagtaaagatgtcccacgccgcaacatctgccttctgcaggagtataaagctccagtgtgagttgtacccctcccgtgaggttgccatatgcctcgacccatattgtggcttgggattcgtgctgtggtgtctctgctctgtgtatagtggtcaccagagtattctgattccgccaagcgagctcgaaacaaaccctgccctctggctattggccgtgagtcagtataaggtgcgcgacacattttgtagctacagtgtgatggaattgtgcaccaagggtctgggttcccagaccgaaagtcttaaggcccgtgggctggatctcagtcgcgttcgcacctgcgtcgtcgtggcggaggaaaggccaaggattgcccttacacagagctttagcaagttgtttaaggacttaggactgcacccaagggctgtgtccacatccttcggatgtagggttaaccttgctatctgcctccagggaacttccgggcctgaccctaccaccgtttatgtggacatgcgggcattacgacacgatcgcgtgcggctggtggagaggggatctccgcatagtctgcctctcatggagtctggtaagattctgcccggtgtccggatcattatcgccaacccagagaccaaaggccctctcggcgactctcacctcggagaaatctgggtacactcagcacacaacgcaagtgggtactttacaatttacggcgacgagtcattacagtcggatcatttcaacagccgtttgtcattcggggatacacagactatctgggcgaggacaggatacttgggatttctcagaaggacagaacttaccgacgcaaatggggagagacacgatgctctatacgtagtgggtgctttagatgaggccatggaactccgcggaatgaggtaccaccccatcgacatagaaacttccgtgatccgggcacacaagtccgtcaccgaatgtgctgtcttcacgtggacaaatttgctcgtggtggtggttgagcttgacggcagtgagcaggaggccctcgacttggttcctctggttaccaatgtggtacttgaggagcactatctgattgttggggtggttgtcgttgttgatattggcgttatccctattaattctaggggtgaaaagcaacgaatgcacctgcgagatggattcctcgcagaccagctagatcccatctacgtagcctataacatgtag

SEQ ID NO: 220855 - DNA, 1971 bp, synthetic construct
  misc_feature 1..1971: note = Description of Artificial Sequence: Synthetic coding sequence
  source 1..1971: mol_type = other DNA
atggctgtgcctatgcccagcaagagaaggagtctcgtagtgcagacatctatggatgcctacacgccccctgatacctcttcaggcagtgaggatgaagggagtgtacaaggcgatagccaggggacacccacaagcagtcaaggctccatcaacatggagcattggatttcccaagccatccacggcagcacaacttctacgacgtcctctagcagtactcagtctggtggaagtggtgccgcacacaggttggccgatgttatggctcagacccatattgagaaccactcggccccacctgacgtgaccacttacactagcgagcactcgattcaagtggaacgcccacaaggctcgaccggttctcggaccgcccctaaatacggaaacgccgaattgatggagacaggcgatggagtgcctgtgtcctctcgggttagtgcaaaaattcagcaactggttaatactttgaagaggccaaagcggcctccactgagagagtttttcgtcgacgatttcgaggaactgctggaagttcagcagccagaccctaaccaacccaagcctgagggggcacagatgcttgccatgagaggggaacagctgggagtcgttacaaattggccaccctcactggaggccgctctgcagagatggggaaccattagtcctaaggccccatgtctgaccaccatggacaccaatggcaaacctctgtatatcctgacatacggaaagctgtggacgcggtcgatgaaggtcgcttactccatcctccacaaactgggaaccaagcaggagccgatggttaggcctggagatagagtcgcattggtctttccaaacaacgaccctgccgcttttatggcagcgttctacggctgtctgctagcagaggtcgtgcccgtgccgattgaagttccactcaccaggaaggacgcaggcagccagcagattgggttcttgctgggatcctgtggggtgaccgtcgcactgaccagtgatgcatgccacaagggcctgccaaagagccctacgggggagatccctcaattcaagggttggcctaagctgctatggtttgtgactgaatctaaacacttaagtaaacctcccagagactggtttcctcacattaaggacgccaataacgacacagcatatatagaatataagacgtgcaaggatgggagtgtattgggcgtgacagtgacaagaacagcgctcctgacccattgtcaagctttgacacaggcttgtggatacacagaggcggaaaccattgtgaacgtgctagacttcaaaaaagatgtgggactttggcacggaatcttaacttctgtcatgaatatgatgcatgtaatcagtatcccttactccctgatgaaagtgaacccactgtcctggatccagaaggtatgccaatacaaggcgaaggtggcatgcgtgaagtcacgagatatgcactgggcgctcgtcgcacatcgagaccagcgggacattaatctctcaagcctccgaatgctgattgtggccgatggggcaaatccttggtccatatccagttgtgatgccttcttaaatgtgttccagagcaaggggctccggcaggaagtcatctgcccatgtgcatccagcccggaggctctcaccgtggccatacggcgtcccacggatgactctaatcaacccccaggacggggagttctctccatgcatggccttacctacggggtcattagggtcgatagtgaggaaaagctgtcagtccttaccgttcaggacgtgggactcgttatgcctggagccatcatgtgctccgtgaaacctgacggtgtaccccagttgtgcagaacagacgaaattggagagctttgtgtttgtgctgtagcaactggaacatcttactacgggctgtcaggcatgactaagaacacttttgagcatacgtctaacaaggggaaatag

SEQ ID NO: 220856 - DNA, 597 bp, synthetic construct
  misc_feature 1..597: note = Description of Artificial Sequence: Synthetic coding sequence
  source 1..597: mol_type = other DNA
atgtcccatgccgcaacctcagctttttgtcgcagcattaagctgcagtgcgaactttaccctagccgggaggtggctatctgcctagatccttactgtgggctgggcttcgtgctgtggtgcctgtgtagtgtgtatagcggtcaccagtctattttgatcccaccatctgagctcgaaactaatccagccctgtggctgctcgctgtctcacaatacaaggtacgggataccttttgcagctacagcgttatggaattgtgtacaaaggggttaggctcccagaccgaatcactgaaggccagaggtctggatctttcgagagtgcggacgtgcgttgtagttgccgaggagcggccaagaatagcactgacccagtctttcagcaaactgtttaaggacctgggcctgcaccctagagccgtaagcactagtttcgggtgcagggttaacctcgcgatttgtctgcaatgttgggattacagacacgagcccccacgccctgcccctaaatgtttcaaaatggtgtataaggaaggagttagatctgtaggcgaagataagattcgcgagaaaaggaccaagacctggcggtag

SEQ ID NO: 220857 - DNA, 696 bp, synthetic construct
  misc_feature 1..696: note = Description of Artificial Sequence: Synthetic coding sequence
  source 1..696: mol_type = other DNA
taggaaactatcgtgaacgtcctcgattttaagaaagacgtggggttatggcacggcattctaacctcggtcatgaacatgatgcacgtaatttcaattccttattccctaatgaaagtcaatcccctctcctggatacagaaagtatgtcaatataaagcaaaagtggcctgtgtgaaatcgagggacatgcactgggcgctggtggcacaccgagatcagcgggacataaatttatcttctctgcgcatgctgatcgtagccgatggggctaacccttggtcgatcagcagttgcgacgccttcctgaatgtgttccagagtaaaggccttaggcaggaggtgatttgtccctgtgcctccagcccagaggctctgaccgttgcaattaggcggccaaccgatgatagtaatcagcctcccggaaggggggttttgtccatgcatggcttgacatacggcgtaatcagggtcgactccgaagaaaagctgtccgtgctgactgtgcaggatgtcggcctcgtcatgccaggcgctatcatgtgttctgttaaacctgacggggttccgcagctctgcagaacagacgagataggagagttatgcgtgtgcgctgttgcaaccggcactagctactacggtttgagtggcatgaccaagaatacctttgaacacactagcaataagggaaaatag

SEQ ID NO: 220858 - DNA, 564 bp, synthetic construct
  misc_feature 1..564: note = Description of Artificial Sequence: Synthetic coding sequence
  source 1..564: mol_type = other DNA
atggcagacagatctttggaggggatggccctgcccctagaggtccgcgctaggctggccgaactggagctcgagctcagtgaaggggacattacacagaagggatacgagaagaaaagaagtaagctaatcggagcatatcttcctcagccaccaacagccaatggcgctgccgtggtgcgatgtagactgcaacactccgaaggggctccacgaagaacatttagatccgcacacataggagtgtgtgacgttcgggaggctgccgcacgtgaaagagtggcctccactgcagggaatcggcctctgttctacttccgcttcggggtggaccaagcactccctcaggagaggagagccccagtgactccaagctcggcttctaggtatcacaggaggcggagctccggatcccgggatgagcgatatagatctgacgtccacaccgaggccgttcaagccgcattggcaaaacacaaggagaggaagatggctgtgccgatgcccagtaagcgccgatctttggtagtgcagacttcaatggacgcctatacgcctccttag

SEQ ID NO: 220859 - DNA, 468 bp, synthetic construct
  misc_feature 1..468: note = Description of Artificial Sequence: Synthetic coding sequence
  source 1..468: mol_type = other DNA
taagtgtactctggtcaccaaagtatacttatccccccaagtgaactggaaacaaatccagctctttggctcttagccgtgagtcaatacaaggtgagggatactttttgctcatattctgtcatggagctgtgcactaaagggctgggatcccaaaccgagtcactcaaggcgcgagggctggatctgtcgagggtgcggacttgtgtcgtggttgcagaggaaaggccacggattgccctgactcagagctttagtaaattgttcaaagacctgggacttcatcccagagccgtgtctacatccttcggttgtagggttaacttggccatatgccttcagtgctgggactataggcatgaacctccgcgacccgctcctaaatgcttcaaaatggtatacaaggaaggtgtccggagcgttggggaggacaaaattcgtgaaaagagaaccaagacctggcgttag

SEQ ID NO: 220860 - DNA, 1446 bp, synthetic construct
  misc_feature 1..1446: note = Description of Artificial Sequence: Synthetic coding sequence
  source 1..1446: mol_type = other DNA
atctgggtgagtcggtccgcttgtcttatgacgactcaattgatctgtaagcttctgcggtcacgggaggcggctgctgccgtcgacgtcaggacttggcccctcatcctggacacagatgatctgccgaagaagcgacctgcccaaatatgtaaaccttgcaacccggacactctcgcatacctggatttcagtgtatcgaccaccggaatgctggccggagtgaagatgtcacatgctgcaacatctgctttctgtagaagtattaaactgcaatgtgagttgtatccttctagagaagtggccatctgcctggatccctattgtggtctgggctttgtcctatggtgcctatgttctgtatacagcgggcatcagtccattctaatccccccatctgagctggagaccaatcctgccctgtggttgttggctgtaagtcaatataaagttagggataccttctgcagctattccgtgatggaactgtgcacaaaaggacttgggtctcagactgagtctctgaaggcgcgaggtttggatctgagtcgtgttaggacatgtgtagtggtagccgaggaaaggccacgaatcgccctgacccagtcattctccaagcttttcaaggacctgggactgcaccccagagcggttagcacttcattcgggtgtcgagttaaccttgccatctgcctacaggggacgagcggcccagacccaaccactgtgtacgtagacatgcgtgcactacgccatgatcgggtgagactggttgaacgcggtagtccgcatagtctgccactgatggaatcaggcaagatccttccaggcgtgcgaattataatcgccaatcccgagactaaagggccacttggggacagccatctcggcgagatttgggtgcactccgcccacaatgcttctgggtactttacaatctatggagatgagagtttgcagagcgatcactttaactctcgcctgagcttcggcgatacacagactatatgggccagaaccgggtacctcggattcctacggcgtacagaactgactgacgccaatggagaaaggcacgatgccctgtacgtcgtgggtgccctcgatgaggccatggagctgagaggcatgcgataccaccccatcgacattgagacctctgtgattcgggctcataaatctgttaccgagtgcgctgtgtttacctggacgaacctgcttgtcgtggtggtggaacttgacgggtctgaacaggaagcgcttgacctggtgccccttgtgacaaacgttgttctggaggagcactacctgatcgttggggtggtagtcgtcgttgatataggggttatccccattaactcgcgaggagaaaaacagcggatgcatctccgcgatggcttccttgcagatcagttagaccccatctacgttgcctacaacatgtag

SEQ ID NO: 220861 - DNA, 1116 bp, synthetic construct
  misc_feature 1..1116: note = Description of Artificial Sequence: Synthetic coding sequence
  source 1..1116: mol_type = other DNA
atgcatggcctcacatatggggtcatccgagtggattcagaggaaaagctgagcgtgctgaccgtacaggatgtgggtctcgtcatgccgggagcaattatgtgcagcgtgaaacctgatggggtgcctcagctctgccgcacagacgagatcggagaactctgcgtttgtgcagtcgcaaccggaaccagctattatggactgtccggaatgaccaagaacacatttgaggtattccctatgacaagttcaggagcccctatcagcgagtacccttttatccgcaccggcctgctggggttcgtgggtccgggaggactggtctttgttgttggtaaaatggacgggctcatggtggtgagcggacggcgacacaacgccgacgacatcgtggcaacggctctcgcagtcgagccaatgaaatttgtctatcggggtagaatagccgtttttagcgtcaccgtgctgcacgacgagcggatagtgatcgtcgctgaacagcgccctgattctaccgaggaggactccttccaatggatgtcccgagtgctgcaagctatcgactccatccaccaggttggagtgtactgcctggctctggtgccagcaaacaccctgcctaagacaccactgggcggaatacacttatccgaaactaaacaactgtttctagagggaagcctacatccttgtaacgtccttatgtgtccacacacctgcgtaacaaacttgcctaagccacgacagaagcaaccagagatcggccctgcctcagtgatggtgggcaatcttgtctcaggtaagagaattgctcaagcttctgggcgtgatctcggccagatcgaggacaatgaccaggccaggaaatttctgttcctgtctgaggtgttacaatggcgggcacaaacaacgcccgaccacatcctatacaccctacttaattgccgagtgcgcagaggagcgggactcccgtggttactggcaagcagagggttagcttggtttctcggagccctgctccttctcagcctcaacccatttgcctctgtactttgggaattcttcctgtgctttgcaattttgaccgagacattcgttccacgtgattgcttctag

SEQ ID NO: 220862 - DNA, 1236 bp, synthetic construct
  misc_feature 1..1236: note = Description of Artificial Sequence: Synthetic coding sequence
  source 1..1236: mol_type = other DNA
atgtggtcaggctggtggctgtggcccctcgtggcagtttgtaccgccgacttcttccgtgatgaggcagaacgcattatgagagattcccccgtgattgacggccacaacgatctgccttggcaattgctcgacatgtttaacaaccgtttacaagatgagagagcgaatctcactactctcgccggaacccatacaaatataccgaaactgagagccggtttcgtgggtggccagttttggagcgtgtatactccctgcgatacacagaataaggatgctgtgcgtcggacattagagcaaatggatgtggtacataggatgtgccgcatgtacccagagacgttcctgtatgtcacttcaagcgccggaattaggcaggcctttagagaggggaaggttgcttcactgatcggagtcgaagggggacactcaatcgatagctccctaggcgtgctgcgcgcactgtaccagctcggcatgcgatacctcacgctgacccactcctgcaacaccccctgggcggataattggctggtggacacgggagatagtgaacctcagagccagggcctgtcgccattcggacaaagagttgtcaaagagctgaaccgcctaggtgtgttgatcgacctggctcacgtttctgttgccaccatgaaggctactttgcaactctctcgggctccagtaatattctcacactcaagtgcctactccgtctgtgcctctcgtaggaatgttccagacgatgttcttaggctggtcaaacagacagattctctggtgatggtcaatttctacaataactacatttcctgtactaataaggccaatctctcacaggtggctgaccatcttgaccacatcaaggaggttgctggtgcccgtgccgtgggcttcggaggcgatttcgatggggtaccgcgagtgcccgagggactggaggacgtaagtaagtaccctgacttgatagctgagctgctgaggaggaactggacggaagccgaagtcaagggggctctcgcagataatctcctgcgtgtatttgaggcagttgagcaggcgtctaacttgacgcaggcccctgaagaggaacctatacctctcgaccagctcggagggtcctgcagaacccactacgggtactcctcgggagcatcttctcttcatcgccattgggggctgctactcgccagcctggcgccacttgtgctgtgcttgtccttgctctag

SEQ ID NO: 220863 - DNA, 1236 bp, synthetic construct
  misc_feature 1..1236: note = Description of Artificial Sequence: Synthetic coding sequence
  source 1..1236: mol_type = other DNA
atgtggtcgggctggtggctctggcccctagtggccgtctgtaccgctgatttcttcagggacgaggccgagagaatcatgagggattctcctgtgatcgatgggcacaatgatcttccatggcagctgctggacatgttcaacaatcgactgcaggacgagagggccaacctcacaacactggcaggcacccacaccaacattcccaaactgagagcgggttttgtgggagggcagttctggtcagtgtatactccatgtgatactcaaaataaagatgcagtgcggagaacgctggagcagatggatgtcgtgcatcggatgtgtcggatgtatccagagacgttcctttatgttaccagctccgccggtatccgtcaagcttttcgcgaaggaaaggtggcctctctcatcggcgtcgaagggggacattcaatcgacagctctttgggggttctgagggccctctatcaactaggaatgcggtacctgacattgactcacagttgcaacacaccttgggctgacaactggttagtggacactggcgattcagagccacagtcacaaggtctgtcccccttcggacagagggtagtcaaggaactgaaccggctgggggtgctgattgacttggctcacgtttccgtggctacaatgaaagcgacactccagctgtccagagctcctgtgattttctctcatagctctgcatactccgtgtgcgcttcaagacgcaacgtacctgatgacgtcctgagactggtcaagcaaacggattcattggtcatggtgaatttttacaataactatatttcatgtaccaataaggcaaatctgtcacaggtggccgatcacctggatcacataaaggaggtagcgggagccagggccgtaggttttgggggagatttcgacggggtgcctcgggttcccgaagggcttgaagatgtgtctaaataccctgacctgatcgccgaacttctgagacgaaactggactgaggctgaggtcaaaggcgctctggccgacaacctgctccgtgtgtttgaggctgtcgaacaggcaagtaacctcactcaggcgcctgaggaggaacccatcccccttgaccagttgggcggaagttgcaggacacattacgggtacagtagcggggcatcttctctgcaccgccattggggactgttgttggcctctctggcaccgctggtgctttgcctctcactactctag

SEQ ID NO: 220864 - DNA, 1236 bp, synthetic construct
  misc_feature 1..1236: note = Description of Artificial Sequence: Synthetic coding sequence
  source 1..1236: mol_type = other DNA
atgtggagcggatggtggttatggcctttggtcgctgtgtgtacagccgacttctttcgcgatgaggccgagcgcattatgagagactccccagtgatagatggtcataacgacctgccttggcagctgctcgatatgttcaataatagactgcaggatgagcgggctaatctgactactctggcgggtacccacactaacatccccaaattaagggccggtttcgtgggcggtcagttctggtctgtgtacactccatgtgacactcaaaacaaggacgcggttcgcaggacactcgaacagatggatgtcgttcacaggatgtgtcgcatgtaccccgagacctttctgtatgtcacatcatctgccggtattaggcaggctttccgggaaggcaaggtggctagtctgataggagttgaaggcggacacagtatcgattcctccctgggcgtcctccgcgcactgtaccaactggggatgcgttacctcaccctgactcactcctgcaataccccgtgggccgataactggctggttgacactggcgactccgagccgcagtcccaaggactgagcccctttgggcaacgcgtcgtcaaggagctgaaccggttgggcgttctgatcgatctggcccatgtcagcgtagctactatgaaggctaccttacaactttccagggccccagtgattttctctcatagttcagcctactcagtgtgcgcttctcgcaggaatgtgccagatgatgtcctgaggctagtcaagcagacagacagcctcgtgatggtgaacttctataataactatatttcctgcacaaataaagccaacctcagccaggtcgcagatcacctcgaccatatcaaggaagtggctggggcaagggccgtcggattcggcggtgactttgatggtgtgcctcgcgtgcctgaaggcttagaggacgtatcaaaataccctgatcttatagccgagctgttgcgaagaaactggaccgaggccgaggtgaagggcgctttggccgacaatctattgagagttttcgaagctgttgagcaagcaagtaacctaacacaggccccagaggaggagccaatccccctggaccaattaggaggctcctgccggactcattacggatatagctcaggggcttcctcgcttcatagacattggggattgctgctggccagcttagccccattggtgttgtgccttagtctgctctag

SEQ ID NO: 220865 - DNA, 381 bp, synthetic construct
  misc_feature 1..381: note = Description of Artificial Sequence: Synthetic coding sequence
  source 1..381: mol_type = other DNA
atgcagccttccggcttggagggcccaggcacattcggccgttggcctttactgtcactattgttgctgctgcttttgcttcagcccgtgacatgcgcctatactaccccagggcctccaagggcgctcacgactttgggagccccaagagcacacacaatgccagggacctacgcccctagcactacactgtcttctccaagcacacagggcctccaggagcaggctagagcattgatgagagacttcccactggtcgatgggtctggccaacccatgtgccacgcacgccctcgaacggggatgccttgtgcctcaccatggagtaggctaaccagttatgccgcttgtgtgcccccaatcctgtcctggtcactatag

SEQ ID NO: 220866 - DNA, 1200 bp, synthetic construct
  misc_feature 1..1200: note = Description of Artificial Sequence: Synthetic coding sequence
  source 1..1200: mol_type = other DNA
atgcaaccttcaggattggaaggacctggaacgtttggcaggtggcccttgctaagcttgctgctgctgctgcttctcctccagcctgttacctgtgcttacacaacaccgggtccgcctcgagccctcttttggtctgcctacgtcccttgccagacacaggatagggatgcccttaggctgactctggagcagatcgatttgatccgaaggatgtgcgcgtcctattctgaactggagctggtaacgagcgccaaggcactaaacgacacacagaaacttgcatgtctgattggtgtggaaggaggccacagcctcgataacagcctatcgattctgcctactttctatatgctgggtgtgcggtatttaaccctaacacacacttgcaacacaccctgggcggaatcaagtgccaagggtgtgcacagtttttacaacaatatttccggactgaccgactttggtgagaaggtcgttgctgagatgaatcgcctgggaatgatggttgatctcagccacgtttcagatgcagtggctcgcagagctttggaggtctctcaggcgcctgttatcttctcacatagcgccgctcgtggagtgtgtaatagcgcaagaaatgtgcctgatgacatactgcaactcctgaagaaaaatggcggagtcgtgatggtgtccctcagtatgggcgtaatccagtgtaatccatcggccaacgtgtcaaccgtggctgaccacttcgatcacataaaggccgtcattggttctaagtttatcggcatcggtggggactatgacggagcgggaaagttccctcagggactggaggatgtgtctacatacccagtgctgattgaggagctattgtcgcgcggttggagtgaagaagaactccagggggtgttgaggggaaacctgctgcgggtgttccgtcaggtggaaaaggtccaggaggaaaataaatggcagtcacctctagaagataaattcccagacgaacagctgagctctagctgtcactctgacctgagcaggttacggcagagacagtctctgacctcaggccaggaactcacagagatacccatccactggactgccaagctcccagccaagtggagcgtgagcgaaagcagtccgcatatggctccagtgttggctgtggtcgctacctttccggttctgattttgtggctgtag

SEQ ID NO: 220867 - DNA, 1461 bp, synthetic construct
  misc_feature 1..1461: note = Description of Artificial Sequence: Synthetic coding sequence
  source 1..1461: mol_type = other DNA
atgcagcctagcggactcgaaggtcctggaacctttggcagatggccacttctgagcctgctcctgctcctcctgctcttgcagccggtgacttgcgcctacaccacacctggacctcccagggccctaactacgctcggcgcacctcgggcacacacaatgcccggaacttatgctccttctacaactctctcctcgccctccacacagggcttacaggagcaagccagagcccttatgcgcgattttccactagtggacggccacaatgacctgccacttgtccttcgccaggtgtatcagaagggtctgcaggatgtgaacctgaggaacttcagttacgggcagacatctctcgatagattgcgcgacggcctagttggggcacaattctggagcgcttatgttccatgtcaaacccaggatcgggatgcccttcgtttaacactcgaacagatagatttaatcaggaggatgtgtgcttcctactctgaactggaactcgtcacctcggcaaaagccctcaatgacacccagaagctcgcctgcctgatcggggttgaaggcggacactcactcgacaatagcctgagcattctccctaccttttacatgttgggagtgcgatatctcactctgacccacacctgcaacacgccctgggccgagtcttccgcgaagggcgtgcactccttctataacaacataagtggcctcaccgactttggggagaaagtcgttgccgagatgaacaggttagggatgatggttgacctgtcccacgtcagcgacgctgtcgctcggagagctctggaggtatcacaagcccctgtcattttcagccactctgcagcccgaggagtctgtaatagcgccaggaacgtgcccgacgacatcctgcagctgctcaagaagaatgggggtgtggtgatggtgtcactcagcatgggcgtgatccagtgcaatcccagcgccaacgtcagtaccgtggccgatcactttgatcatattaaggctgtcataggttctaagttcatcggcattgggggagactatgacggggctggcaaattccctcaagggcttgaggacgtctccacatacccggtgttgattgaggaattgctctctcggggatggtccgaagaggaactccaaggggtcttgagaggcaatcttctgagagtgttccgccaggtggaaaaggtacaggaggaaaataagtggcagtcccctctagaggataagttcccggacgagcagctctcatcctcttgtcattctgacctgagccgactcaggcaacggcaatccttgactagcggccaggagttaactgagatccctatccattggaccgccaaactcccggctaagtggagtgtgtcggagagttctcctcatatggcacccgtcttggcagtcgttgcaacattcccagtgctcatactctggctgtag

SEQ ID NO: 220868 - DNA, 1461 bp, synthetic construct
  misc_feature 1..1461: note = Description of Artificial Sequence: Synthetic coding sequence
  source 1..1461: mol_type = other DNA
atgcagccctcaggacttgagggtccaggcacgtttggtcggtggccactgttgtccctccttttgctgttgctcctcctgcagcccgtaacatgcgcttacactaccccaggacctccgagggcactgacgaccctgggggctccaagggcacataccatgcctgggacatatgccccatcaaccacactgagctccccctcaacacagggcctccaggaacaagctagggccctaatgcgtgacttcccactcgtcgacggccacaatgatcttccgctggtcctgcgtcaggtgtaccagaagggcctgcaggacgtgaacctgagaaacttctcgtacggacagacgtctctcgacaggcttagggacggactggtgggtgcccagttctggtctgcctatgtaccttgccagacccaagaccgcgacgctctgaggcttacacttgagcaaatcgacctgatccgaaggatgtgtgccagctatagcgagctggaattggtgacatctgctaaggccctgaatgatacccagaagctcgcatgcctaattggcgtggaggggggacattccctggacaactccctgagcatcctgcccactttctacatgctcggagtcagatacctaacactcacgcacacctgcaatactccatgggccgaatcctcagcgaagggggtgcattctttctacaacaatattagtggccttactgactttggcgagaaagttgtagcggagatgaaccggctggggatgatggtcgacctgtcccatgtttctgatgccgtcgctcgtagagccttggaggtgagccaggccccagtcatattctcacatagcgcagcacgcggagtgtgcaattccgcaagaaacgtgcccgatgatatccttcaactcctcaaaaagaatggcggagtcgtgatggtgagtctcagtatgggtgtcatccagtgtaacccctctgctaatgtttctactgtggccgatcactttgaccatattaaagccgtgataggctcgaagtttattggcataggcggagactatgatggagccggtaaatttcctcaggggctggaagacgtctcgacctatccagtgcttatagaggaactgctctctcgcggttggtctgaggaagagctacagggagtgcttaggggcaaccttctgagagtgtttagacaagttgagaaggttcaggaggaaaacaaatggcaaagcccattagaggataaatttccagacgaacagctgagttcaagttgtcactcagatctgtccaggcttaggcaaaggcagtctctcacctcaggccaggaactgactgaaattcctattcattggactgccaaacttccggcaaagtggtccgtctctgagagttcaccacacatggccccagtattagccgttgtggctacgtttccagttctcatcctttggctgtag

SEQ ID NO: 220869 - DNA, 1542 bp, synthetic construct
  misc_feature 1..1542: note = Description of Artificial Sequence: Synthetic coding sequence
  source 1..1542: mol_type = other DNA
atgattcgtaccccgctctcagcctcagcccatcggctcttactacctggatccagaggcagaccgccacgcaatatgcagccgacagggcgagagggaagcagggcgctcagccgaagatatttgagacgcctcctgctgcttttgctcctgctcctcctaaggcagcctgtaaccagggcggagactactccaggagcgcctcgtgcactgagcacgcttggaagtccaagcctgttcacgacccctggcgtcccaagcgcgcttactacaccagggttaaccacacccggtacacctaagacgttggatctgcggggtcgggcacaggctttaatgcggtccttcccattggtggacggacataatgatctcccccaagtgttacgccagcgctacaagaacgtgctgcaggatgttaacctgaggaactttagtcacggtcagaccagtcttgatagactgcgagacggacttgttggagctcagttctggagtgccagcgtgtcatgtcagtcacaggaccagaccgccgtgcggctcgccctagagcagatcgacctcatccatcggatgtgcgcctcctactctgagctggaattagtgacatccgctgagggcctgaacagctcccagaagttggcttgccttattggcgtggagggaggtcactcattggacagcagtctgagcgtgctgcgctccttctatgtcctgggggtgagatatctcacactcacatttacctgctcaacaccgtgggcagagagctccacgaaattcaggcatcatatgtacaccaacgtgagtggtttgaccagcttcggggaaaaggtggttgaagagctgaaccgtctgggcatgatgatcgacttgagctacgcatccgacaccttaattcgccgtgtgctggaagtgtcacaggcgcctgttattttttctcactctgccgcacgggcagtctgtgataacctgctgaatgtacccgacgatatactgcagttgttgaaaaagaatggcggaatagtaatggtgactctatcaatgggagtgctccaatgtaacttgttagctaatgtgagtacagtggcagaccactttgatcatattcgcgctgtaattggtagtgaatttatcggaattggcggaaattacgatggtaccgggaggtttccgcagggactggaagacgtgtcaacctaccctgtcctcattgaagagctgctatcgcggtcatggtccgaggaagagcttcagggggtgctccgcggaaatctactaagggtcttcaggcaggttgagaaagtccgggaggagtcaagagcacagtccccagtggaggccgagttcccttatggccagctgagtacttcctgccactctcacttggtcccccaaaatgggcatcaagccacacaccttgaagtgaccaaacagcctaccaacagagtgccatggcggagtagcaatgccagcccttatcttgtcccgggactggtggctgcagcgactattccaacattcacgcagtggctgtgctag

SEQ ID NO: 220870 - DNA, 2370 bp, synthetic construct
  misc_feature 1..2370: note = Description of Artificial Sequence: Synthetic coding sequence
  source 1..2370: mol_type = other DNA
atgaggaaagtggagagtaggggagaaggcggacgagaggagctgggctcaaatagtcctcctcagcgcaattggaagggtatcgccattgctctgctcgtcatactggtcgtctgcagcctgattacaatgagtgtgatactgttgactcctgacgagctgaccaattcatccgagacacgtctgtcacttgaggacctgtttaggaaggactttgtgttgcacgaccctgaggccaggtggatcaacgatactgacgtggtatacaagtccgagaatggacatgtgataaagctaaacatagaaacaaatgctactaccctgctgcttgagaacactactttcgtcacattcaaggcaagccgtcattctgtgtctccagacctgaaatacgttctgttggcatatgatgtgaaacaaatattccactattcatatacagccagctatgtgatctacaatatacatacacgagaggtatgggagctcaaccctcctgaagttgaggactccgtgctccagtatgcagcatggggtgtccaaggtcagcaattgatctacattttcgaaaataacatctactaccagcctgatatcaagagctcctcccttcggctgacatcaagcggtaaggaagagatcatctttaacgggatcgccgattggttgtacgaggaggaactgctgcacagccacatcgcgcactggtggagccccgacggcgagcgcctggcatttctcatgatcaacgactctttagtgccgacgatggtaatccccagatttaccggagctctttacccaaagggtaaacagtatccttaccctaaggccggacaggtgaatcctaccatcaagctgtacgtcgtcaacctctatggacccacccacacacttgagctcatgcctcccgactccttcaaaagccgcgaatactacattactatggtgaaatgggtcagtaatacaaaaacagtggtccgttggttgaatcgggcacagaacatttctattctgacagtttgtgaaacaacaaccggggcatgttctaaaaagtacgaaatgactagtgacacctggttaagccagcagaatgaggaacccgtttttagccgagatgggagtaaattcttcatgacagtccctgtgaagcagggcggaaggggcgagttccaccacgtggctatgtttttgattcagagcaagtcagagcagatcactgtccggcatttgaccagcgggaattgggaggttatcaaaatcttggcttacgacgagacgactcagaaaatatatttcctgtctacagagagctccccaaggggcaggcagttgtacagcgcgagtacagagggcttgctcaaccgccagtgcatcagttgtaattttatgaaggaacagtgcacctacttcgatgcaagcttctccccaatgaaccagcatttcctgctcttctgtgagggacccagagtgcctgtcgtgagcctgcacagcactgataatcccgctaagtacttcatactcgagtcaaacagcatgttaaaggaagccatccttaagaagaaaattgggaagcccgagatcaaaatcctccacatcgatgattacgaactccccctgcagttgagtctgccgaaggatttcatggatagaaatcagtatgccctgttactcatcatggatgaagaacctggcggtcaactggtgacagataagtttcacatcgattgggattccgtcctgatcgatatggacaatgtaatcgttgcacggtttgatggccgtggttccgggtttcaaggactgaagattttacaggaaatacatcgccgactggggagtgtcgaagtgaaagaccagatcactgcggtaaagttcctgttgaagcttccatacatagattcaaaaagactcagtatctttggtaaggggtatgggggatacattgcgagcatgattttgaagagtgatgaaaaattgtttaagtgtgggagcgttgtggccccaatcactgatcttaaactctatgctagtgccttttctgagcgatatctgggcatgcctagcaaggaggaatcaacataccaggctgctagtgtgttacacaatgtccatgggttgaaagaagagaatatcctaatcatccacggcacggcggacaccaaggtgcacttccagcactcagctgaacttatcaagcacctcataaaggccggagtcaattataccatgcaggtgtatcctgacgaagggcacaacgtgtccgagaagagtaagtatcatttgtattcaacaatccttaagtttttctctgactgtttgaaggaggagatttctgttctgcctcaggagccggaggaagatgagtag

SEQ ID NO: 220871 - DNA, 2403 bp, synthetic construct
  misc_feature 1..2403: note = Description of Artificial Sequence: Synthetic coding sequence
  source 1..2403: mol_type = other DNA
atgacagctgccaagcaagagccccagcctacacctggagccagggcaagccaggcccagcctgccgaccaagaattaggctccaattctcctccgcagaggaactggaaggggattgctatagccctattagtgatactggttgtttgcagcctcattaccatgagtgtcatcctccttacacctgacgagctgactaattccagtgaaacccggctatccctggaagacctgttcagaaaggacttcgtactgcacgacccagaagccaggtggattaacgatacagacgttgtgtataagtctgagaatgggcacgtcattaagctgaatattgaaacgaatgcaaccacgttattgcttgaaaacacaacattcgtcacgtttaaggcgtcaagacattctgtgagccccgacctcaagtacgtgctgttagcttacgacgttaaacagatcttccactattcctacactgcgagctatgtcatttacaatatccacacacgggaggtttgggagctgaaccctcctgaagtcgaagatagtgtcctgcagtatgccgcatggggagttcagggacagcagcttatctacatctttgagaataacatctactatcagccggacattaagtccagttcactgcgtctgacttccagcggcaaggaagaaataatttttaatggaatagccgattggctgtacgaagaggagctgctgcacagccatatcgcccattggtggtcgccagatggcgagcgactcgcattcctgatgattaacgacagcttagtgccaaccatggtgatcccacgcttcactggcgcactctatcctaagggaaagcagtacccttaccccaaggccggtcaagtgaatccaactatcaaactttacgtggttaacctgtacggcccaactcacacgctcgagctgatgccacctgattcatttaaatctcgggagtattatattacaatggtgaagtgggtgtctaacaccaaaaccgtggttcggtggctgaaccgcgcacagaacatctccatcctgacagtgtgtgagactactaccggcgcatgttcaaaaaagtacgagatgacctccgatacatggctcagccagcaaaacgaggaacctgtattcagccgcgatggcagcaagttttttatgacagtgccagttaaacaggggggacggggtgagttccaccacgtagccatgtttctaatacagagcaagagtgagcagataacagtgaggcacttaacttccggcaactgggaagtgattaaaatactcgcatatgacgaaaccacacaaaagatctatttcctgtccacggaaagctccccacggggtcggcaactgtactctgcctctacagaagggttattaaaccgtcaatgcatatcatgcaattttatgaaagaacagtgcacctatttcgatgctagcttctcccccatgaatcagcactttctcctgttttgcgaaggcccaagggtccccgtggtctctctccacagcacggacaatccagcgaagtattttatactggaatctaacagcatgctgaaagaggcaatcctgaagaagaaaattggtaaaccggagattaagattcttcacatagatgattatgagttgccgcttcagctgtcactcccaaaagattttatggacagaaatcagtacgcactgctcctgataatggacgaagagcctggcggacagttggtcaccgacaaattccatattgattgggacagcgttctcatagatatggataatgtcattgtcgccaggtttgacggaagagggtccggttttcaagggctaaagattttacaggaaatccataggcgactcgggtctgtggaagttaaagaccagatcacggccgtgaaattcctcttgaaactgccgtatatcgattccaagaggttgtcaatctttggcaagggttacggtggatatatagctagcatgattttgaagtcagacgaaaaactgtttaagtgcggttccgtcgtggccccaatcactgacctgaaactgtacgctagtgcattctcagagcgctatctgggaatgccgagtaaagaggaatctacttaccaggctgctagcgtcctgcataatgtacacggactcaaggaggaaaatatcctgatcatccacgggaccgccgatactaaggttcatttccaacattctgcggaacttattaaacacctcatcaaagccggagtaaactatactatgcaagtttatcccgacgagggccacaatgtctcagagaagagtaaatatcacctgtacagcactatcctaaagttcttttctgattgtctgaaggaagagatttccgtgctgccacaggagcccgaagaagacgaatag

SEQ ID NO: 220872 - DNA, 2391 bp, synthetic construct
  misc_feature 1..2391: note = Description of Artificial Sequence: Synthetic coding sequence
  source 1..2391: mol_type = other DNA
atgaatcagacagcctccgtgtcacaccatatcaagtgtcagccgtcgaagaccatcaaggaactcggatctaatagcccccctcagcggaactggaaaggaattgccatcgctctgctagtgatccttgtcgtgtgcagccttataacaatgtccgtgatactgctgactcctgacgaactgaccaatagctcagagactcggctgagcttagaagatctgttcagaaaagacttcgtgctccatgatcctgaggccagatggattaacgacacagacgtggtctataaatccgaaaacggccatgtgatcaagttaaatatcgagacaaatgcaactacattactgttagagaatactacgttcgtgactttcaaggccagccgtcatagtgtgtcgcctgatttaaagtacgttctgctggcttacgacgtgaagcagatcttccattacagctatacagcctcttacgtcatttacaatatccacacccgcgaagtgtgggaactgaacccgcctgaggtcgaagattccgtgctgcagtatgcagcttggggagtgcaggggcaacaactgatctatatcttcgaaaataatatttactatcagcccgatatcaagtcctccagcctccgactgacgtcctcaggcaaggaagaaatcatatttaacggaatagcggattggctatacgaggaagagttgctgcacagccacatcgctcactggtggtcccctgacggcgagcggctggccttcctcatgattaacgactctctggttccaacaatggttataccgaggtttaccggtgcactgtatcccaaaggtaagcaatatccatatcctaaggccggacaggtcaatcctacgatcaagctgtatgtggtcaatctatatggaccaacacacaccctcgaactcatgcctcccgactcttttaagtcacgggaatactacattaccatggtaaagtgggtgtccaatactaaaacagttgttcgctggctcaacagggctcaaaacatctccatattgactgtgtgtgaaaccacgaccggggcttgtagtaaaaaatacgagatgactagcgatacatggctctctcaacagaacgaagagccagtcttcagccgggacgggagtaagtttttcatgactgtgcctgtgaaacaggggggtcggggagaattccatcatgtcgctatgtttctcatacagagtaagagcgagcagatcacagtgaggcatctcacttccggcaactgggaggtgattaaaattcttgcatacgacgagacaacccaaaaaatctactttctttccacggaatcaagtccaaggggcaggcagttgtacagcgcctccacagagggtctgttgaacagacaatgtatctcctgtaacttcatgaaggagcagtgtacttacttcgacgcatcctttagtcctatgaaccagcattttctgctcttctgcgaagggcctcgggtcccagttgtaagtctacattccaccgacaacccagctaagtacttcatcctcgagtccaatagcatgctgaaagaagctatcctcaaaaagaagataggaaagcccgagattaaaatcttgcatattgacgactatgaactgccattgcagttgagcctgccaaaagactttatggacaggaatcaatatgccttgctgctgattatggacgaggagccagggggacagctggttaccgataagttccacatcgattgggacagtgttctgatcgatatggacaacgtcattgtggcacgcttcgatggacgtgggagcgggttccagggcctgaaaattctgcaggaaatccaccgtcgcctgggctccgtggaggttaaagatcagatcacagcagtaaagttcttgctgaagctgccctacatcgactccaagcgactgagtatttttggcaaaggatatggagggtacatcgcatctatgattctgaagagcgacgagaaactgtttaagtgcgggagcgtggtggcaccaataaccgatctgaaattgtatgctagcgcattctccgagcgatacttaggtatgccgtctaaggaagaaagtacctatcaagctgccagcgtgttgcacaatgtgcacgggctgaaagaagaaaatattctgatcattcatgggaccgcagacactaaagtacatttccagcactctgcggaactcatcaaacacttgatcaaggctggcgtgaattacactatgcaggtctaccctgacgaaggccataacgtgtcagagaagagtaagtaccacctttactccaccatactcaagttctttagtgattgcttaaaggaagaaatatctgtgctcccgcaggaaccagaagaggacgaatag

SEQ ID NO: 220873 - DNA, 294 bp, synthetic construct
  misc_feature 1..294: note = Description of Artificial Sequence: Synthetic coding sequence
  source 1..294: mol_type = other DNA
atgtctgtcattctgctgacaccagacgagctgaccaacagctccgaaaccaggctgagtctagaagatctgttcaggaaggatttcgtcttgcatgatcccgaagctcgctggatcaatgataccgacgtggtttataagtctgagaatggccacgttatcaagctgaatatcgaaacgaacgcgaccacactgttgttagaaaataccacgttcgtcacctttaaagcctctcgtcattcagtgtcgccagacttgaagtatgtgctgctggcttatgacgttaagcaatag

SEQ ID NO: 220874 - DNA, 1803 bp, synthetic construct
  misc_feature 1..1803: note = Description of Artificial Sequence: Synthetic coding sequence
  source 1..1803: mol_type = other DNA
ctgtcaatccttatcctgaccagcaacgaactgactaatagctccgaaacccggttgtcgcttgaggatctttttcgcaaagatttcgttctccatgaccccgaggctagatggatcaacgacacagatgtggtgtacaagtctgaaaacggacacgtaattaagctgaatatcgagaccaatgccaccacacttctgctggagaataccaccttcgttacttttaaggcctccaggcactccgtctctccagatttgaaatacgtgcttttggcatatgacgtgaaacaaatcttccactatagttatacagctagctacgttatttataacatccacactcgcgaagtatgggagctaaatcctccagaggtggaggactctgtgctgcagtatgcagcttggggtgtgcaaggtcagcaactgatatacatattcgagaataatatttactatcagcccgatatcaagtcatcttcactgaggctgacatcgtccggaaaggaagaaatcattttcaatgggattgctgattggctgtacgaagaagagctgctgcatagtcacattgctcactggtggtctcccgatggggagagacttgcatttttaatgatcaatgattcactggtgcctactatggtcatcccacgcttcacaggagccctgtacccaaagggtaaacagtacccctatcctaaggccggtcaggtgaatcctactattaaactatacgtggttaacctgtacggtcccacccacacattggaactgatgccacctgactcattcaagtcccgcgaatactatattactatggtgaaatgggtgtccaatacaaaaaccgtcgttcggtggctaaatcgagcccaaaacatttctattctgactgtatgcgaaaccactaccggagcctgcagtaagaagtatgagatgacatctgatacatggctcagccagcagaatgaagagcctgttttctctagggatggaagtaagttctttatgaccgtgcccgtcaaacagggcggacggggagaattccatcacgtggccatgtttctgatccagagcaaatctgaacaaatcacagtccgccacctgacatctggtaactgggaggtgatcaagattctggcgtacgatgagacaacccagaagatctatttcctttcaactgagagcagccctcggggaagacagctctactccgccagcacagaaggtctcctgaataggcagtgtatctcgtgtaactttatgaaagaacaatgtacttactttgacgcctctttctcgcctatgaaccagcacttcctacttttctgtgaaggcccaagggttcctgtggtctcgttgcactcaaccgacaacccagctaaatactttatcctagagtctaattccatgctgaaggaggcgatcctgaaaaaaaagatcggtaaaccggaaataaagatcctgcacatcgacgattacgaactcccactccaattaagtttgccaaaggatttcatggatcgaaaccaatacgccctactgctcataatggatgaggagcccggaggccagttggtcaccgacaaatttcacatcgactgggattctgtgcttatcgatatggacaacgtgatcgtggcacggttcgacgggcgtgggagcggttttcagggactcaaaatcttgcaagagatccacagacggctcggctccgtggaggtaaaggaccaaatcaccgcggtcaagttcctgctaaagttgccttatattgacagcaagcgcttaagcattttcggtaaatag

SEQ ID NO: 220875 - DNA, 2241 bp, synthetic construct
  misc_feature 1..2241: note = Description of Artificial Sequence: Synthetic coding sequence
  source 1..2241: mol_type = other DNA
atgtccgtgatcctcctcacgcccgatgagctgactaattcttctgaaacaagactctctctggaggatttatttagaaaagactttgtgctccatgaccccgaagccaggtggattaatgacactgacgtggtctacaagagcgagaacggccatgtgatcaagctcaacatcgaaaccaatgctacaactctgctcctagaaaacaccactttcgttacatttaaagcttccagacacagcgtcagcccagacctgaaatatgttcttctggcctatgacgtgaaacagatctttcactacagctacactgcttcttacgtcatctataatatccacacaagggaggtttgggagttaaaccctcccgaggtcgaagatagcgtcctgcaatacgccgcttggggagtgcaaggccagcagcttatctatatattcgagaacaacatttattatcaacctgacataaaatcaagttccctgcggctcacctccagcggcaaagaggagatcatcttcaacggaatcgccgactggttgtacgaggaggaactattacacagtcacattgcacattggtggtcacccgatggagaaaggctcgcattccttatgattaacgacagcctggttccaacgatggtaataccccgattcacaggcgcactgtacccaaagggaaagcagtacccatatcctaaggctggccaagttaaccctactatcaaactctatgtggttaatctctatggcccaacccatactttggagctcatgccaccagatagttttaagagccgggaatattatatcacgatggtgaaatgggtttcgaacacaaaaactgtggtgagatggttaaacagggcccagaacatctcaatcctgaccgtgtgcgaaacaactaccggagcatgctccaagaagtacgaaatgacctctgacacatggttgtcacagcagaacgaggagcctgtgttctccagggacgggtccaagttctttatgacagttcccgtgaagcagggaggtaggggagagtttcaccacgttgcaatgtttctcattcaaagcaagagtgagcagataacggttcggcacttgacaagtggtaactgggaagtcatcaagatactggcatatgacgagactacccagaaaatatactttctgtctaccgagagctcccccaggggtaggcagttgtactccgcctcgacagaggggttattgaatagacagtgcatctcctgcaactttatgaaagagcagtgtacatacttcgatgcctctttcagccctatgaaccagcatttcctgttgttttgtgaggggcctcgtgtccccgtggtatctctgcacagcacagataacccagcaaagtatttcatccttgaatcgaatagtatgctgaaggaagccattttaaagaaaaaaataggcaaaccagagatcaaaatactacacatcgatgactacgaactgcccctacagctcagtctgccgaaggacttcatggatcgaaaccagtacgcccttctgctgattatggacgaggaacctggaggccaactggtgacagacaagttccacatcgattgggactctgtgttgatagatatggataatgtgattgtcgccagatttgacggtcgaggtagcgggttccagggactgaagatcctgcaggagatccatagacggctcggctccgttgaggtaaaagaccagatcacggcagtgaaatttcttctgaaactgccatacatcgactccaagcgcctctcaatttttggaaaaggctacgggggttacattgccagcatgatcctgaaaagtgatgaaaagttgttcaaatgtgggagtgtggtcgcaccaatcacagatctaaaattatatgctagtgctttctccgagaggtatctcggcatgccctctaaagaagaatcgacataccaggccgcttcagtacttcacaacgtgcatggacttaaagaggaaaatatcctcatcatccatggcactgccgatacgaaagtccacttccaacacagcgctgagttgattaagcaccttattaaggccggtgtcaactacacaatgcaggtttaccctgatgaagggcacaacgtgtccgagaagagcaaatatcacctttactctactattctgaaattcttctcagattgtctgaaagaggagatttcagtgctgccccaggagccagaggaagacgagtag

SEQ ID NO: 220876 - DNA, 954 bp, synthetic construct
  misc_feature 1..954: note = Description of Artificial Sequence: Synthetic coding sequence
  source 1..954: mol_type = other DNA
atggccgacacccagtatattctcccgaacgacattggtgtttcaagcctggactgcagggaagcctttagactcttaagtccaacggagcgtttgtacgcgtatcatttgtcgcgggctgcatggtacgggggactggcagtcctcctgcaaacctcaccggaggctccatatatctatgcactgctgtctcggctgtttagagctcaagatcctgaccaattgcggcagcatgccctcgcggagggcttaactgaggaagagtatcaagctttcctggtatatgccgctggggtatactctaatatgggcaactataagtcgtttggagatactaaatttgtacctaacctccctaaggaaaagcttgaaagggttatcctggggagtgaagccgcacagcagcaccccgaggaggttcggggtttgtggcaaacctgtggggaacttatgttcagcctggagcctagacttcggcacctgggcctagggaaggaaggcattacaacctactttagtggaaattgcactatggaagacgcacgcgtccgacttgatagaagcaaaatcagatccgtgggcaagccggctctggaaagattcctgcggagactccaagttctgaagtccacaggagacgtggccggtggccgtgcactttacgagggctacgccacagtcactgacgcaccccctgagtgctttctgacactgagggacacagtacttcttcgtaaagaatctcgtaagctgatcgtgcagcctaacacacgacttgagggatctgatgtgcaactcctcgagtacgaggcaagcgctgccggactcatcaggagcttcagcgaaagatttcctgaggacggtcccgaactggaggaaattctcacccaattagccactgctgatgccaggttttggaaagggccttccgaggctccctctgggcaggcctag

SEQ ID NO: 220877 - DNA, 2214 bp, synthetic construct
  misc_feature 1..2214: note = Description of Artificial Sequence: Synthetic coding sequence
  source 1..2214: mol_type = other DNA
atggccgacacacagtatattcttccgaacgatatcggtgtgtccagcctagactgtagagaggcattcagattgcttagtccaaccgagcgcctatacgcataccatctcagccgggcagcatggtatggtggactggcagtgctactgcagacgtctcctgaggccccttatatctacgctcttctcagcaggctgtttagagcccaggaccctgatcagcttcgccagcacgccttagctgaggggctgacggaggaagagtaccaggccttccttgtttatgccgctggtgtgtacagcaatatggggaactacaagtcctttggtgatactaaatttgttcccaatctgccaaaagagaaactagagagggttattcttggttccgaagccgcacagcagcatcctgaagaagtccgaggcttgtggcagacatgtggagaactgatgttttctctcgaacccaggctgcgccaccttgggctgggcaaggagggcatcaccacatacttttcaggcaattgtacgatggaagacgccaaactggctcaagactttctcgactcgcagaacctgagtgcctacaatacaagactgttcaaagaggtagatggtgagggcaagccctactatgaagtacggcttgcctccgtgctgggcagtgaaccaagtctggactctgaggttacgagcaaactgaagtcctatgagttccgcggttcaccttttcaggtgactaggggcgactacgcccctatcctgcagaaggtggtggaacagctggaaaaagctaaggcgtatgccgctaacagtcatcagggacagatgctcgcccaatatatcgaatctttcacccaagggagtatagaggcacataaacgtggatccaggttctggatacaggacaaaggaccaatagtcgaaagctacattggcttcatagagtcttaccgagatccctttggatctcggggagaatttgaagggttcgttgctgttgtgaataaggcaatgagcgccaaattcgaacgactggttgcctctgcggagcagctgctcaaggaacttccatggcctccgaccttcgagaaggacaagttcttgaccccagactttacttccctcgacgtgctaacttttgcaggcagtggaattcccgcaggaataaacattccaaactacgacgacctaaggcagactgaggggttcaagaacgtctctcttggcaacgtgcttgctgtagcttacgctacacagagggaaaaacttacatttttggaggaggacgataaggacctgtatatcctgtggaagggtccttcctttgacgtccaagtcgggctgcatgaactacttggccatgggtcaggaaaactctttgttcaagatgagaagggtgccttcaattttgaccaagaaactgtcatcaacccagagacaggcgaacaaattcagtcctggtaccgctccggggagacctgggacagtaagttttctacaatcgcctcctcctatgaggagtgtcgggcagagtcagtaggattgtacctgtgtctccatccacaggtattagaaatctttggctttgaaggtgccgatgcagaagacgtgatctatgtcaactggctgaacatggtaagggctggactcttggcacttgagttctatacacccgaagctttcaattggcgtcaagcccatatgcaggctaggtttgtgattcttagggtgttgttggaagccggagaaggtttagtcacgataactccaacaactggaagtgatggacgcccagacgccagagtcagactggaccgcagtaagatccgcagcgtaggcaagcccgctctggagcgattcttgcggaggctgcaggttctcaagtcgaccggcgacgtcgctggcggaagggctctatacgagggttatgctacagtcactgatgcacctcccgaatgcttcctaacgctacgcgacaccgtcctcctgaggaaggaatcaaggaagttaatagtccagcctaacactagactggagggatccgacgtgcagctgttggaatacgaagccagcgcagccggtctgattagaagcttttctgaaagattccccgaggacggccctgagttagaagagatccttactcagctggccaccgccgatgccaggttttggaaaggcccatctgaggcaccctccggtcaggcttag

SEQ ID NO: 220878 - DNA, 2214 bp, synthetic construct
  misc_feature 1..2214: note = Description of Artificial Sequence: Synthetic coding sequence
  source 1..2214: mol_type = other DNA
atggccgacacacaatacatcttgcccaatgatattggagtgtcgtctctcgactgccgcgaggccttcaggttactgtctcccaccgagagactttacgcctaccacctgtctagagctgcgtggtacgggggactggcagtcttgctccaaacgtcccccgaagcaccttatatctatgccttacttagtcgcttgttcagagcccaagatccagatcagttgaggcagcatgccctggcggaaggcctgaccgaggaagagtaccaggccttcttggtgtatgcagccggagtgtatagcaatatgggcaattataagagctttggagatacaaagttcgtccccaacctgccgaaagagaagcttgagagagttatccttggaagcgaggctgcacagcagcacccagaagaggtccggggactttggcagacttgcggggagctgatgttctccctggagccacgactgcgtcatcttggcctgggcaaagaaggtatcactacgtactttagcggcaactgcacaatggaggacgcaaaactggcacaggatttcctcgacagccagaatctgtcagcgtacaacacacgactttttaaggaggtggatggtgagggaaaaccctactacgaggtgcgcctcgctagcgttctcggaagcgagccctccctcgatagtgaggtgacctccaagctgaagtcctacgaatttcgcggaagcccatttcaggtgaccaggggcgattacgcgcctattctgcaaaaggttgttgagcagctggagaaggctaaggcatacgcagcaaatagccatcagggtcagatgctcgcgcaatacattgaatcatttacccagggatctatcgaagctcacaaaagggggagccgcttctggatccaagacaaaggacctattgtggaatcttatattggattcattgagagctacagagaccctttcggaagccgcggagaatttgaaggattcgtggcggtggtcaacaaggcaatgtcggctaaatttgaacgccttgtggcctctgcagagcaactcttaaaggagctaccttggcccccaaccttcgagaaagacaaattcctgacgcctgactttacgtcacttgacgtccttacgtttgctggctcggggatccctgcaggaattaatataccgaactacgatgacctgcgtcagaccgaaggctttaagaatgtgtctctcggtaacgttttggcggtagcttacgcaacgcagagagagaagctaactttcctggaagaagacgataaggacctatatattctgtggaaggggcctagttttgatgtccaagttgggctccatgagctgctaggccatggctcaggtaaattgttcgtgcaagacgaaaaaggagcttttaattttgaccaggagacagtgattaatcccgaaacaggcgaacagattcaaagttggtatcggtcgggggaaacatgggactccaagttttctactatagccagcagttatgaggaatgtagagcagagtctgtgggcctatacctttgcctgcatcctcaagtcctcgaaattttcggcttcgaaggagctgacgcagaagatgtaatctacgtgaactggctgaacatggtcagggcgggactgctggcattggagttttatacacctgaagccttcaactggcgccaggcccacatgcaggctcgatttgtgatcctgagggtcctgttggaggccggagaaggtctcgtcactatcaccccgacgacgggtagtgatggacgcccagatgcccgagttagactggaccggagtaaaattcgtagcgtagggaaacctgctctcgagcggtttctcagacggctacaagtcctgaaaagcacgggagatgtggcgggaggcagggccctttacgagggttacgccactgtgacagacgctccccctgagtgcttcctgacgcttcgagataccgtgttgctcagaaaggaatctcggaaactaatagtgcagccaaacacacggctggaagggtccgacgtgcaacttctggagtacgaagcctctgcagctggactgattcgatctttctcggaacgttttcccgaggacggcccagaacttgaggagatcctgacccagctagccactgcagatgccagattctggaagggtccctctgaggcacccagcgggcaggcctag

SEQ ID NO: 220879 - DNA, 273 bp, synthetic construct
  misc_feature 1..273: note = Description of Artificial Sequence: Synthetic coding sequence
  source 1..273: mol_type = other DNA
atggcggacactcaatacatcttgcccaacgacatcggagttagcagcctggattgtagggaggcgttccgcctcttaagccctaccgaacggctttacgcctaccatctgtcacgtgcagcctggtatgggggactggcagttttattacagacatctcccgaggccccttatatctacgcactacttagcaggcttttcagggcacaggaccctgaccaactgcgacagcatgctttggcagagggcctgacagaggaagaatatcagtag

SEQ ID NO: 220880 - DNA, 606 bp, synthetic construct
  misc_feature 1..606: note = Description of Artificial Sequence: Synthetic coding sequence
  source 1..606: mol_type = other DNA
atggccgacacccagtatattttacccaacgatattggggtgagttcactagactgccgggaggcatttaggctcctctccccaaccgagcggttatacgcttatcatctaagcagagcagcttggtacggtggtttggctgtgctgttgcagacaagtcccgaggccccttatatatatgccctgctgagtagactattccgagcccaggaccccgaccagctaagacagcacgccttggccgaggggcttacggaggaagaataccaagcattcctggtttatgccgcaggcgtctactccaatatgggcaactacaaaagttttggggatacgaaattcgtgccaaacctgcctaaagagaagttagagcgggtaatccttggatctgaagcggcacagcagcatcccgaagaagtccgtggtctctggcagacctgcggcgagctgatgttctctctggagcccagactgcgtcacctcggccttgggaaagaggggatcacaacatacttctccggcaactgcaccatggaagatgcaaaattagcccaagatttcctcgattcccaaaatctctcagcttataatacccggcttttctag

SEQ ID NO: 220881 - DNA, 2274 bp, synthetic construct
  misc_feature 1..2274: note = Description of Artificial Sequence: Synthetic coding sequence
  source 1..2274: mol_type = other DNA
atgggggaacctgaggcagggtctgaattcgcgaacggggcagccgcagcagccggtcccatggccgatacccagtacatactgccgaatgacataggagtgagttcgctggattgccgggaggcatttcgtctgctgtctcctacagagcggttatacgcttatcacctgagccgcgctgcctggtacggcggattggccgtactgctccagacctcccccgaggccccttacatctatgcactcctgtcgcgactgtttagagctcaggatcccgaccagttgcgccagcacgccttggccgagggattgaccgaggaagagtatcaggcgttcctggtctatgctgcaggggtgtactctaacatgggaaactataagagtttcggcgacactaagttcgttcccaatctgcccaaggagaaacttgaaagggttatcctcgggagcgaagccgcacagcagcaccctgaggaggttagaggcctttggcaaacctgtggagaactgatgttttccctggagcctcgcctgaggcacctgggcctcgggaaggagggaattaccacatatttttctggcaactgcacgatggaggacgctaagctggcccaggactttttggatagtcagaatctgagcgcttataacactcggctcttcaaggaggttgacggggaaggcaagccatattatgaggtcaggcttgcaagtgtgctagggtcagagccgagcctggactctgaagtgacctcaaaactcaagtcatacgagtttcggggaagcccatttcaggtaacaaggggggactatgccccaatcctgcagaaagtggtcgagcagcttgaaaaggctaaagcttacgcagctaattcccatcagggacagatgctcgcgcagtatatagagagctttactcagggcagcattgaagcgcacaagagaggtagcaggttttggattcaagacaaaggacctattgtggagtcgtatatcggcttcattgagtcttatcgcgaccccttcggatcccggggagagttcgaaggcttcgtggctgtggttaacaaggcgatgagcgccaagttcgaacgtcttgtcgcaagcgctgaacaactcttgaaggaactcccctggccacctacattcgaaaaagataagttcttgacaccagacttcacatctttggacgtgctcactttcgccggatccggaatcccagccggtatcaacattccgaactatgacgacctgaggcagactgagggattcaaaaatgtcagcctgggaaacgttctggccgttgcatatgccacccaacgagagaaactgaccttccttgaggaagatgacaaggacctgtatattctctggaagggtccttcctttgacgtccaggttggcttacatgaattactagggcacggatccggtaagttgttcgtgcaggacgagaaaggtgcattcaattttgatcaagagacggttatcaaccccgagaccggggagcaaatccaaagctggtatcgttcaggcgagacctgggattcaaaatttagtactatagcttccagctacgaagagtgccgcgcagagtctgttggactttatttgtgtcttcacccccaggtgctcgagatttttgggttcgagggtgctgacgctgaggacgtgatctatgtgaactggctgaacatggtgcgggctggcttactggccttggaattctatacacccgaggcttttaactggcgacaggcccacatgcaggccagatttgtaatcctccgagtgttactggaagcgggagagggacttgtgaccatcactccaacaacaggatcagatggaagaccagatgctcgtgtgaggttagatcggtccaaaatcaggagcgtgggcaagccagccttggaacggttcttgcgcaggctgcaggtgctaaaaagtaccggggatgtggctggcggtagagctctgtacgagggatacgcaaccgtaacggacgcgcctcctgaatgttttctgactctccgggacactgttctactgagaaaggagagtcgcaaactcatcgtgcagcctaacacccggcttgagggttctgacgtccagctactcgaatatgaagcttcagccgctggcctaataagatctttctcagagagatttcctgaagatggccctgagctggaggagattttaactcagctggctaccgcagacgcgagattctggaagggtccatcagaagcacctagcgggcaggcttag

SEQ ID NO: 220882 - DNA, 2271 bp, synthetic construct
  misc_feature 1..2271: note = Description of Artificial Sequence: Synthetic coding sequence
  source 1..2271: mol_type = other DNA
atgggggaacctgaagccggatccgaattcgccaatggtgcggctgccgcagggccaatggcagatactcagtatatcttgcctaatgacataggagtctcatccctggattgtagggaggcctttagattgctgtcacccacagagaggctctacgcctatcacttatcaagagccgcatggtacgggggtctcgctgtgctgctgcaaacgtcccccgaagctccgtacatctatgccctcctgtcccgtctgttcagagctcaggacccggatcagttaaggcaacatgcgcttgctgaaggcctaactgaggaggaataccaagcctttctggtgtatgctgctggggtctacagtaatatgggcaactacaagtcattcggagacaccaaattcgtccccaatctgccaaaagagaagctggaacgggttatattgggatcagaagcagctcagcaacatcccgaagaggtgcgcggactctggcagacctgcggtgaattgatgttttcgctggagcccaggctgaggcatctgggtctgggcaaggagggaataaccacttatttctctggtaactgtacaatggaggatgcaaaactggctcaggatttcctagacagtcaaaacctgtccgcatacaatacgcgccttttcaaggaggttgacggcgaaggcaagccttactacgaggtaagactcgccagtgtcctcggtagcgaaccttccctggacagcgaggttaccagcaagcttaaaagctacgagtttagagggtcgccctttcaggtcacccggggtgattacgcacccatcctccagaaagtggtggaacagttggagaaggcgaaggcctacgcagcaaatagtcatcaggggcagatgcttgcccaatacatagaatcattcactcagggcagtatagaggctcataagcggggatctagattctggattcaggacaaaggacctatagtggaatcctatattggctttattgaatcatatagagatcccttcggctctcgcggtgagttcgagggatttgtggccgtggttaacaaagccatgtccgctaaattcgaaaggctggtggctagtgctgaacagctgttaaaggaattaccctggccgcctacttttgagaaagacaaatttttgactccagatttcactagcttggacgtgcttacctttgccggttctggcattcccgcaggaattaacattccaaactacgacgatctccgacagacggagggctttaaaaatgtctctctgggcaatgtgttggcagtggcctacgccactcagcgtgagaaactcacattccttgaggaagatgacaaagacctttatatcctttggaaggggcctagctttgatgttcaggttggactgcacgagctcctcggacacggatccggcaagctgttcgtccaagatgagaaaggggcatttaattttgatcaagagactgttatcaacccagagactggggagcagattcaatcatggtatcgttctggcgagacatgggattcgaaatttagtacaatcgcaagtagttatgaggaatgccgcgcagagtctgtgggcctgtatctttgcttgcatccacaggtgttagagatttttgggtttgagggtgcggacgccgaggatgtgatatacgtaaactggttaaacatggtcagagctgggcttctggccctggagttttatacgccggaggcttttaattggcggcaagcccatatgcaggccagattcgtgatcctgcgggtgctgttggaggccggagaaggacttgtgacaatcacacccactactggctcagatgggagacccgacgctagagtccgcctggatagatccaagattcgttcagtgggaaaacctgccctggagcgatttttgcgcagactacaagtcctgaagtccacaggggacgtagccggaggaagggccctctatgagggctatgcaaccgtaaccgacgctccacccgagtgcttcttgactctaagggacacagtgctgcttcgtaaggagtcccggaaactgatcgtgcaacccaacaccaggctcgaaggctctgacgtgcagcttctagaatatgaagctagcgccgcaggattgatccgcagttttagcgagcggtttccagaggacgggccagagcttgaggagatccttacccagctcgccacagcggacgcgaggttctggaaggggccatccgaggccccatccggccaggcctag

SEQ ID NO: 220883 - DNA, 2214 bp, synthetic construct
  misc_feature 1..2214: note = Description of Artificial Sequence: Synthetic coding sequence
  source 1..2214: mol_type = other DNA
atggcggacacccaatacatccttcctaacgacatcggtgtgagcagtctggactgcagagaggccttcagactgctgagcccgaccgaacgcctctatgcttatcatctttcccgggctgcctggtacggaggccttgcagttttactgcagaccagtcctgaggctccctacatttacgctttactgtcccgcctttttagggcccaagatccagatcagcttaggcaacatgccctggcagaggggctcactgaggaagaatatcaggcctttctagtctatgcagccggagtgtattccaatatggggaactataagagcttcggagataccaaatttgtcccgaaccttcccaaggaaaagttggagcgggtcatcctgggtagcgaggccgctcagcagcaccccgaggaggttaggggactttggcagacctgcggcgagcttatgttctccctagagccccgattaaggcatttgggcctcggaaaggagggaattacaacctatttttccggtaattgcacaatggaggacgctaagctggctcaggacttcctggacagtcagaaccttagcgcctataatacccgcctgttcaaggaagtggatggcgaaggaaaaccttactatgaggtccgtctcgccagtgtccttgggtccgagccaagtctcgactctgaagtaacatcaaaattgaagtcttacgagttccggggaagtccatttcaggtaacacgcggtgattatgcaccaatactgcagaaggtggttgagcagctggaaaaagctaaagcctatgccgctaattcccaccaggggcaaatgcttgcccaatatatcgagagcttcactcaaggctcaattgaagcacataagcggggttcaagattctggatccaggataaaggacccatcgttgagagttatatcggctttattgagtcctacagggaccctttcgggtcacggggagaatttgagggattcgttgctgtagtcaataaggcaatgtcggctaaatttgagcgcctggtcgccagtgcagaacaactgttaaaggagctcccgtggcctccaacattcgagaaagacaagttcctaacaccagactttaccagcctcgatgttttgacgtttgctggctctggaattcctgctggcatcaacatcccaaactatgatgacctgcgccaaactgaaggatttaagaacgtgtccctgggtaatgtgctggcagtagcatatgctacgcagcgagagaaactgactttcctggaagaagatgacaaagacctgtacattctatggaagggtccttcattcgacgtgcaggtggggctgcacgagctactagggcacgggtctggtaaactgtttgtccaagatgagaaaggggctttcaatttcgaccaggagacagtaataaaccccgaaaccggcgagcagattcaaagttggtatcgttcaggcgagacctgggattcgaagttttccaccattgctagcagctacgaggagtgtcgggcagagtctgtcggcctctacttatgccttcacccccaagtgcttgagatatttggctttgagggggctgatgctgaagatgtaatttatgtaaactggctaaacatggtcagggctggcctactggccctggagttctatactcccgaagccttcaattggcgacaggcccacatgcaagcgcgattcgtgattctgcgggtgctgttagaggctggagaaggcttggtcacaatcacacctaccactggatctgacggtcggcctgatgctagggtccggcttgacaggtcaaagatcagaagcgtgggaaaaccagcactggagaggtttctccgacgactccaggtcctgaaatccactggagacgtggccggaggaagggctttatacgagggctacgctacggtgacagacgcaccccctgagtgttttctgactttgcgcgataccgttctgctgcgtaaggagagcaggaagttgatagtccagcctaacacgcggctcgagggtagcgatgttcagctgctcgagtacgaggctagcgccgctggactcattcgaagtttctccgagagatttcccgaagacggaccagagctggaagaaatcctaacccagcttgctacggcagatgcacgattttggaaggggcctagcgaggctccaagtgggcaggcctag

SEQ ID NO: 220884 - DNA, 1908 bp, synthetic construct
  misc_feature 1..1908: note = Description of Artificial Sequence: Synthetic coding sequence
  source 1..1908: mol_type = other DNA
atgggaaactacaagtccttcggagataccaagtttgtgcctaatctccctaaagagaaattggaacgcgtaatcctaggttccgaggccgcacagcagcatcccgaagaagtgcgaggactgtggcagacatgtggtgagctgatgttttccctggagccgaggctcagacatctggggctcgggaaagaggggatcactacatacttcagcggtaattgtacaatggaagatgcaaaattggcccaggacttccttgatagccaaaacttatctgcttataacaccaggctgtttaaagaggtggacggagagggtaagccttattacgaagtgagactggccagtgtccttggatccgaaccctctctcgatagcgaggtaacaagtaaactgaaaagctacgagttccggggatcaccgttccaagtgacccgtggagattacgctcctattctccagaaggtcgtggagcaattagaaaaggctaaggcatacgcagctaactcccaccaggggcagatgttggctcagtatatcgaaagttttacccaaggctcaatcgaagcacacaagagggggagtagattctggatccaagacaaaggccctatcgtggaatcctatattggatttatagagagctatcgcgatcccttcggatcccggggtgaatttgaggggtttgtcgcagtcgtgaacaaggctatgtctgcaaagtttgagaggctcgtggcgagcgcagagcagctccttaaggaactgccatggcccccaacatttgagaaggacaaatttcttactcccgacttcacttccttagatgttctgacgttcgcaggctccggcattccagccggtataaacattcctaattacgatgatctgcgccaaaccgaagggttcaaaaatgtgtcgttggggaacgtgctggccgtggcatatgctacccagagagagaagctgacctttttagaagaggatgataaagacttatacatcttatggaaaggcccaagcttcgatgtccaggtgggcctgcacgaactcctggggcatggctcaggcaagctgtttgtgcaggacgagaagggtgccttcaactttgatcaggagacagtgattaacccggagactggagagcagatccagtcatggtaccgaagcggtgaaacctgggactctaaatttagcacaattgctagcagctatgaagaatgtcgcgctgagtctgtgggtctgtacctgtgcctccatccccaggtactggagatattcggctttgaaggtgccgacgccgaggacgttatttacgtcaactggttaaatatggtgcgggctggattgctggcgctggagttctacactcctgaagctttcaactggcgccaggcccacatgcaggcgaggtttgtaatcctgcgcgtgcttttagaagcgggtgaagggcttgtaaccatcactccgaccactgggtccgacggaagaccagacgctcgggtgagactagacagatcgaaaatccgtagtgtgggcaagccggcactggaacgtttcctgcggagactccaagtgttgaaaagcactggagacgtcgccggagggcgtgcgctgtacgagggttacgccaccgtgacagacgcgccacccgagtgcttcctcactctccgcgacaccgtgctgctgcggaaggaaagtcgaaagctgattgtccagccaaacacaaggctggaaggcagcgatgttcaactgcttgagtacgaagccagcgcggctggactaattcggagtttcagcgaaaggtttcccgaggatgggccagaactggaggaaattttgacccagttagcgaccgccgacgccaggttttggaaaggtccttctgaggctcccagcggacaggcctag

SEQ ID NO: 220885 - DNA, 2412 bp, synthetic construct
  misc_feature 1..2412: note = Description of Artificial Sequence: Synthetic coding sequence
  source 1..2412: mol_type = other DNA
atgactacagccaaggaacccagcgccagcggcaaatcagttcagcaacaggagcaggagctggtaggaagcaaccctccccagcgcaattggaaaggaattgccatcgctctcctggtgatactcgtgatttgtagcttgattgtgacatccgtcatactcctcacacctgcagaagataatagcctctcccaaaaaaagaaagtaaccgtcgaagacctctttagcgaagacttcaagattcacgacccagaggctaagtggatcagcgacaccgagttcatttatagagaacagaaaggcactgtccggctctggaacgtagaaacgaatactagtacagtgttgatcgagggaaaaaaaattgaatcactgcgagcaatcaggtacgaaatcagtcccgatagagagtatgccctgttctcctataatgtcgaaccgatttaccagcattcctatacgggatattacgtactgtcaaaaatcccgcacggggacccacagtccctcgacccccctgaggtttccaacgcaaaactgcagtacgccggttggggcccaaagggccagcaactgatcttcattttcgaaaacaatatctactattgtgcacatgtgggtaaacaagccattcgcgtagtttctacaggcaaggagggtgtcatttataacgggctcagtgactggctgtacgaggaggaaattcttaaaacccatatcgctcattggtggagccccgatggaacgcgtctggcatacgcagctattaatgattctcgcgttcctattatggaactgccaacatacaccggatcgatctaccctacagtcaaaccttatcactatccgaaggccggaagtgagaatccatccatctcccttcacgttatcggtctgaacggtccaactcatgacctggagatgatgcccccagacgatccacggatgcgagaatactacatcacgatggttaaatgggccaccagcacaaaagtagcagttacgtggctcaacagagcgcagaacgtgtcaatccttacgctgtgcgatgcaactacaggagtttgcacaaaaaaacatgaggatgaaagtgaggcgtggctgcatagacaaaacgaggagccggtgttcagtaaggatggcagaaaattcttctttattagagcaatccctcagggcggtcgcggtaagttttatcacatcaccgtgtccagctcacagcccaattcctccaatgacaacattcagtctataacatctggagattgggatgttacaaagatcctggcatatgacgagaagggtaataagatatacttcctcagcactgaggaccttccccgtaggaggcagctatattccgccaacactgtaggcaattttaacagacagtgtctgtcctgcgaccttgtcgaaaattgtacctatttctctgccagttttagccatagcatggacttcttcctgctgaagtgcgagggtcctggggtcccaatggtgacggtgcataacaccaccgacaaaaagaaaatgttcgatctagaaacaaatgagcatgtgaagaaagctatcaacgataggcagatgccaaaggtagagtatcgcgatattgagatcgacgactacaatctgccaatgcagattctgaagcccgcaacatttaccgacacgacgcattatcctctcctgcttgtcgtagatgggaccccaggctctcagtctgtcgctgagaagtttgaggtgagttgggagaccgtgatggtgtcaagccacggggctgtcgttgtgaagtgcgatggccgtggtagcgggttccagggaaccaaattgcttcatgaggtgaggaggaggctaggattattagaggagaaggatcagatggaagccgtgagaactatgttgaaagaacagtatatcgataggaccagggtcgccgtattcggtaaggattacggtggatacctctctacgtacattctacccgcaaaaggcgagaatcagggacaaacttttacctgcggatcagctctgtcacccattactgatttcaagttatacgcctcagccttctcagaaaggtacctcggactgcatgggctggacaaccgagcgtacgagatgacaaaggtggcccaccgagtgagtgccctggaggaacagcagttcctcattattcatcccacggcggacgaaaaaattcactttcagcacacagctgagctgataacccagctgattcgaggcaaagccaactactctctccagatttatccagacgagtcccattattttacatcaagttcgttaaagcagcatctatataggagtatcatcaacttcttcgtcgaatgctttcgaatccaggacaagctgctgacagtgacagccaaagaagacgaggaggaggattag

SEQ ID NO: 220886 - DNA, 2598 bp, synthetic construct
  misc_feature 1..2598: note = Description of Artificial Sequence: Synthetic coding sequence
  source 1..2598: mol_type = other DNA
atggctagcctgtatcagcgctttacagggaagattaatacaagtcggtcttttccagctccacccgaagcaagccatctactcggagggcagggaccagaagaagatggcggagctggggctaagcccctggggcctcgagcccaggctgcagcacccagagaacggggtggaggcggaggaggggcagggggacgcccaaggttccaatatcaagcacggtcagacggcgatgaggaggacgaacttgttggatccaacccacctcagcgcaattggaagggaattgcgatcgctctgctggtgatattagtcatttgttccctgattgtgaccagtgtgatcttactgactcctgctgaagacaacagtctgtcccagaagaaaaaggtcacagttgaggacctattttcagaagacttcaagatccacgaccctgaggccaaatggatctccgacaccgagtttatctacagagaacagaaaggcacagtgcgattatggaacgtcgaaacaaacacctccaccgttctcatcgaagggaagaaaatagaatcccttcgcgctattcgctatgagattagccccgacagggaatacgccctgttctcttataacgtggagccgatttaccaacactcctataccggatactacgtgttgtccaagatcccccacggggacccacaatctctagacccccctgaggttagcaacgcgaaactgcagtacgccggatggggacctaaaggtcagcagctcatcttcattttcgagaacaacatatactattgcgcccatgtgggaaagcaagccatcagagtggtcagtacgggcaaagaaggagtgatttataatgggctcagcgactggctgtatgaagaggaaatcctaaaaacgcacatagcgcattggtggtcacccgatggtacacgactggcctatgcagctatcaacgattctcgcgtgcctatcatggagctgcccacgtacactggttcgatctacccaacagttaagccctaccattacccgaaggctggctctgagaatccatcaattagcttgcatgtgatcgggttgaatggccctactcacgacctggaaatgatgcctcccgacgatcccagaatgcgggaatattacatcacaatggtgaaatgggccacttccacaaaagtggccgttacctggttaaatcgtgctcagaacgtctctatcctgaccttgtgtgacgccaccacaggagtgtgtacaaagaagcatgaagacgagtcagaagcctggctacacaggcaaaatgaagaaccggtatttagcaaggatggtcgtaagttcttcttcatccgcgctataccccaaggcggacgaggtaagttttatcacatcaccgtaagttccagccagcctaactctagtaatgataatatccaatctattacctccggtgattgggatgttaccaagatattagcctacgacgagaagggtaacaagatttactttctctccacggaggatttaccgaggagacggcagctgtatagcgccaatactgtgggcaactttaacagacaatgcctcagctgcgacctcgtcgagaattgcacttatttcagcgcatccttctctcattcaatggacttttttctactaaagtgtgaaggccctggtgtgcctatggttaccgtgcataataccaccgacaaaaaaaagatgttcgacctggaaaccaacgaacacgtgaagaaagccatcaatgaccggcagatgccaaaagtggaatacagagatatcgagatcgatgactataacctccctatgcagatcctgaagcctgccacatttacagacacaactcattatccactgttactcgtagtagatggcaccccaggctcccaatctgttgccgagaagtttgaagttagctgggaaacggtgatggtatcttctcacggtgccgttgtggtgaagtgcgatggcagaggcagcggctttcagggcacaaagttgctgcacgaggtgcgccgtagattgggcctgctcgaggagaaagatcaaatggaagcagtcaggactatgctgaaagagcagtatatcgataggacacgggtggcagtctttggtaaggactacggtggatacctttctacttacatccttcctgcaaagggggagaatcaaggacagacctttacttgtggcagcgctctgagccctataactgactttaaattgtacgcttcagcattttcagagagatacttgggtctgcacgggctcgacaacagggcctacgagatgacaaaggtcgcccacagagtgtccgctctcgaggagcaacagttccttattatccaccccactgcagatgagaagattcatttccagcatacagccgagttgattactcagctcatcagaggtaaggccaactattcgctgcagatctatcctgacgaatcccactacttcacttctagttccttgaagcagcatctgtacaggtcaatcattaacttttttgtggagtgttttcgtattcaggacaaacttctcaccgttacagccaaagaggacgaggaggaggattag

SEQ ID NO: 220887 - DNA, 2406 bp, synthetic construct
  misc_feature 1..2406: note = Description of Artificial Sequence: Synthetic coding sequence
  source 1..2406: mol_type = other DNA
atgaaggagaaggcaatgatcaagaccgctaaaatgcaggggaacgtgatggagctggtaggctccaaccctcctcaacgtaactggaagggtatcgctatagccttattagtcattctggttatttgtagcttaattgtcacttcagtcattcttctgacccccgctgaggataacagtctgagccagaaaaagaaggtgaccgtggaagatttattctcagaggactttaagatacacgaccctgaggccaagtggatatccgacaccgagttcatataccgagagcagaagggcacagtgcggctatggaacgtggaaacgaacacttctacagtgctcattgagggaaagaaaattgaatcgctccgggcaattcgctacgagatttctcccgatcgagagtatgccctcttctcttacaacgttgaaccaatctaccagcacagttacacaggctattacgtcttgagcaagataccccacggggacccacagtcactcgacccacctgaggtttctaatgccaagctgcagtatgcaggatggggccctaagggccagcagctgatattcatttttgagaataacatttactattgcgctcacgtcgggaaacaggccatcagagtggtcagcaccggtaaggagggcgtaatctataacggactgtctgactggctgtacgaagaggagatattgaagacccacattgctcactggtggagtccggatggaacacgtctagcctacgcagctatcaacgacagtagggtcccaattatggagctgcccacctatacaggctccatctacccgactgtaaagccataccactatcccaaggcaggctctgaaaatccctctatctcactccacgtgatcggcctcaacggcccaacgcatgatctggaaatgatgccccctgacgacccccgaatgagagagtattatataacaatggtaaaatgggccacctccacaaaagtagccgtgacctggcttaatcgtgcacagaacgtctcaatactgactctgtgtgacgctaccactggtgtctgtacaaagaagcacgaggacgaatctgaagcatggctgcataggcagaacgaggagccggtgttttcaaaagatggtaggaagttctttttcattcgcgctattccccagggagggaggggaaaattctatcacatcaccgtttcttccagtcagcctaactcaagcaacgacaacatacaatccatcacctccggagattgggatgtaaccaagattctcgcgtatgacgaaaagggtaacaagatctattttctttctaccgaagatctgccacgcaggcggcaactgtactccgctaacactgtaggtaattttaaccgccaatgcctgtcatgcgacctggttgaaaattgcacctattttagtgcttcttttagtcatagtatggatttctttctgcttaagtgtgaaggaccaggggtccccatggttacggtacataatactacggataagaaaaagatgttcgatctcgaaacgaacgagcacgtgaagaaggcaattaacgacagacagatgcctaaagtcgaatatagagatatcgagatagacgattacaatctgcctatgcaaattctgaagccagcaacatttactgataccacccattaccccctgcttctcgtggtagacggaactcccggttcacaatctgtagccgagaaatttgaagttagttgggaaaccgtaatggtgtcatcccatggagccgtcgtcgtcaagtgcgacggacggggtagtggattccaggggacaaagctgctgcatgaagtgcggagacggctaggcctcctggaagaaaaagatcaaatggaggccgtgcggacgatgctgaaagagcagtacatcgaccgcacccgtgtcgccgttttcggaaaagactatgggggttatctcagcacctatattctgcccgctaaaggggaaaaccaggggcagacatttacctgcggtagcgccctgtccccaattactgattttaagctgtacgccagcgcgttctctgagcgatatctgggtctccacgggctcgacaatagggcatacgagatgacgaaagtggcccatagagtgagcgctcttgaagagcagcagttcctcattatccaccccaccgcagacgaaaaaatccattttcagcacacggcagagcttatcactcaattgataagaggcaaggcaaactattcgctgcaaatctatccagatgagtcccactatttcaccagttcatcccttaagcagcacctgtaccgctccatcattaacttcttcgtcgagtgcttcagaattcaggacaagcttcttaccgtcacagcgaaagaggacgaagaggaggactag

SEQ ID NO: 220888 - DNA, 2277 bp, synthetic construct
  misc_feature 1..2277: note = Description of Artificial Sequence: Synthetic coding sequence
  source 1..2277: mol_type = other DNA
atgactaccgcgaaggagccatcagcctctgggaaaagcgtccagcaacaagaacaggaactcgttgggagcaatccacctcagaggaattggaagggaatcgctattgcactgctggtgatccttgttatctgctcgcttatagttactagcgtgatcctgctgacccccgctgaagataactccctctcacagaaaaaaaaggtcacagtagaggacctctttagcgaggattttaaaattcatgaccctgaggccaagtggataagcgacactgagtttatctaccgcgaacagaagggcacggtccgcctctggaatgtggaaacaaacacgagtacagtgcttatcgaggggaaaaaaatagaatctctgagagccatccgctatgagatttctcctgaccgtgaatatgccctgttttcctataatgtggagccgatatttatctttgagaataatatctattactgcgcccatgttggtaagcaggcaattcgagtggtttctaccggtaaggaaggggtaatttataatgggttgtcggattggctctacgaggaggagatcttaaagacacatatcgcccattggtggtctccagatggaactcgtctggcctacgctgctattaatgatagccgggtgccaattatggaactccctacttacaccgggtcgatttatcctaccgtgaagccttaccactatccaaaagctggttctgagaacccgtctatttctttacatgtgatcggccttaatggcccaacccacgacttggaaatgatgcctcctgacgacccccgaatgagggaatactacatcaccatggttaaatgggccacaagtacgaaagtggcagtgacttggctgaatagggcacagaacgtttccatcctgaccctgtgtgatgcaacaacgggagtatgcactaaaaaacacgaggatgagtcggaagcctggctacataggcagaatgaagaacccgtgttctcaaaggatggcaggaagttcttttttatccgcgcaattccccaagggggaagggggaaattctaccacataacagtgtcctctagccagcccaacagctcaaatgacaacattcagagtataacctctggcgattgggatgttaccaagattctagcctacgacgaaaaagggaacaagatttactttctctcgactgaagacctacctagaagaaggcagctgtacagcgctaacacagtgggcaattttaatcgccagtgcctctcttgtgacctagttgaaaattgcacatatttcagcgcttcattttctcattctatggattttttccttctcaagtgtgaagggcctggcgtgccaatggttacagtccacaacaccacggacaaaaagaagatgtttgacctggagaccaacgagcacgtgaaaaaggcaattaacgacagacagatgcctaaggtagagtacagagatatagagatcgatgattacaatttgcccatgcagatcctgaagccagcaacgtttacggatacgactcactatcccctcttacttgttgtcgatggaacaccgggaagccaaagtgtggcagagaagttcgaggtctcctgggagacagtcatggtgtcttcgcatggggctgtggtggtcaagtgcgatggacggggatcaggcttccagggcacgaagctgctccacgaggtcaggcgacggctcggtttactagaagagaaggaccaaatggaggccgttcgcacaatgctcaaggaacagtacatcgacagaacacgcgtggcagtgttcgggaaagactacgggggttacctgtccacatacattctgcctgctaagggcgaaaaccaggggcaaacattcacatgtgggtcagctctcagcccaataacagacttcaagctatatgcctccgccttcagcgaacggtatctgggcctgcacgggctcgacaacagggcttatgaaatgactaaggtcgcacacagggtgtccgctctggaagaacaacagtttcttatcattcaccctacagcagacgaaaagatacattttcagcatactgccgagctgatcactcaactgatccgcggaaaagccaattactccctgcagatctaccccgatgagtcacattatttcactagctcaagcctgaagcagcacctgtaccggtctatcattaacttctttgtcgagtgtttccgaattcaagacaagctgcttaccgtgaccgctaaggaagatgaagaggaggactag

SEQ ID NO: 220889 - DNA, 2649 bp, synthetic construct
  misc_feature 1..2649: note = Description of Artificial Sequence: Synthetic coding sequence
  source 1..2649: mol_type = other DNA
atggccgctgctatggagaccgagcaactcggcgtagaaattttcgagacagccgactgcgaggaaaacattgagagccaagatcgacctaagttagagcctttttacgttgagagatactcttggagtcaactgaagaagctgctggcagatacaagaaaataccatggctacatgatggccaaggcaccccatgactttatgttcgtgaaaagaaacgaccctgatggacctcattccgaccgaatttattatttggccatgagcggggagaatcgggagaatacgcttttctattcggagattcccaaaacgattaacagggccgctgttcttatgttgtcttggaagcctctgctggatctgtttcaggccacattagattatggcatgtacagcagggaggaggagctgctgcgggagagaaagcgtatcggaaccgtaggcatagcctcctatgattatcatcaaggcagcggaactttcctgtttcaggccggttccggaatctatcacgtcaaggatggcggaccacaggggttcacccagcaacccctgaggcccaacctcgtagaaaccagttgccccaatatccggatggatcccaaactctgcccagctgacccagattggatcgcattcatccattccaatgacatttggatctccaatatagtgacacgggaggaacgcaggttgacatacgttcataatgaactggctaacatggaggaggacgcccgatctgcaggagtcgccacattcgtcctccaggaagagtttgacaggtatagtggatactggtggtgtccaaaggctgaaacaaccccatcgggcggtaaaattcttaggatactgtacgaggagaatgatgagtcggaggttgaaattattcacgtgacctcaccaatgcttgagacgcggcgagccgattctttccggtatcccaaaaccggcactgcgaatccgaaagtgacatttaagatgagcgaaattatgattgatgcagaggggaggattatcgacgtgatcgataaagagttaatccaaccctttgagatcttatttgaaggcgtcgagtatatagctcgggcaggatggacccctgaggggaaatatgcatggagcatcctgctagatcgaagccaaacccgactgcaaattgtgctgatctctcctgaactgttcatcccggtggaagacgatgtgatggaacggcagaggctcattgagtcggtccccgattcagttaccccgttgatcatatatgaagagacaactgacatctggattaatatccacgatatctttcatgtgttcccccagagccacgaggaggagatcgagtttatctttgcttctgagtgcaaaactgggttcaggcatttatataaaatcaccagcattctgaaagaaagtaaatacaaaagatctagcggcggtttaccagccccatccgatttcaagtgtcccatcaaagaagaaattgctattacaagtggcgaatgggaggtgttaggccgacatgggtccaacattcaagttgatgaagttagacggctggtttattttgagggtacaaaggactcccccctggaacaccacctgtacgtggtctcatatgtgaaccctggagaggtaaccagacttacagatcggggatacagtcacagctgttgtattagccagcattgcgatttcttcattagcaagtacagtaatcagaaaaacccgcactgcgtttctctgtataaactttcatccccagaggatgatcctacctgcaagaccaaagagttttgggcgaccatactggacagcgctggtccgctaccggattacaccccccctgaaatattctcctttgagtcaactacaggattcacgctttatggaatgttgtataaaccacatgatctgcagcctggaaaaaagtatcctaccgtgctctttatctacggtggcccacaggtgcagctcgtgaataatagattcaagggtgtgaaatactttcggctgaacaccctagctagcctgggatatgtggtcgtagtcattgacaatcggggatcttgccaccggggacttaaattcgagggggcttttaagtataagatgggacagattgagattgacgatcaggtagaggggctacagtatctggcttctcggtacgactttatagacttagatagggtgggtattcacggttggagctatggaggttatctctccctcatggctttgatgcagcggagcgatatctttcgagttgcaattgccggtgcacccgtaacactgtggatcttctacgacaccggatacacagagcgctatatggggcaccctgaccagaacgagcaggggtattacctcggttctgtggccatgcaagcagagaaatttccctccgagccaaaccggttactgctactgcacggattcctggacgaaaacgtgcatttcgcacatacctctatccttctgagctttcttgtgcgggcaggaaaaccttacgacctgcaaatctatccccaagagcgacactctatccgcgttccagagtctggcgaacactatgaattgcatcttctgcattacctgcaggaaaacttaggctcccgtatagcggcactgaaggtgatctag

SEQ ID NO: 220890 - DNA, 2550 bp, synthetic construct
  misc_feature 1..2550: note = Description of Artificial Sequence: Synthetic coding sequence
  source 1..2550: mol_type = other DNA
atgtggaaacggtcagaacagatgaaaataaaaagtggtaagtgcaatatggctgcagctatggagacggaacagttaggggtggaaatatttgagaccgcagattgtgaggaaaatatcgagtctcaggaccgccctaagttagagcccttttacgtggaacgctattcttggtctcaactgaagaagctgctagccgatactaggaaatatcacggatacatgatggccaaggcccctcacgacttcatgtttgtcaaacgaaacgatcccgacgggcctcattccgatcgaatttactacctcgccatgagcggggaaaaccgcgagaacacccttttttatagcgagatcccaaagaccatcaacagggccgcagtgcttatgttatcttggaagccattactcgacctgtttcaggccactctggattatgggatgtactcacgggaggaagaactcctccgggaacggaaaaggatcggaacagtggggatcgccagctacgactaccaccagggaagcggcacattcctcttccaagcaggctcaggaatttaccacgtgaaagatggcggtccccagggtttcacccagcagccattacggccaaatctcgtggaaacatcctgtcccaacatcaggatggaccctaagctgtgccccgctgacccagattggatagcgtttatccactcaaatgatatttggatctctaacatcgtgacccgggaagagcgtcggctcacctatgtgcacaatgagttagccaacatggaggaagacgcaaggtctgctggtgtggccacatttgtcctgcaggaggagttcgatagatactcaggatattggtggtgtccgaaggccgagactacacctagcggaggaaagatcttaagaatcctatacgaggaaaacgacgagtctgaggtggagataattcatgtcacttcacctatgctggaaacccgaagagcagactccttcaggtaccctaagacaggcaccgctaaccctaaggtcacatttaaaatgagcgagataatgatagatgctgaaggccgtattatcgatgtgattgataaagagttaatacaaccctttgagatcctgttcgaaggggtggaatacattgccagagcaggctggacacctgagggtaagtacgcatggtctattttgctggaccgatcccagacccgattacagattgtccttattagcccagaattattcatccccgtcgaagacgatgttatggaaaggcagagattaatcgagtctgtccccgactcagtgaccccactcataatatacgaggagaccacagacatttggatcaatatccatgatatcttccacgtttttccgcagagccatgaagaagagatcgagtttatcttcgcctccgaatgcaaaactggatttcgtcacttgtataagataactagtatcctgaaagaatcaaagtacaagaggtcatccggaggccttccagccccatccgactttaaatgccctattaaagaagagatcgctatcacctccggagagtgggaagtgctgggcagacatggctctaacatccaggtagacgaggtccgtcggctcgtgtactttgaggggacaaaggacagccccctcgaacaccatctgtacgtcgtgagctatgtcaaccctggggaggtaaccagattgactgatcgtggctactctcactcttgctgcatcagccagcactgtgactttttcatcagcaagtacagtaaccaaaagaacccacattgcgttagtttatacaagcttagcagccccgaagatgatcctacctgcaagacaaaagagttctgggcaaccattctggactcggccggtcctttgccagactacacaccaccagaaatcttttcatttgaaagcaccaccggattcactctgtacgggatgctttacaaacctcatgaccttcagcctgggaagaaatatcctaccgtgctctttatttacggcggtcctcagggccaaattgaaatcgatgaccaggtggaaggtctacagtatctggcctcgcgatatgacttcatagacctcgacagagtggggatccatggctggagctacggcggatatctttctctaatggctcttatgcagagaagcgatatatttagggtggctatcgccggagctccagtcacgctgtggatcttctacgatacaggttataccgaacgatacatgggacacccggatcaaaacgagcagggctattacctcggatcggttgccatgcaggcggaaaaatttccctctgagcccaataggctgctcctcctacacggcttccttgatgaaaatgtacacttcgcacacacctctattctcttaagctttctggtgagggccggaaaaccctacgatttacagatataccctcaggaaagacactccattcgggtccctgaaagcggggagcattacgaattacatttgttgcactaccttcaggaaaatctgggaagccgtatcgcggctctgaaggtgatctag

SEQ ID NO: 220891 - DNA, 2544 bp, synthetic construct
  misc_feature 1..2544: note = Description of Artificial Sequence: Synthetic coding sequence
  source 1..2544: mol_type = other DNA
atgtggaagcgatctgagcagatgaaaattaagtccggcaagtgtaatatggctgcggctatggaaaccgaacaactgggagtagagattttcgaaacagccgattgcgaagaaaatattgagtcccaggatcggccaaaactggagcctttttatgttgaacgttactcttggagccaactaaagaagcttcttgcagacacgcggaaatatcatggttacatgatggccaaggcccctcatgatttcatgttcgtaaagcgcaacgacccggatggccctcattccgacaggatttattacctggccatgagtggcgagaacagggaaaatacactgttctattcagagattcccaaaaccatcaatcgggctgcagtactgatgttaagctggaagccccttctagacctttttcaggctaccctggactatgggatgtactcaagagaggaggagctgctgcgcgagaggaagcgcatcgggacggtagggatcgcctcctatgactaccaccaggggagcgggactttcctgtttcaggccggatcagggatctatcacgtcaaagacggaggcccacaaggcttcacgcagcaacccctgaggccgaatctcgtagagacgtcctgccccaatatcaggatggacccaaaactgtgtcctgcagatccagattggattgcgttcatacacagtaatgacatctggatctccaatattgttacacgagaggaaagaagactcacctatgtccataacgagttggctaacatggaagaagacgctaggtccgctggcgttgccacatttgtactgcaggaggagtttgatcgctacagcggctactggtggtgcccaaaagccgaaacaactccgtccgggggaaaaattctccgcattctttacgaggagaacgacgaaagcgaagttgaaataatacacgtgacttcacctatgctggagaccagacgggcagattctttcaggtaccctaaaaccgggactgctaatcccaaagtgacttttaagatgagcgagattatgatcgacgcggagggacgtatcatagacgtgatcgacaaggagctgattcagccatttgaaattctctttgaaggagtcgagtatattgccagggccggatggacccctgaaggaaagtatgcctggtctattctgctcgatcggagccagacacgtctgcaaattgttctgatctcaccagaactgttcattcccgtggaagatgatgtaatggagagacagagattaattgaaagcgttccagattcagtcaccccactcataatttacgaggagacaacggacatctggatcaatatccacgatatctttcatgtgtttccccagagccacgaagaggaaattgaattcatcttcgctagcgaatgtaaaacagggttcaggcatctttataagatcacctccattctgaaggaaagcaaatacaaacgctcctctggcggattgccagcaccatctgatttcaaatgccctattaaagaggaaattgccattacctcaggggagtgggaggtcttgggccgacacggatctaacattcaggttgatgaggttcgaaggttagtttactttgaggggacaaaggatagtcccttagagcaccatctttatgtcgtctcctacgttaacccgggtgaagtgaccaggctgaccgatcggggatacagccatagctgttgcatctcccaacactgcgacttcttcatcagcaagtatagcaaccagaagaaccctcactgcgttagcctgtataagctctcctcgccggaagacgatccgacctgtaaaaccaaggagttttgggccacaattttagacagcgcaggcccactgccagattacacaccacccgagatttttagtttcgaatccacaacagggtttacgctctatggcatgttgtacaagcctcatgacctgcagcctgggaagaaatatcccacggtactgttcatttacggtggacctcaagtgcaactggtgaacaaccggttcaagggagtaaaatattttcggctcaacacgttagccagcctcggatatgtggtcgtggtgatagataacaggggcagctgccaccgaggtctgaaattcgagggtgcatttaaatacaaaatggtagcaatcgccggagctcctgtgacattgtggatcttctatgatacaggctacacagagcggtacatgggacatccagaccaaaatgagcaggggtactacctgggatcagttgcaatgcaggctgagaagttcccttccgagccaaaccgtctgcttctacttcatggcttcctcgatgagaatgtacactttgcacacacctccatcctactcagcttcctggtcagagcgggaaaaccctatgatctgcaaatctatccccaggaacgccatagtataagagtcccggagtcaggagagcattacgagcttcacctcctccactatttacaggaaaacctgggctcccgcatcgcagctttgaaggtcatctag

SEQ ID NO: 220892 - DNA, 2178 bp, synthetic construct
  misc_feature 1..2178: note = Description of Artificial Sequence: Synthetic coding sequence
  source 1..2178: mol_type = other DNA
atgtggaagaggtctgagcaaatgaaaataaagagcggtaagtgtaatatggccgcagccatggaaactgagcagctgggcgttgagattttcgagactgctgactgtgaagaaaatatcgaatcgcaagacagaccaaagctcgagccattttatgtagagcgatacagctggtcccagcttaaaaagctcctcgcggatactagaaagtatcacggttacatgatggcaaaagcccctcatgactttatgttcgtgaagcgcaacgatcccgacgggcctcactcagatcgcatctattacctggccatgagcggagagaacagggagaacaccctattttatagcgaaatccctaaaactattaacagggcagccgtgctgatgctctcctggaagccgcttctcgacctgtttcaagcgacgctggattacggaatgtactctagggaggaagagttattgagggagaggaagcgaataggtacggtgggcattgctagttacgactaccaccagggttcaggtacatttctgtttcaggccggatctggaatatatcacgtgaaggacggagggccacaaggattcacccagcaaccactaagacccaacctggttgagacatcctgtccaaatatccggatggaccccaagctttgtcccgcagaccccgattggatagcctttattcactccaatgacatatggataagtaacatcgtgactcgagaagagcgtcgcctgacgtacgtgcacaacgagctcgcgaacatggaagaggatgcgagaagcgctggcgtcgccacctttgtgttacaggaagagtttgatcgctactccggatattggtggtgccccaaggctgagacaacaccatcagggggtaagattctgaggatcctttacgaggaaaacgacgagagcgaggtagaaataatccacgtgactagcccgatgttggagacccggcgagctgattcgtttagatatcctaagacaggaacggctaatccaaaggtgacattcaaaatgagcgagatcatgattgacgccgaggggagaatccaagtggatgaagtgcgcagactggtctattttgaagggacaaaggactctcctcttgagcaccacctgtatgtcgtgtcctacgttaacccaggggaagtgactcgattaacagacagggggtattcacactcctgctgtatatcccagcattgtgacttctttattagtaaatattccaaccaaaaaaatcctcattgtgtaagtttatacaagctatcaagcccggaagatgacccgacttgcaagactaaagaattttgggcgacaatcttagactccgcagggcctctgcccgattatacacctccagaaattttcagcttcgaatccacaacaggatttacgctgtacgggatgctctacaagccacatgacttacagcccggaaaaaagtatcccactgtcttgttcatctatgggggaccacaggttcagttagtaaacaaccgatttaaaggcgtgaagtactttcgtctgaatacgttggcctctctgggctacgtcgtcgtggtaattgacaatagaggcagttgccaccgtggactgaaatttgagggggcattcaagtacaaaatggggcaaattgagattgacgaccaggtagagggattgcagtacctcgcaagccgctacgattttattgacctggaccgggtgggaatccatgggtggagctatggaggctatttatctctgatggccttaatgcagcggtctgacatattccgcgtggccatcgcaggtgcccctgttactctttggatcttttacgacactgggtatactgagcgatatatgggacatcccgaccagaatgaacagggatattatctggggtccgtggcaatgcaggcagagaaatttccgagcgaaccaaacagactgctgctcctccatggctttttggacgaaaacgtccattttgcacacacatcaattcttctctctttcttagtgagggccggaaagccttacgacctgcagatttacccacaggagaggcacagcataagagtgcctgaaagcggtgaacactacgagctgcacctcctgcactacctgcaggagaacctgggctcccggattgccgctttaaaggtcatttag

SEQ ID NO: 220893 - DNA, 2697 bp, synthetic construct
  misc_feature 1..2697: note = Description of Artificial Sequence: Synthetic coding sequence
  source 1..2697: mol_type = other DNA
atgtggaaacgctcggagcagatgaaaatcaaaagcgggaagtgcaacatggcggctgccatggagaccgagcagctgggcgtggaaatctttgaaactgccgactgtgaggaaaacatcgaaagccaagaccgaccgaagctagagcctttttacgtggaaagatatagctggtcacagttgaagaagctgctggccgatacgaggaagtaccatggttatatgatggccaaagcgcctcatgactttatgttcgtcaaacggaacgatcctgacgggcctcactctgacagaatctattatctggcaatgagtggcgagaaccgcgaaaacaccctcttttattctgaaataccgaagaccattaatagagctgccgtgctgatgctcagttggaaaccacttctggatctgttccaggctactttggactacggtatgtactctcgggaagaagagcttctgagggagagaaagcgaattggaactgttggaatcgccagttacgattaccaccagggctctggcacctttctcttccaggcaggtagtgggatttatcacgtgaaagacggaggtccacagggcttcacccaacagcccttgcgtcctaatctggtggaaacttcctgccccaatatcagaatggacccgaagctctgtccagcggacccagattggattgcgttcatccattctaacgatatttggatctccaacatagtgaccagagaggaaaggcggctgacatatgtgcacaatgagctagctaatatggaagaggacgccaggtctgccggagtggcaactttcgtgcttcaggaggagtttgatagatactccgggtactggtggtgccccaaggccgagaccacaccgtctggcggaaaaattctccgtatcctgtacgaggagaacgatgaatccgaggtagagatcattcacgtgacctctcctatgcttgaaacaaggagggccgactcattcagataccccaaaacgggaaccgctaaccctaaggtgaccttcaagatgagcgaaataatgatcgacgctgagggacgaatcatcgatgttatagataaggagctcattcaaccctttgagatattattcgaaggggtggagtatatagcccgtgccggatggactcccgaagggaaatacgcctggtcgattctcttagaccgaagccagactcgactgcaaatagtacttatttcccccgagctgttcattccagtggaggacgacgtgatggagagacaacgtttgatcgaatctgtgccagacagtgtgaccccattaatcatttacgaagagacaacagacatctggatcaatattcatgatatcttccatgtcttcccccaatctcatgaggaagaaatcgaattcatttttgcaagcgagtgtaagaccggatttcgacacctctacaaaatcaccagcattctcaaagagtcgaaatataaacggtcatccgggggtctacccgctccatctgactttaagtgccctattaaagaagagattgccattacgtcaggagagtgggaggttctggggcgacacggcagcaacattcaggtcgacgaggttagacgactcgtttatttcgaggggacaaaggattcacccttggagcaccatttatacgtcgtgtcctatgtgaaccctggagaagtgactcgactcacagaccgcggatattctcatagctgctgtatttcccaacactgtgactttttcattagtaagtattctaaccagaaaaacccccactgcgtgagcctctacaagctgtcttctccagaagatgacccaacttgtaagacaaaagagttctgggccacgattttggactctgctggccctcttcccgactacacacctcccgagatattctccttcgagtcaactacgggcttcacactctacggaatgctgtataaacctcatgacttgcagccagggaagaagtatcccaccgtcctcttcatttacggtgggccacaggtccagctggtgaacaacagattcaaaggagtcaagtattttagacttaatacccttgcgtccctcggctatgtggtagtggtcattgacaaccgaggctcgtgtcatagaggcctgaaatttgagggggcattcaagtacaaaatggggcaaattgaaatcgacgatcaggttgaaggcctgcagtacttagcctcaagatatgattttatcgatctggatcgggtgggtattcacggttggtcatatggcggttatctgtctctcatggccctgatgcagcgctccgacatctttcgagttgcgatcgccggagcccctgtgacgctctggatcttctacgataccggctacacagagcgctacatgggtcatcccgaccagaatgaacagggatattatctggggagcgtggccatgcaggccgagaaatttccgtctgagcccaacaggttactgctcctacacggttttctcgatgagaatgtacattttgcccacactagtattctcctgtctttccttgtacgggcaggaaaaccatacgacttacagatttaccctcaggaacggcacagcatccgggtgcctgagagcggcgagcattacgagctgcacctcctgcactacctccaagaaaacttgggttcacgtatcgcggcactcaaagtgatttag

SEQ ID NO: 220894 - DNA, 2349 bp, synthetic construct
  misc_feature 1..2349: note = Description of Artificial Sequence: Synthetic coding sequence
  source 1..2349: mol_type = other DNA
atggcggcagcaatggaaaccgagcagctgggtgtcgaaatctttgaaacagcagactgtgaagaaaatatcgagagtcaggataggccaaagctggagcccttctatgtagagcggtacagttggtcccaactgaagaaactcctcgccgatacacgtaaatatcatggctacatgatggcaaaggcccctcacgacttcatgttcgtgaagcgcaatgatccggacggtccacatagtgaccggatctattaccttgccatgtcgggggagaacagagaaaacactctgttttattcagaaatacccaaaacaatcaatcgagctgcggtcctgatgctgagttggaaacctctgcttgacctctttcaggctacattagattatgggatgtattcacgggaggaggagctgctgcgggagcgcaagaggattggaaccgtgggtattgccagttatgattaccatcagggcagtgggactttcctgttccaggccggaagtggaatttaccacgtgaaggatgggggaccacagggatttacacaacagcctcttcggccaaacctggtcgaaacctcttgtcccaatatccgaatggaccccaagctctgcccagccgatcctgactggattgcgttcatccatagcaacgacatctggatttctaatatcgtgactcgcgaagaacgcaggcttacttatgtgcataatgagctggccaatatggaagaagatgccagaagtgcaggtgtcgccacgttcgttttacaggaagaatttgacaggtatagcggctattggtggtgtccgaaagctgaaacaactccatccggaggcaaaattctgcgtatactctacgaggagaacgacgagagcgaggtggaaattatacacgtcacttcccccatgctggaaacgaggagagctgattctttcaggtaccccaagactggaacggcaaaccccaaggtgacattcaagatgtctgaaattatgatcgacgcagaggggagaatcattgacgtgatagataaggagctaatacaaccttttgaaatcttattcgagggtgtagagtacatcgcacgcgctgggtggactcctgagggcaagtacgcctggagtatactgctcgacaggtcgcaaacaagactgcaaatagtgctcatctcaccagagttatttatccctgtcgaagatgacgtgatggagcgacaacggttgattgaatcggttcctgattcagtcacccctctcatcatctatgaagaaacaactgatatctggattaacattcatgatatcttccacgtgttccctcagtcccatgaggaggagatcgaatttatctttgcctctgaatgtaagaccggctttcgccacttgtataagatcacttcgatactcaaggagagcaagtacaagagaagttccgggggtctccccgcaccaagtgacttcaaatgtccaattaaggaagaaatcgctatcacgagcggagaatgggaggttctgggacggcacggctctaatattcaggtggatgaggtgaggagattggtctatttcgagggtaccaaggactctccactggaacatcacctgtatgttgtctcttacgtgaatcccggagaagtcacccgcctcacggatcgtgggtactcccactcttgttgcatctctcagcactgtgatttctttatatcaaaatattcaaaccagaagaatcctcattgcgtatccctctacaaactgtcctcacccgaggatgaccccacctgcaagactaaggaattctgggccacaattttagattcggccggacctttgcccgattacacacccccagaaattttcagcttcgagagcacaaccggctttactctatatggcatgctttataaaccacacgatcttcagcccggaaagaaatatccaactgtcctgtttatttatgggggaccgcaggttgctatcgcaggggctccagtgacgctgtggattttttatgatacaggatacactgagcgatatatgggacacccggaccagaacgagcagggctactacttggggtccgtcgctatgcaagccgaaaagttcccatccgaacccaatcgtctgctgctcctgcatggctttctggatgagaatgttcatttcgctcacacttcgatacttctgtcattcttggtgcgcgcaggtaagccctacgacctgcaaatctatcctcaggagaggcactcaattcgagtacccgagagcggcgagcactatgagctccaccttcttcactatctccaagaaaatctgggatctcgcattgcagcactcaaggtaatttag

SEQ ID NO: 220895 - DNA, 2697 bp, synthetic construct
  misc_feature 1..2697: note = Description of Artificial Sequence: Synthetic coding sequence
  source 1..2697: mol_type = other DNA
atgtggaagaggagcgaacagatgaagataaaaagcggtaagtgcaatatggccgctgccatggagacggaacagcttggcgtggagatctttgaaactgcggactgcgaagaaaacattgaaagccaggaccggccaaaattagaacccttttacgtggaaagatattcatggagccagctgaagaaattgctggcagacacccgaaagtaccacggatatatgatggctaaggcacctcatgatttcatgtttgtaaaacgtaatgatcctgacggtcctcatagtgatcgaatctattacctggccatgtctggggaaaaccgcgaaaacaccctgttctactccgagatccctaaaaccataaaccgcgcagcagtattgatgctgtcttggaagcccctactcgatctgttccaggccactctcgactacgggatgtattcccgtgaagaagaactgctgcgggagcggaaaaggattggaacagtcggcatagctagctacgactatcaccagggctctggaacctttctctttcaagcgggaagcggcatctaccatgtcaaagatggcggacctcaaggctttacccagcagcccctgcgcccaaatctggtggaaacctcttgcccgaatattcggatggatccaaagttgtgccccgctgaccctgactggatagcctttatacattcaaatgacatttggatcagtaatatcgtcacacgggaggagcgaaggctcacttatgttcacaacgaactggcaaatatggaagaggacgcaaggagtgcgggagttgcaacgttcgtgttacaggaggaattcgataggtacagtgggtactggtggtgccctaaagctgaaaccacacctagcggaggcaagatcttgagaatcctctacgaggaaaacgatgaaagcgaagtggagatcatccatgtaacctcacctatgctggaaaccaggagagccgactcatttagatatccaaaaacagggaccgccaaccccaaagtcacttttaagatgtcagagattatgattgacgcagaaggccgaataattgatgtgatcgataaggagctaatacagcccttcgagatcttatttgagggagtcgagtatatagcccgagccggatggacacccgaaggtaaatatgcgtggagcattctgctggatagatctcagacacggctgcagatagttttgatcagcccagagctctttatacctgtagaagacgatgtcatggaacgccaacggctaatcgagagcgtcccagattccgtgacacctctgattatctacgaagagacaaccgatatatggatcaatatccatgacatcttccatgtcttcccgcagagccacgaagaggagattgaatttatttttgccagcgagtgcaaaactgggtttcgccacctctacaaaattacgagtatcctgaaggagagcaagtataaacgctcaagcggaggtctcccagccccaagcgacttcaagtgccccataaaggaggaaatcgcaattacctctggcgaatgggaggtactggggcgacacggtagtaatatccaggtggacgaggtgagacggctggtatactttgaaggtacaaaagattcccccctggaacaccacctgtatgtcgttagttatgttaatcccggagaggtgacaagactcactgacagaggctacagccacagctgttgcatttcacaacactgtgatttcttcatttctaagtattctaatcagaagaatccccactgcgtaagcctgtacaaactgagttctcctgaggacgatcctacgtgtaaaaccaaagagttttgggccacaattttggacagtgcaggcccactgcccgactacacgcctccagagattttttcattcgaatctactaccggcttcacgctctacggcatgctatacaaacctcatgacctgcagccgggtaaaaaatatccaacagtcctcttcatttatggcggaccccaggtccagctcgttaataatagatttaaaggcgtcaaatacttccgtttgaacactctcgccagcctcgggtacgtggtggtcgttattgataaccggggaagctgccacagaggcctcaaattcgaaggagccttcaaatacaagatggggcagatcgaaatcgatgaccaggttgaagggctccaatacctagcctctcgttatgacttcatagatctggacagggttggcatccacggatggtcatatggtggatatctcagtcttatggcactgatgcaaagaagcgacatattccgcgtggccatcgctggcgctcctgttaccctgtggatcttctacgacacagggtacaccgagcgctatatgggacatccagaccagaatgagcaaggttattacctcggctcagtggcaatgcaggctgaaaaattcccttctgaacccaacaggctgctgctcctgcacggtttcctggacgaaaacgtgcattttgctcacacatcaatattattgtcctttcttgtgcgagcaggcaagccctacgacttgcagatatatccacaggagcgccactctatccgcgtgcctgagtcaggcgagcactatgaactgcacttactgcactatctccaggaaaacttggggtccaggattgccgctctgaaggtcatttag

SEQ ID NO: 220896 - DNA, 3669 bp, synthetic construct
  misc_feature 1..3669: note = Description of Artificial Sequence: Synthetic coding sequence
  source 1..3669: mol_type = other DNA
atgtccgaagcccctcggtttttcgtcggtcctgaggatacagagatcaatcccggtaattaccgccactttttccatcacgcggacgaggacgacgaggaggaagatgatagcccacccgagcgccagatcgtggtaggtatctgtagcatggcaaagaagagcaagtctaaaccaatgaaggagattctggaacgcatttccttatttaagtatattacagtggtggtcttcgaggaggaggttatcttaaatgagcccgtggaaaactggcctctttgcgattgcttaattagctttcactcaaagggctttcccctggacaaggccgtggcatatgcgaagcttcgtaatcccttcgtgattaacgatctgaacatgcagtaccttatacaggataggcgtgaagtgtattcaattctgcaagctgagggaatacttcttccacgctatgcaattctgaacagagatcctaataatcccaaagagtgcaacctgatcgagggtgaagatcacgtggaagtgaatggtgaagttttccaaaagcctttcgtggagaagcccgtttctgctgaggatcacaatgtgtacatttattacccgaccagtgcgggaggcggaagccagcgattattccgaaagatcgggagccgtagctcagtgtactcgcctgagagtaatgtcagaaagaccggaagctacatttacgaagagtttatgcccacagacggcaccgatgttaaggtgtatactgtggggccagattacgctcacgccgaggcgagaaagtctccggctctcgatggaaaggtggagagggactcagaggggaaggaggtgcggtaccctgtcatcctcaacgccagagaaaagctgattgcttggaaggtctgcctggcctttaagcaaactgtctgtggctttgacctcctgcgggctaatggccaatcctacgtgtgcgatgtaaacggtttctctttcgtgaaaaattctatgaagtactatgatgactgtgctaaaattcttggcaatatcgtgatgcgtgaactggccccacagttccacatcccgtggagcatacccctggaggccgaagatattcctatcgttccaactaccagcgggacaatgatggagttacgctgtgtcatcgctgtgatccgccacggagaccggacccctaagcagaagatgaagatggaggtgcgccatcagaaattcttcgacctcttcgagaagtgcgacgggtataagagtggaaagttgaaactaaaaaagccaaagcagctccaagaggtgctcgatatcgctaggcaacttttgatggagctcggccagaataatgatagtgaaattgaggaaaataaaccgaagctggagcagcttaaaaccgtgctggagatgtatggacatttctccggaattaatcgaaaggtccagctcacctatctgcctcacggatgcccaaaaacctcatccgaggaagaggacagtagacgcgaggaacctagcctgttactggtcctgaaatggggaggagagctcacacctgcagggcgagtgcaagccgaggagctcggcagagcttttaggtgtatgtatcctggtggccaaggcgactacgccggatttcccggttgtggactgctgcgactacacagcacctataggcatgatctcaagatatacgcgagcgacgagggaagggtgcaaatgacggccgcagcattcgccaaggggcttctggccctggagggagaacttactcccattctggtacaaatggtcaagtctgcgaatatgaatggactgctcgacagtgatagcgactcactgtcatcttgtcagcagcgcgtgaaggcgcgacttcatgagatcctccagaaggaccgagactttacagcagaggactacgagaagttgacccccagtggatccatttctctgattaagagcatgcatttgatcaagaatccagttaaaacatgtgacaaagtgtactcactcatccaatcgcttacttcacaaatccgccaccggatggaagaccccaaatcctcagacattcagctgtatcatagtgaaacacttgaactgatgttaagaagatggagcaagcttgaaaaggacttcaagacaaagaacgggagatatgacatctccaaaataccggatatctacgattgtatcaaatacgacgttcagcacaatggctctctgaaactggagaatacaatggaattgtatcgactgtccaaggctctggctgatatcgtgatccctcaggaatacgggatcacaaaggctgagaagctggaaattgccaaggggtactgcacaccactagtcaggaagatcagatccgatttgcagagaacccaagatgacgatactgttaataaacttcatcctgtctacagcaggggcgtgctctctcccgagcgccatgtgcgtacacgcctgtatttcacctctgaaagtcatgtacattcactgctatccatcctgagatacggcgctttgtgcaacgagtctaaagacgagcagtggaagcgggctatggattatctgaatgttgtgaatgaactaaactacatgacgcagattgtgatcatgctgtatgaagaccccaacaaggatttaagttccgaagaaagatttcacgtcgaactgcactttagccccggagccaaggggtgtgaggaggataagaacctgccatcaggttacggttaccgccctgctagtcgggaaaacgaggggaggcgcccatttaaaatcgataatgatgatgagccacacacctctaagagagatgaggtcgatagagccgtgattctgtttaagccaatggtttccgagcccatacatattcatcggaagtcaccactgcccaggtctaggaagactgccactaacgatgaggagtcacccctgagcgtgtcatcaccagaaggaaccgggacctggctgcactacaccagcggtgtgggtactgggagaagacgccgtaggtccggagagcagatcacgtccagccctgtaagccccaaatccttggcattcacctcctctatcttcggttcctggcagcaggttgtgtccgaaaacgctaattatctcaggactcccagaaccctagtggaacagaagcagaacccaactgtcggatctcattgtgcagggctgttctctacatcagtgctggggggatccagcagcgctccaaatctgcaggattatgccagaacacatcggaagaagctgacaagctctggttgcatagacggattcgaactgtactccatggtgccctccatctgtcccctcgagacacttcacaacgctctctcgctgaaacaggtggacgaatttctcgcatctatcgcctcacccagttccgatgtgccgagaaaaaccgctgagataagcagtaccgccctcaggtctagtccaatcatgaggaaaaaggtaagtctaaacacctatactcccgctaaaatcttgccaactccacctgccaccctgaagtctaccaaggcctcatcaaagcctgccacgtctggtccaagctcagccgtagtccctaacacgagtagcaggaaaaaaaatatcacatccaagaccgagacccacgaacataaaaagaatacagggaaaaaaaaatag

SEQ ID NO: 220897 - DNA, 3732 bp, synthetic construct
  misc_feature 1..3732: note = Description of Artificial Sequence: Synthetic coding sequence
  source 1..3732: mol_type = other DNA
atgagtgaagcaccgagattcttcgttggccctgaggatactgagattaatccaggtaactaccggcacttcttccaccatgcagacgaagacgatgaggaggaggacgattcccccccagagcgccaaatagtagtaggtatttgttccatggcaaagaaatctaagagcaagccaatgaaggaaatcctcgagagaatatccctgtttaaatatattaccgtggttgtgttcgaggaggaagtgattttgaacgaacccgtggagaattggccgctctgcgattgcctgatctctttccacagtaaagggtttccactggacaaagccgtggcatacgcgaagttacggaatccctttgtgatcaatgatttgaacatgcaatatcttatccaggacaggcgggaggtctatagcatcttgcaggctgaaggcatccttttgccgagatatgccattctgaaccgggaccctaataatccaaaggagtgcaatctcatcgagggcgaggaccacgtcgaagtcaacggagaggtgttccaaaaaccatttgttgagaaacctgtcagtgcagaggatcataacgtgtacatttattaccctaccagtgcagggggagggagccaaagactcttccgcaaaattggctcacggtcttcagtgtattccccagaatccaatgtgcgcaagaccggctcttacatttatgaagagttcatgcctactgacggaaccgatgtcaaagtatacacagtgggtcccgattatgctcacgctgaggcacgcaagtcccccgctctcgatggaaaggtggaacgcgacagtgaagggaaggaggtcaggtacccagtaattctgaacgcaagggagaagctgatcgcttggaaagtatgcttagcattcaagcagaccgtatgtggcttcgatctattgagggccaatgggcagagctatgtctgcgacgtcaacggattctctttcgttaaaaacagcatgaagtactacgatgattgtgctaaaatcctcgggaacatcgtaatgagagagctggctccacaatttcacatcccctggtcgatacccctggaggctgaggacatccccattgttccgacaacctctggcaccatgatggagctacgctgcgtaatagccgtgataaggcacggtgatagaacacccaagcaaaagatgaagatggaagttcggcatcagaagttctttgatctgtttgaaaaatgcgatgggtataagtccggaaaattaaagctgaaaaaaccaaagcaactccaggaagtactcgatatagcaagacagctgctgatggaactggggcaaaataacgattcagaaatagaagagaataagcctaaactcgagcaactaaagactgttcttgaaatgtatggacatttctctggaatcaatcggaaggttcaattaacgtacctgccacacggctgccctaagactagttctgaggaagaagatagcagaagggaggaaccatccctcctgctggtgcttaagtggggtggcgaactgacgcccgcaggtcgagtgcaagctgaggagttaggacgcgcttttcgatgcatgtacccgggtggccagggtgactacgccggattcccaggatgcggactgctgcgccttcatagcacataccggcatgacctgaaaatctacgctagtgatgagggtcgagtccagatgacagcggcagcatttgctaagggattactggccctggaaggtgaactcacgcccattcttgtgcaaatggtgaagagcgctaatatgaacgggttgctggattccgatagtgactccctttcaagttgccagcagagggtgaaggcgagactgcacgagatcttgcaaaaggaccgagacttcactgctgaagattacgagaaactcactcccagcggatcaatcagtctgattaaaagcatgcatttgatcaaaaacccggtaaaaacctgtgataaggtgtacagcctcatccagtctttaaccagtcagattcggcaccggatggaggaccccaaatctagtgatatacagctgtatcattccgagactctagagctgatgctgcgcaggtggtctaagctggaaaaggactttaaaactaaaaacgggaggtacgacatctcaaagataccagacatctacgattgcattaagtatgatgtgcaacataacgggagcctgaagcttgagaacacaatggaactgtatagactctcaaaagctctggcggacatcgtcatccctcaagagtacgggatcaccaaagccgaaaagctggaaatcgctaagggctactgtacccctcttgtgagaaaaatccgctctgacttacagagaacacaagacgacgatacagtgaacaagctgcaccctgtctactccagaggggtgctttcgcctgagcggcatgtaagaactagactatactttaccagtgagagccatgtgcactccctcttgtcaattctgcgatacggcgcactgtgcaatgagagcaaggacgaacaatggaagagagccatggattacctcaacgtcgtgaacgagctgaattatatgacacagatagttataatgctctacgaggatccgaacaaggaccttagttccgaggagcgtttccacgtggagctccactttagcccaggagctaagggctgcgaggaagacaaaaatctgcctagcggatacgggtatcgccctgcttctagagaaaacgagggccgtaggccctttaagattgacaatgatgatgagccccatacatccaaacgggatgaggtggacagggcagttattctatttaagcccatggtctctgagccaatacatatccacaggaagagccccctgcccagaagcaggaagacagctacaaatgatgaagagtccccactttcagtctctagtccagaaggcacaggtacctggctgcactacactagcggggtggggacggggaggagacgacgcagaagtggcgaacagataacatctagccccgtgtctcctaagtcactggcatttacgagcagtatctttggctcctggcagcaggtcgtgtccgagaacgctaactacttgaggactccacggacacttgtcgagcagaagcagaaccctacagtcggaagccattgcgccggactgttttcgacctctgtcctcggtggttcgagttcagcacccaatctgcaagactacgctcgcacgcatcggaagaagctcacatccagtggctgtattgatgatgccacccgaggctctgcagtgaaacggttctcgattagtttcgctagacacccgaccaacggcttcgagctatacagcatggtcccatctatctgccccctggagaccctgcacaatgctctctccttaaaacaagttgacgaattcctggcctcaatcgcttctccaagtagcgacgtgcccaggaaaaccgctgagatttcttcgacagctctaaggagctcacccatcatgagaaaaaaggtgagcctgaacacttacacaccggcaaaaatacttccaacaccgccagccacgcttaaatcaaccaaagcgtcctcaaaaccagccacctccggtccatcttccgcagtagttcccaacaccagcagccggaagaaaaacattacctccaaaaccgagacccacgagcataagaaaaatacagggaaaaagaagtag

SEQ ID NO: 220898 - DNA, 3669 bp, synthetic construct
  misc_feature 1..3669: note = Description of Artificial Sequence: Synthetic coding sequence
  source 1..3669: mol_type = other DNA
atgagcgaggcgcctcgattttttgtcgggcctgaagatacagagatcaatcccggtaattaccggcacttttttcaccacgcagatgaagatgacgaagaagaggatgattctccgccagaacgccagatagtggtgggcatctgttcaatggcaaaaaagtctaagagtaagcctatgaaggagattctggagagaattagtctgtttaagtatattacggtcgtcgtcttcgaggaagaggtgatcctgaacgagcccgtcgaaaactggcccctctgtgattgcctgatttcctttcacagtaagggattcccgctggataaggcagtcgcctacgctaagctgaggaacccttttgtaataaatgatctcaatatgcaatatctgatccaggacagacgggaagtgtactctatcctgcaggccgaaggcatccttttaccacgttacgccatcctgaatcgcgatcctaacaacccaaaagaatgcaacctcatagagggagaggaccacgtggaggtgaatggcgaagtcttccaaaaaccatttgtcgaaaagccagtgtccgcagaggaccacaacgtatacatatattaccctaccagtgcagggggagggtcccagaggctgtttcggaaaatagggtcgcggtctagcgtgtacagcccggagagcaacgtgaggaagacaggaagctacatatacgaagaattcatgcccaccgacggcacagacgtgaaagtgtataccgtaggacctgactatgcacatgctgaggcccgaaaatcacccgcactggacggcaaggtagagcgagatagcgaggggaaggaggtgcgctaccctgtcattcttaacgcacgggaaaagcttatcgcctggaaagtgtgtctggccttcaagcaaaccgtctgcgggtttgacctgctccgagctaacggccagagttacgtttgcgacgtgaacggattcagcttcgtgaaaaattcaatgaaatattacgacgattgcgccaaaattctgggcaatatagtaatgagggagctggctcctcagttccatattccctggagtataccgctcgaggctgaagatattcccatcgtcccaactaccagcgggacaatgatggaactccggtgcgtcattgctgttatccggcacggagaccgcacacccaagcaaaagatgaaaatggaagtacgtcaccaaaagttctttgatctcttcgagaagtgcgacggttacaaatcagggaagctcaagctcaaaaaacccaaacagctgcaggaggtgcttgacatcgctcgccagctgctcatggagttgggccagaataacgatagcgagattgaagagaataagccaaagctagaacagctgaagacagttctggaaatgtacggccattttagtggcattaataggaaggtgcagctaacctatctgcctcacggctgtcctaagaccagctccgaggaagaggactcacgacgagaagagccctctctgctcctggttttgaaatgggggggtgaacttacccccgcagggagagttcaggctgaagaactcggtagggcgtttcgctgcatgtaccccggaggacagggcgattacgcaggtttcccgggatgtggacttcttcggctgcatagcacctaccgccacgacttgaagatctacgccagcgatgaggggcgagttcagatgaccgctgccgcttttgctaagggtcttttggccctagaaggcgagctgactcccattctcgtccagatggtgaagagcgctaatatgaacggactgctggattctgactctgactccctctcctcctgccaacaacgcgtcaaagcccgattgcacgaaatcttgcaaaaagaccgggactttactgctgaagactatgaaaagctgacaccctcagggtctattagcctaattaagtcgatgcacctcattaagaatccggtgaagacatgcgataaggtctattctttaattcagagcctgacgagccagatcaggcacagaatggaagatcctaaatcttccgacatccagctttaccactccgaaacgctcgaacttatgttacgtcggtggtctaaactggagaaggatttcaagaccaaaaatggcagatatgatataagtaaaattccagacatctacgattgcatcaaatacgacgtacagcataatggctcactgaaactggaaaacaccatggagctgtacagactctcaaaggctcttgccgacatcgttatcccccaggagtatgggatcaccaaagctgagaagctcgagattgccaaaggttactgtacgccacttgtccggaagattcgctcagatttacagcgaactcaggatgacgatacggtgaataagctgcaccctgtgtattctcgtggggtcctgagcccggagaggcacgtgcgaacccgcctgtacttcacgtcagaaagtcatgtccactccctcctctcgatactgagatacggagcattatgcaacgaatccaaagatgagcagtggaagagagctatggattatcttaatgtcgttaatgagctgaattatatgacacagatcgtcatcatgctctatgaggaccctaataaggatctgtctagcgaggagcggttccatgtggagttgcatttctcccccggtgctaaagggtgtgaagaagataaaaacctgccttcaggatacggttataggcccgcttccagagaaaacgagggtaggcgacccttcaaaattgacaatgacgatgagccacatacatcaaagcgcgacgaagtcgatcgagctgtgatcttgttcaagcccatggttagcgagcccatacacatacatcggaaaagcccactgccacgctcccgcaaaacagccaccaacgacgaagagtcgccactttccgttagtagtcccgagggaacaggcacgtggctgcattataccagcggagtaggaacagggaggagacggaggcgttctggtgagcagattaccagttctccagtatcccctaagtcactcgctttcacctctagtatctttggttcttggcagcaggttgtttccgagaacgccaactacctcaggactcccaggaccttagtggaacagaagcagaatccaaccgtgggtagccactgcgcaggcctcttctctacaagtgtactgggcggaagcagcagcgcccctaatcttcaggattacgcccgtacccatcggaagaaactgacatcctcgggctgcatcgatggcttcgagctttactccatggtgcccagcatctgtcctctggagaccctccataacgctttatcacttaaacaggtggacgaattcctggcctcaatcgcgtcccccagcagtgatgtgccacgcaaaactgcagaaatctcatcgacagcactgcgctcctcaccaattatgagaaaaaaggtgagccttaatacatatacgccagctaaaattctgcctaccccacccgcaaccctgaaatccacaaaggcatcgtcaaaacccgcaacgtctgggccaagttcggccgttgtcccgaatacaagttctagaaaaaagaacatcactagtaagactgaaacacacgagcacaagaaaaacacaggtaaaaagaaatag

SEQ ID NO: 220899 - DNA, 3837 bp, synthetic construct
  misc_feature 1..3837: note = Description of Artificial Sequence: Synthetic coding sequence
  source 1..3837: mol_type = other DNA
atgtctgaggctccacgtttttttgttggacctgaagatacggagataaatccaggtaattatcggcacttctttcatcacgcagatgaagacgatgaggaagaagacgatagcccccctgagcggcagatagttgtgggaatctgcagtatggctaagaagtctaagagcaaacctatgaaggagatcctggaacgaatctctttgtttaagtacatcaccgttgtcgtgtttgaggaagaggtaattttgaacgaaccagtcgagaattggcctttgtgcgattgcctcatctcatttcattctaagggttttccactggataaggccgtggcctatgcaaagctgcgcaacccattcgtgattaatgacctcaatatgcagtacctgattcaggaccggagggaggtgtattctatcctgcaggccgagggtatcctgttaccacgctacgccattctcaatcgggatcccaacaatccaaaagagtgtaatttgatagagggggaggatcacgtagaggtcaatggtgaggttttccagaaaccatttgtcgagaagcccgtttcagccgaggaccataacgtgtatatctattacccaacatccgccggaggaggcagccagaggcttttcagaaaaatcggtagcaggagcagtgtctacagccccgagtcaaacgtgcgcaagacaggaagctatatctacgaggaatttatgcctaccgatggaactgatgtgaaggtctacaccgtgggacccgactatgcccacgcggaggccaggaaaagtccagcactggacgggaaggtggaaagggacagtgagggtaaggaggttcgctatcccgtgatcttgaatgccagggagaagctgatagcttggaaggtgtgtctcgcttttaagcagactgtttgcggcttcgaccttctgagggccaatggacagtcctacgtatgcgacgtaaacggcttctctttcgtgaagaatagcatgaagtattacgacgattgcgccaagattctggggaatatcgtgatgcgggaactagctccacagtttcatatcccctggtccataccgctagaggcagaagatatccctattgtccccaccaccagtggcactatgatggagctcaggtgtgtcatagcagtgattcgacacggagacagaacacccaagcagaagatgaagatggaagtgagacaccagaaattctttgacttgttcgaaaagtgcgatggctacaagtctgggaagctaaagttaaagaagcctaaacagctgcaagaagtgttggacattgccaggcaacttctgatggagttgggtcagaataatgattcagagattgaagagaacaaaccgaaactcgagcaactgaaaacagtactggagatgtatggacacttctctggcatcaataggaaagtgcagctgacgtatcttccccacgggtgtccaaagactagttccgaggaggaagactcccgccgagaggaaccctcactgctgttggtgttgaagtggggcggtgagctgacacctgcagggcgagtccaagccgaggagctagggagggcgttcaggtgtatgtaccccggtgggcagggtgattacgctgggtttcctggttgtggcttactgagattgcactctacgtataggcatgatttaaagatttatgctagtgacgaaggacgtgtacagatgaccgccgcagcattcgccaagggattgttagccctcgagggggagctcacccccatcttagtccaaatggtcaagtcagcaaatatgaacggcctcctggattccgatagcgattccctgagtagttgtcagcaaagagtgaaagccaggctgcacgaaatcctccagaaggatcgggacttcacagcagaggactacgagaagttgaccccaagcggttctatctcgcttatcaaatctatgcatctgatcaagaatccagtgaagacatgcgataaggtgtattcgttaatacagagcttaacatcccagatccgccaccgaatggaagaccccaagtctagcgacatacagctctaccatagcgagaccctggaactgatgcttcgcagatggagtaaattggaaaaagattttaaaacaaagaacggcagatatgatatatctaagatcccagacatttacgactgcattaaatacgatgtgcagcataacggctccctgaaactcgaaaacacgatggaactttacaggttaagtaaagctctcgctgatatcgtgattccacaggagtatggcattacaaaggccgaaaaactggagatcgccaagggctattgcacccccctcgtgcgaaaaataaggagtgatctccaaaggacccaagacgatgatacagtgaataagctccacccagtatactcacgcggagtgctatccccagaacggcatgtgagaactaggctttatttcacgtccgagagccatgtccattcacttctttctatcctgcgttatggcgcactgtgtaacgaccatgactctcagaacgaagacggagggatggtaaaggaaatggagtcaaaagatgaacaatggaagcgggctatggactatctcaacgttgtaaacgagctgaattacatgacacagatcgtcatcatgctctacgaagaccctaataaggatttgtcttccgaggagcgcttccatgtcgaactccacttttcccctggagccaaaggatgcgaggaagataagaacctgccatctggctacggctaccgccctgcaagcagggagaacgagggccgaaggcctttcaagattgataatgatgatgagccccacacctctaagagggacgaggtggatcgcgctgtcattttgttcaagccaatggtgagcgaacccatccacatccacagaaaatccccattaccacgctcccgcaagacagctacaaatgacgaagaatcccctctcagtgtgagtagcccggagggaaccggtacctggctccattatacatctggagtgggcaccggaagaagaagaaggaggagtggggaacagatcaccagttctccagttagcccaaagagcttggcttttacatcatcaattttcggcagctggcagcaggttgtaagcgaaaatgcaaactatttgcgcactcctcgcacacttgtggagcaaaaacaaaaccccaccgtaggatctcattgtgccggactgttttctaccagcgtgttgggcggatccagtagcgctcctaatctccaggactacgccaggactcacagaaagaagctcaccagcagcgggtgcatcgatgacgcaacacggggatccgctgtcaagagattctctatatccttcgctaggcaccccacgaatgagcatctgcacctctaccgatgctggtccgtgtcgagcgtagagttcctcggatcctccggcttcgaactctacagcatggtgccatccatttgtcctctagaaacccttcataatgccctgtcgttgaagcaagtggacgagttccttgcctcaatcgcaagcccatcttctgacgtgccacgaaaaacagcagaaattagttcgaccgccctgcgcagctcacctatcatgcggaagaaagtgagtttgaacacatacacccctgcaaaaattctccccactccgccagcaaccttgaaaagcacaaaagccagttctaagcctgctacttcaggcccatcgtccgcagttgtccccaacacgagctcacgcaaaaagaacataacttctaagactgagactcacgaacataaaaagaacacaggcaagaaaaaatag

SEQ ID NO: 220900 - DNA, 177 bp, synthetic construct
  misc_feature 1..177: note = Description of Artificial Sequence: Synthetic coding sequence
  source 1..177: mol_type = other DNA
atgtccgaagcccctagattcttcgttggtcccgaagataccgagataaatccaggaaactaccggcacttctttcatcatgccgacgaggacgacgaggaggaggatgattctcccccagagagacaaattgtcgtgggcatttgctccatggcaaaaaaaagcaagtccaaatag

SEQ ID NO: 220901 - DNA, 2877 bp, synthetic construct
  misc_feature 1..2877: note = Description of Artificial Sequence: Synthetic coding sequence
  source 1..2877: mol_type = other DNA
atgctcaagtccaaaaccttcctgaaaaaaacgcgtgcaggtggggtgatgaaaatcgtccgggagcattacctcagggacgacatcggatgcggcgcacccggatgcgcggcatgcggtggagcccacgaaggccctgccttggaaccccagccccaggacccggcaagcagtgtgtgccctcagccacactatcttctgccagatacaaacgtgttgcttcaccagattgatgtgttggaagatcctgccattcgcaacgtgatcgtacttcaaaccgttttgcaagaggtccgaaatagatctgcacccgtttataagagaatacgggatgttaccaataaccaggaaaagcacttctacacatttactaatgagcaccatcgggaaacctacgttgaacaggagcagggggaaaatgccaacgaccgtaatgatagggcgatcagagtggcagcaaagtggtataacgagcacctgaagaagatgagtgcagataaccagcttcaagtaattttcatcacaaatgaccggcgaaacaaagagaaggccatcgaagaagggattccggcattcacctgtgaagaatacgtgaagtcgcttaccgccaatcccgaactgattgatcgtctggcttgtctgtccgaagaaggtaatgaaattgaaagtggaaagataatcttttcagaacatttacctcttagtaagctgcagcaaggaattaagtccggtacctatctccagggcacatttcgagcgtccagagaaaactaccttgaggctacagtttggatccatggtgacaatgaggagaacaaggagattattttgcaaggactgaaacacctcaacagggcagtgcacgaggatattgtggcggtcgagctgctaccaaagtcccaatgggttgccccaagctcggtggtgctccatgatgagggccagaacgaagaggatgtggagaaagaggaagagacagaaagaatgctgaaaaccgccgtgtcagagaagatgctcaaacccacggggcgtgttgttgggatcattaaacgcaattggcggccttattgcggcatgttgagcaagagtgatattaaggagagccgcagacatctctttactccggctgacaagcgaattcccagaataagaatcgaaaccagacaggcttccactcttgagggtcgaaggataatcgtggctattgacggttggccccgaaattcaagatatcccaacggccattttgtcagaaacctgggcgatgtcggggaaaaagagactgagaccgaggtgctcctgcttgagcacgatgtgccacaccagcccttttctcaggccgtgttaagcttccttcccaaaatgccatggagtatcaccgagaaggacatgaaaaacagagaggatctgaggcacctttgtatttgctcagtggaccctcccggatgtactgacatcgatgacgcactgcactgtagagagctagagaatggtaacctggaagtgggggtccacattgccgacgtatcgcattttatcaggcccggaaacgctctcgatcaggagtcagctaggagaggcactactgtatatctatgtgagaaacgtatcgacatggtacctgagctgcttagcagcaacctgtgttcccttaaatgtgacgtggataggctcgcattctcctgtatttgggaaatgaaccacaatgccgagattctgaaaacgaagttcacaaaatcggtcatcaactccaaggcttcattgacctatgcggaggcacagctgcggatcgactccgccaacatgaatgacgacatcaccacatcgctacgagggttgaataagctggccaagattctaaagaagcgacggatagagaaaggagccctcaccctgtcaagtccggaggtgcgattccacatggacagtgaaactcatgatcctatcgacctacagacaaaggaattgcgagaaactaattctatggtggaagaattcatgctgctcgctaatataagtgtcgccaagaagatacatgaggaattcagcgagcacgccctcttgcgcaaacacccagcgcctccaccatctaattacgaaattctcgtgaaagcagcaaggagtcgcaacctggaaatcaaaaccgatacagctaaatccctggcggagtccttagaccaggccgaaagccccacatttccttatctgaataccctgctgcgaatcttagctaccaggtgtatgatgcaggccgtgtacttttgctcgggaatggataacgactttcaccattacggcctggcctcccctatctatacacattttacgtctcctatccggcgatatgctgatgtaattgtccatcggctgctcgcggtggcaattggcgctgactgtacataccccgaacttaccgataaacacaaactcgctgacatttgcaagaatctgaacttcagacacaagatggcacagtatgctcagcgagcatctgtggcattccatactcagctgttttttaagtctaaaggaattgtgagtgaggaggcctatatactgttcgtccggaaaaatgctattgtagtgttgatacctaaatatggactagaagggaccgtctttttcgaggaaaaagacaagccgaacccgcagctcatctacgatgacgaaattccaagcctcaaaattgaggatacagtgtttcatgtgtttgataaggttaaggtgaagattatgcttgattcatcgaatctgcagcaccagaagattaggatgagccttgtcgagcctcaaattcctggtataagcatcccgactgacacttcaaatatggaccttaatgggcctaagaagaaaaagatgaaactagggaagtag

SEQ ID NO: 220902 - DNA, 2391 bp, synthetic construct
  misc_feature 1..2391: note = Description of Artificial Sequence: Synthetic coding sequence
  source 1..2391: mol_type = other DNA
atgagtgcagataatcagttgcaagtcatctttatcacgaacgatcgcaggaataaggagaaggctatcgaggaaggaataccggctttcacatgcgaagagtatgtaaagtcattaacagcaaacccggagcttatagataggttggcttgcctatcagaggagggtaatgaaattgagagcgggaaaattatttttagcgagcatcttcccctatccaaactacagcaaggcatcaagtccgggacatatcttcagggaacctttagggccagtagagagaactacctggaggctactgtgtggattcacggcgacaatgaggaaaataaggagatcatcctgcaggggttaaagcacctgaaccgggcagtgcacgaggacatagttgccgtcgagctgttgcccaaatcacaatgggtcgccccaagcagcgtcgttctccatgacgagggccagaacgaggaagacgtggaaaaagaggaggagaccgagcgaatgctgaagactgctgtgtcagaaaagatgttgaaaccgacaggacgagtggtcggcattatcaaaaggaactggcgcccatactgtggtatgctgtcgaaatctgatataaaggagagccgaaggcatttgttcacccctgccgacaaaagaataccgcgaattcggattgagactcgacaggcatcaacgttagaggggaggcgaatcattgtggctatcgatgggtggcctcgtaattcacgctatcccaatgggcattttgtaagaaaccttggcgacgtcggagaaaaagaaactgagaccgaggtgctgctgctagagcatgacgttccccatcagcccttcagccaggccgtgctttctttcctccccaagatgccatggtccatcacagaaaaagatatgaagaatcgtgaggatttgaggcacttgtgtatatgctccgtagacccaccaggctgtactgacatagacgacgccttgcattgcagagaacttgagaacggcaatctagaggtgggcgtgcacatagctgatgtgagccacttcattagacctggtaacgccctggatcaagagtccgccagaagggggacgactgtttacttgtgtgaaaaaagaatcgacatggtgccagaactcctgtcgtctaacctgtgcagtctgaagtgtgatgtagatcgcctggccttctcctgcatctgggaaatgaatcacaacgccgagatactgaaaactaaattcacaaaatcggttatcaactctaaggcaagtctgacctacgccgaggcccagcttaggatcgattctgcaaacatgaacgacgacattactacatctctgagaggactgaataaactcgccaaaattctgaagaaacgacgaattgagaagggagccctgaccctttcttctcctgaggtgcgatttcacatggattcagagacgcatgaccccattgatctccaaactaaagaactgcgggagacaaatagcatggtcgaagaatttatgttgttggctaatatctccgtcgccaaaaaaattcatgaggagttcagcgaacacgcgctgctgcgcaaacatcctgccccaccaccttcaaattacgagatattagtaaaagctgccaggagccgcaacttagagatcaaaactgatacagcaaaaagtctcgccgaatcgttagatcaggccgagtcccccaccttcccctatcttaatacacttctgaggattctggcaacccggtgcatgatgcaagcagtgtatttctgcagcggaatggacaacgactttcatcactacggtctagctagtcccatctatactcattttacctcacctatccgtcggtatgccgatgtgatcgtgcatcgactgctcgctgttgctatcggtgccgattgtacgtaccctgaactgacagataagcataaactggccgatatctgcaaaaatctcaatttcagacacaaaatggcacagtatgcgcagagggcatccgtagccttccacacacaattattctttaagtcaaagggaattgtttctgaggaggcttatatcctatttgtgaggaagaacgctattgtggtgctgatccccaaatatgggctggaaggtacagttttcttcgaggaaaaggacaaacccaatccgcaactgatctatgacgacgagatcccgagcttgaaaatcgaggacacagtgtttcacgtcttcgataaagtcaaagtgaagattatgcttgacagctctaatctgcagcatcaaaaaattagaatgtcgctggtggaacctcagattcccggaatcagcatacccaccgatacaagcaacatggatctcaatggccctaagaagaaaaagatgaagcttggcaaatag

SEQ ID NO: 220903 - DNA, 2787 bp, synthetic construct
  misc_feature 1..2787: note = Description of Artificial Sequence: Synthetic coding sequence
  source 1..2787: mol_type = other DNA
atgctcaagtctaagacttttctaaagaagacaagagcgggtggggtcatgaagatagtacgggagcattacctgagggacgatatcgggtgtggggctccaggatgcgctgcatgcggaggagctcacgaaggaccggcactagagccacagccccaggatcccgcaagtagtgtatgcccgcagccacactatctgctgccagacactaatgtgcttcttcaccagatagtctctgcgtggcggcctggcacttgggcttcggtggcctctagtctccggttacccggaagcttagagacatacgtggaacaggaacagggagaaaatgctaacgaccggaatgatagagcaatccgcgtcgcagccaagtggtacaacgaacaccttaaaaagatgtccgccgacaaccagttgcaggttatatttatcactaatgaccggaggaataaggaaaaggcaatcgaggagggaatccctgctttcacttgtgaagaatatgttaagtcgcttaccgcaaatcctgaactaattgatcgcctggcttgccttagtgaggagggaaatgaaatcgagtctggaaagatcatcttttcagaacatcttcctctgtccaagcttcagcaaggcattaaaagcggcacctaccttcagggaacctttcgcgctagccgggaaaactatcttgaagccaccgtgtggatacacggggacaatgaagaaaacaaggagataatcctgcagggactgaaacacctgaacagagcggtgcatgaggatatcgtggctgtggagcttttaccaaagagtcagtgggttgccccaagctccgttgttctgcatgacgagggacagaacgaagaagatgttgagaaggaggaggagaccgagaggatgttgaaaacagcggtgagcgaaaaaatgctgaaaccaacaggccgagttgttggtattatcaaacggaattggaggccttactgcggaatgcttagtaagtcagacattaaagagagtagaagacacttgtttacccctgccgacaagcggatcccacgcataagaatcgagacacgccaggctagtaccctcgaaggacgcagaatcatcgtggctatcgacgggtggcccaggaacagtaggtatcccaatggacatttcgtgcgcaatctgggcgatgttggagaaaaagagaccgaaaccgaggtcctgctgcttgaacacgatgtgccccaccagccgttctcacaggccgttctgagctttctcccaaagatgccctggtctataaccgaaaaagatatgaaaaatcgagaggatcttaggcacctgtgcatttgtagcgttgacccccctggatgtactgatatcgacgacgctctacattgccgcgaactggagaatggaaacctcgaggttggcgttcatatcgctgacgtttcccactttattcgtccaggcaatgcccttgaccaggaatctgccaggcggggaaccactgtgtatctctgtgagaaacggatagacatggtaccggaactgctgagctctaatctatgctccctgaagtgtgacgtagatcgcctggctttcagctgtatttgggaaatgaaccacaacgctgagatcctgaaaactaagtttactaaatccgtgataaattccaaagcatctctcacatacgcagaggcccaactgcgcatcgattccgcgaatatgaacgacgacatcacaacatccctgagaggactgaataagttagccaagattctgaagaagagaaggatcgagaaaggtgctctgacactgtcaagccctgaggtgaggtttcacatggactccgaaactcatgatcctatcgacctgcagaccaaagagctccgggagacaaacagtatggtggaagaattcatgctgctggctaatatttccgtggctaaaaagatccatgaggagttttcagagcacgccctactgagaaagcacccagcaccgccaccttcaaattacgaaatccttgtgaaggctgcccgtagcagaaacctcgagataaagacagacaccgcaaagagtctggcagagtcccttgaccaggccgagagtccgactttcccctacctgaacacccttctgaggattctggccactagatgtatgatgcaggcagtgtacttctgtagcggaatggacaatgactttcatcactatggactggcctcgccgatttatacccacttcacctcccctattagacggtatgcagatgttatcgttcatagactgctagctgtagccattggggctgattgtacttacccagaactcacggacaagcataaactcgcagacatctgtaagaatctcaacttccggcacaaaatggcccagtacgctcagcgcgcttccgtggcattccacacgcagctatttttcaagtcgaaagggattgtgagcgaggaagcctacatattatttgttagaaaaaacgccatagtggtgttgatccctaaatacggtctagaagggacggtttttttcgaggagaaagataaacccaatccacagctgatttacgatgacgagattccatccctgaaaattgaggacaccgtattccacgtattcgacaaggtgaaagtgaaaatcatgttagattcctccaatctgcaacatcagaagataagaatgagccttgtcgagcctcaaatccccggaatatcaatacctaccgatacgtctaatatggatctgaacgggcctaagaagaagaagatgaagctgggaaaatag

SEQ ID NO: 220904 - DNA, 2916 bp, synthetic construct
  misc_feature 1..2916: note = Description of Artificial Sequence: Synthetic coding sequence
  source 1..2916: mol_type = other DNA
atgcagaccgcctgtcaggcggtacagcatcagcggggaaggcgccagtacaataagcttcgtaacttgctcaaggatgcacggcacgactgtatcctgttcgcaaacgagtttcaacagtgctgctatctgcctagagagagaggcgagtctatggagaaatggcagactagaagcatttacaatgcagcagtttggtattaccaccactgtcaggatcgtatgccaattgtaatggtgacggaagatgaggaggcaatccagcaatacgggtctgaaacagagggggtattcgtgattacttttaagaattatctggataacttctggcccgatctaaaggccgcacacgagctctgtgactccatactgcagagccgccgtgaacgggagaatgaaagtcaagaatctcacgggaaggagtatcctgaacatctacctttggaggtgcttgaggccggaatcaaatccggtcggtatatacagggaattctgaacgtgaataaacacagagctcaaatcgaggcgttcgtgcggcttcaaggggcatcatccaaggacagcgatctggtcagcgacatactgatccatggaatgaaggccaggaacaggtcgatccacggcgatgttgtggttgtggagcttcttccaaaaaacgagtggaagggcagaaccgtggcgctgtgtgagaatgattgtgatgacaaggcgtccggtgaaagtccctctgagcccatgccaactggacgagtcgttggtatccttcaaaagaactggcgcgactacgtggtgacctttccctccaaggaggaggtgcagtctcagggcaaaaatgcgcagaagatcttagtaacaccctgggattataggatccctaaaatccgcatcagcacacaacaggccgagactctgcaggatttccgagtcgtggtcaggattgattcgtgggagtccacctctgtataccccaacggccacttcgtaagagtgctcgggcgaataggagaccttgaaggggaaatcgctacaatcctcgtcgaaaactctatctctgtaatacccttctcggaagcacagatgtgcgagatgccagtgaacacacctgaatctccttggaaggtctcacctgaagaggaacagaagcggaaagatctcagaaagagtcatctggtgtttagtattgatcccaaaggctgtgaggatgttgatgacaccctctccgttcgtaccctgaataatggaaatctggaactcggtgtacatattgctgatgtgacccactttgttgcacccaattcctacatcgatatagaggcgagaacacgggctacgacatattatctggctgatagacgctacgacatgttgccctcagtgctgagtgcagatttgtgctcactcctcgggggagttgaccgttacgccgtgtctataatgtgggagctagataaagcatcttacgagataaaaaaggtgtggtatggacggaccatcatccggagtgcatacaagctattttacgaggctgcccaggagttgctcgacggaaatctgtccgttgtcgatgacatccccgagttcaaggatttagatgagaagagtagacaagccaaattagaggagctggtgtgggccatcggaaagttaaccgacattgccagacatgtccgcgctaaacgggacgggtgcggagctctcgaactggagggggtggaggtgtgcgtgcagcttgatgataagaaaaacatccacgacctgattcctaagcagccactcgaggtgcacgagaccgtggctgaatgcatgatcctggctaaccattgggttgctaaaaagatctgggaatcttttccacatcaggccttattgcggcaacacccccctccccaccaagaatttttttcagagttaagagagtgtgccaaggcaaagggtttctttatagatacccggtctaataagacactggccgatagcctggataatgcaaatgacccgcatgaccccatcgttaataggttgcttcgcagtatggccacccaggctatgtcgaatgctctgtatttttccactgggtcgtgcgctgaggaggagttccaccactatggcttggcccttgataaatacactcattttaccagccctatacgacgctatagcgatatcgtggtgcatcggttgttgatggctgctattagtaaggataaaaagatggagatcaagggtaatcttttttccaacaaagatctcgaagagctatgtagacatattaataatcggaatcaggctgctcagcactcacagaagcagtccacagagttgtttcaatgcatgtatttcaaggacaaggacccagccacagaggaaaggtgcatttccgatggagtgatttatagtatcagaaccaatggagtgctcctattcattccccgattcggcatcaagggggcagcatatctgaaaaataaagacggcttggtcatttcctgcggaccagacagctgttctgagtggaagcccggtagcttacagaggtttcagaataaaattacctccactacaacagatggagagtctgtcacctttcacctcttcgaccacgtgaccgtgagaatcagcatacaggcatcccgctgtcacagcgataccatccgactggagatcatctcaaataagccatacaagatcccaaacactgagttgatccatcagtcctctccactcctcaaaagcgagctggtaaaagaggtcacaaagtcagtcgaagaggcgcagctggctcaagaggtaaaggtcaatattatccaggaagaataccaggagtaccgccagacaaagggaagaagtctctacacactgttagaagagatcagagacctggcattgttggatgtgtccaacaattacggcatctag

SEQ ID NO: 220905 - DNA, 3165 bp, synthetic construct
  misc_feature 1..3165: note = Description of Artificial Sequence: Synthetic coding sequence
  source 1..3165: mol_type = other DNA
atgctgcagaagcgcgagaaagtgctgctcctgagaacatttcaaggtcgtactctgaggatcgtgagagaacactacctgcggccatgtgtgccgtgccacagccccctatgcccgcaacctgctgcgtgttctcacgacggaaagctcctgagctccgacgtgacccattacgtaattcccgactggaaggttgtgcaagactaccttgagatcctggaattccccgagctgaaaggcatcatcttcatgcaaacggcctgccaggcagtgcagcaccagcgaggcaggagacaatacaacaagctgcgtaacctgttaaaggatgctcgccacgattgcatcttatttgccaatgagtttcagcagtgctgctacttacccagagagagaggcgagagtatggaaaagtggcaaacccgttccatctacaacgcagcagtgtggtactatcatcactgccaggatcgcatgccaatcgtgatggtgactgaggacgaagaagcaattcagcagtacggttctgaaacagaaggagtgttcgtaattaccttcaaaaattatttggataacttttggcccgacctgaaagccgctcatgaactctgtgactccatcctacagtcgagaagggagcgcgagaatgagtcacaggaatcacatggcaaggaataccccgagcatcttcccctggaggtccttgaagcagggattaaaagcggccgttacattcagggaattctgaatgtgaacaagcacagggcccagattgaagcctttgttcggctccaaggagctagctcgaaggacagcgatctggtatcggacatcctgatacatgggatgaaggccagaaaccgcagcattcatggtgacgtagtggtggtcgaactcctgcccaagaatgaatggaaaggcaggactgtagccttatgcgagaatgactgcgacgataaggcctcgggagagagccccagcgagcccatgcccactgggagggtagtcggtatcctgcaaaagaattggagggattatgttgtgactttccccagtaaggaagaagtgcagtcccagggcaagaacgctcagaaaatcctggtcactccttgggactaccgtataccaaaaataagaatttccactcaacaagccgagactctgcaggatttcagagtggtcgtgaggatcgactcgtgggaaagcactagcgtttatcctaatggtcactttgtcagagtcctaggaaggatcggagatctggagggagaaatagcgaccattctagttgaaaattctatatcagttatcccatttagcgaggctcagatgtgtgaaatgccggttaataccccggagtcgccctggaaggtgtccccggaggaggagcagaaaagaaaggacctgagaaagagccacttggtattcagcattgaccccaaaggctgtgaagacgtggatgatactctgtctgtgcgtactttaaataatggtaacttggagttgggcgtacatattgcggatgtgacacacttcgtggctccaaactcttacatagacatcgaagcccgaactagggcgacaacatactaccttgctgatcgccgatatgatatgctcccctccgtgctgtccgcagatctatgttccctgttgggtggagttgatcggtacgcggtgtcaattatgtgggagttagacaaagcctcatatgaaataaaaaaggtgtggtatggtcggacgatcatcagaagtgcctacaagttgttttatgaagctgctcaagaactcctcgatggaaatctgtccgtggtcgatgacatcccggagttcaaagacctcgacgaaaaaagcaggcaggccaagctggaagagcttgtgtgggcgattggcaagcttaccgacattgccaggcacgtgcgagctaagagggatgggtgcggcgctctcgagctcgaaggcgttgaggtgtgcgtgcagctggacgataagaaaaacattcacgaccttatccctaaacagcctctggaggtgcatgagacagtggcggaatgcatgatcttagccaatcactgggtggccaaaaagatttgggaatcatttccccaccaggccctgctgcggcagcatcccccacctcaccaggaattttttagtgagttaagggagtgcgccaaggctaagggtttcttcattgacacacgcagcaacaaaaccttagctgactccttagacaatgccaacgatccccatgaccccatcgtgaatagacttctgcgcagtatggccacccaggcaatgtccaatgcgctctacttctccaccgggagctgtgccgaagaggaattccaccactatggtctggcactggataagtatacccacttcacatccccgattcgccgttactctgatatcgtggtgcatcggcttctcatggcggcaatcagtaaggataagaagatggaaattaagggcaaccttttcagtaataaagacctcgaggaactgtgccggcatattaacaatagaaaccaagccgctcagcacagtcagaaacagtctacagagctctttcaatgcatgtatttcaaagataaggacccggctaccgaagaaaggtgtatctcagacggagttatctatagtatcagaaccaacggtgtgctcctgttcatcccaagattcggcatcaagggcgctgcttatctcaaaaacaaggatggtttggtcatatcatgtgggccagactcctgcagcgagtggaagcccggatccttacagcgctttcaaaataagatcacatcgactaccaccgatggcgagagcgtgacttttcatctgttcgatcacgtaactgttcgcatttctatccaagcatcccggtgtcactcagataccattcgcctggaaataatcagcaacaaaccatataaaatcccaaatacagagctgattcaccagagcagccctctgctgaagagcgagttggttaaagaagtgacgaagtctgttgaggaagctcagttggcccaggaggtgaaagttaacattatccaagaggagtaccaggaatatagacagaccaaaggaaggtctttgtacacactgctcgaggagatacgggatcttgctcttcttgacgtgtccaacaactacgggatatag

SEQ ID NO: 220906 - DNA, 762 bp, synthetic construct
  misc_feature 1..762: note = Description of Artificial Sequence: Synthetic coding sequence
  source 1..762: mol_type = other DNA
atggagaaatggcagactcgcagcatttacaacgcagccgtgtggtactaccatcactgtcaggataggatgcccatagtgatggtcaccgaggacgaggaggcgatccaacaatacggttctgaaacagaaggagtcttcgtgataacctttaagaattatctggacaatttctggcccgacttgaaggccgctcacgagctgtgtgactcgatcctgcagtctcgacgagagcgggaaaatgaaagtcaggaaagccacggaaaagagtatcctgaacacctacccctggaggttctcgaagcaggcattaaaagtggtagatacatccagggcattttgaacgtgaacaagcacagggcacagatcgaggcttttgtgcgactgcaaggagcctcatctaaagactcagacctggtgtccgacatactcatccacggaatgaaggcaaggaaccgaagcatccacggtgatgtggttgtggtggagctcctgcccaagaacgaatggaaggggagaaccgttgccctctgcgaaaatgattgtgatgataaggctagcggagagtcaccatccgaaccaatgccaacgggtcttcaaggcggtcgcgctcacaggtttttgggcgtgaatatctgtgtttccaagtggaccttctgcgcctgctttagaaagaacaggcggtcaggcagagggaattgcaaccatccaggaggcaagcagtatttctcctatagctttttacgctcatcagatgtgtag

SEQ ID NO: 220907 - DNA, 453 bp, synthetic construct
  misc_feature 1..453: note = Description of Artificial Sequence: Synthetic coding sequence
  source 1..453: mol_type = other DNA
atggaaaagtggcagactcgctccatctataacgccgctgtctggtactaccatcactgtcaggatagaatgccaattgttatggtgacagaggacgaagaggcaatccagcagtacggatcagaaacagagggggtgttcgtaatcacatttaagaattacttggataatttctggcccgacctcaaggccgctcacgaattgtgcgacagtattctgcagtctagacgcgaacgggagaatgagagtcaggaatcccacggcaaagaatatcccgaacacctgccccttgaggtgcttgaggctggaattaaatccggaagatatattcagggtatcctgaatgtgaataagcatcgggcacaaatcgaggctttcgtgagactgcagggcgcttcttccaaagatagtgacctggtctctgatattctgatccacggcatgaaagcttag

SEQ ID NO: 220908 - DNA, 174 bp, synthetic construct
  misc_feature 1..174: note = Description of Artificial Sequence: Synthetic coding sequence
  source 1..174: mol_type = other DNA
atgcagacagcttgtcaggctgttcagcatcaaagaggcaggaggcagtataacaagctacgcaatttgcttaaggacgctagacatgactgtatcctgttcgcgaacgaattccagcagtgttgttacctgcctcgagagagaggggaaagcatggaaaaatggcagacatag

SEQ ID NO: 220909 - DNA, 294 bp, synthetic construct
  misc_feature 1..294: note = Description of Artificial Sequence: Synthetic coding sequence
  source 1..294: mol_type = other DNA
atgcagacagcttgtcaggcagtccagcaccaacgcggtaggagacagtataacaagctgcgcaatttgctcaaagacgctcgccacgactgtatcctttttgccaacgaatttcaacaatgttgctatttaccccgagagcggggagaaagcatggaaaaatggcaaaccagaagcatatacaatgccgctgtctggtactaccatcactgccaggatagaatgcctatcgtgatggtgacagaagatgaagaggcaattcaacaatatggctccgagaccgaaggggtgtag

SEQ ID NO: 220910 - DNA, 312 bp, synthetic construct
  misc_feature 1..312: note = Description of Artificial Sequence: Synthetic coding sequence
  source 1..312: mol_type = other DNA
atgcagacagcctgccaggccgtgcagcatcagcgcggacgacgtcagtataacaagttacggaatcttcttaaagatgccagacacgactgtatactgttcgctaatgagttccaacaatgctgctacctcccaagagagcgaggggagtccatggaaaagtggcagacccggagcatctacaacgcggcagtatggtactatcatcactgtcaggataggatgccgattgtgatggttaccgaggatgaggaagcaatccagcagtatggcagtgagaccgaaggggtctttgtgattaccttcaagtag

SEQ ID NO: 220911 - DNA, 1812 bp, synthetic construct
  misc_feature 1..1812: note = Description of Artificial Sequence: Synthetic coding sequence
  source 1..1812: mol_type = other DNA
atgagccatcctgactatcggatgaacctgagacctttgggaactcctaggggcgtgtccgccgttgcgggtccccacgatatcggagcctccccaggagataagaaaagcaaaaacagaagcacgcgaggaaaaaaaaagtccatcttcgaaacctatatgagcaaggaggacgtgtctgagggtctgaagcgcggaacgttaattcaaggcgtgctgcgaataaacccaaagaaattccacgaggcttttatccctagccccgatggcgacagggatattttcatcgatggcgtggtcgcaagaaatcgagctctgaacggtgatcttgtggtcgtcaagttgctcccagaggagcattggaaagtcgttaaacccgagagcaatgacaaggaaacggaggccgcttatgagagtgacatccccgaggagctttgtgggcaccacctaccgcaacaaagcctgaaatcttacaatgacagtccagatgtgatagtagaagcacaattcgatggctctgacagcgaagacggacacgggatcacacagaacgtgcttgtggatggcgtgaagaagttatccgtctgtgtgagcgaaaaagggagagaagatggggatgcaccggttactaaggatgagacaacatgtatctctcaagataccagggcgttgagcgaaaagtccctgcagcgcagcgctaaggtggtttacatattagagaaaaagcactctagggccgcaaccggatttctgaaactcttagctgataagaattcggaactgttccgaaaatatgctctgttctcgccgtccgatcaccgcgttcccagaatctatgtacccctaaaggattgtcctcaggacttcgtcgcccgtcccaaggattatgcaaacactttatttatctgtaggatcgtcgattggaaagaggattgtaactttgctctggggcagctggcaaagtctttgggccaggctggggagattgaaccagaaaccgaaggtatcctgaccgagtatggggtcgattttagcgatttctcttctgaggtgctggaatgcctgccccaaggcctgccatggactatcccgcctgaggaattttcaaaacggcgagacctgaggaaggattgtatcttcacaattgatccttcaactgccagagatctggacgacgctttgtcatgtaagccactagctgatggcaactttaaagtcggggtacatatcgccgacgtgtcttactttgtacctgaggggtctgatctggacaaggtcgcagccgaacgggcaacgagtgtctacctggtgcagaaggtggtgccaatgctccctaggctgctgtgcgaggaactgtgcagcctgaatcctatgtctgataagttaactttctccgtgatctggacgctgaccccagaaggtaagatcttagacgaatggttcggccgaaccatcattagaagttgtacaaaactgtcctacgagcatgcccagtctatgatcgaatctcccacagaaaaaatccccgctaaggagctccctccaatctcaccagagcattcctccgaagaggtacaccaacagaatgcagataaagacggcgcagctcacctgcaggcatctcacagcccatctgctgaggacgcggaagcccagccatctactgaggaacggttaccggaaacacgcggaatctgcgacagggaccctgatactaggctgttttttttacagcagcaatctcgagttctggaggctaaaccccaaaacacgatcagagtcgaagaacagacaacccagctccagatctag

SEQ ID NO: 220912 - DNA, 2658 bp, synthetic construct
  misc_feature 1..2658: note = Description of Artificial Sequence: Synthetic coding sequence
  source 1..2658: mol_type = other DNA
atgtctcacccagattacagaatgaacctgcggcctctgggaacacctcgaggcgtatccgcagtcgccggaccacacgatatcggggctagtccaggggacaagaaatcaaaaaaccgctccactcgcggaaaaaaaaagtctatctttgaaacctacatgtcaaaggaagacgtcagtgagggcctaaaaaggggcaccctcatccagggggttctgcggattaacccgaagaagttccatgaggcctttatcccgtctccagatggcgaccgagacatcttcatcgacggtgtggtggcgagaaacagggctttgaacggagacctggtggtagtcaaattgctaccagaagagcattggaaggtggtcaaacccgagtccaatgataaggagactgaggccgcttatgaatccgacattcctgaagagctttgcggacaccacctaccacagcagtcgctcaaatcgtataatgactctcctgacgtgatcgtggaagcgcaatttgatggctccgactccgaggacggacacggaattacccagaatgtgctggtcgacggcgttaaaaaattgagtgtctgtgtgagcgaaaagggtcgtgaggacggagacgccccagtcacaaaagacgagaccacctgtatatctcaggacacccgggctttgtctgaaaagtccctgcagcgaagtgccaaggtggtgtatatactggagaaaaaacattccagagctgcaacaggtttcctcaagctgttagcagataagaattccgagctgttccgcaaatatgcgctcttttctccttccgatcatcgagtgcctcggatttatgtcccccttaaagactgtcctcaagattttgtcgctcgcccaaaagattacgccaataccctgttcatctgtcggatagtggactggaaggaggattgcaacttcgccctggggcagctggctaaatctttgggtcaggccggtgagatcgagcctgaaacagagggcattctgactgagtacggcgtggatttttccgatttttcgtctgaagtgttagaatgccttccccaggggctgccctggaccataccgccagaggaattctcgaaaaggcgggaccttcgcaaagattgtatatttaccatagatccttccacagccagggatctggatgacgctctttcatgtaagcccctggcagacggaaattttaaggtgggcgtgcacatcgccgacgtgtcctattttgtacccgaaggatctgacctggacaaagttgccgctgagcgggctacatctgtgtatttggtgcaaaaggtggtgcctatgctcccacggctcctttgcgaggaactctgctctcttaatcccatgtccgacaagttgaccttcagcgtgatctggacactaacacccgagggcaagatcctggacgaatggttcgggagaactatcattcggagctgcactaagctgagctacgaacacgcccagtccatgattgaaagcccgacagaaaagatccccgcaaaagaactaccaccgatttccccagaacattcatccgaggaggtgcaccaggcagttctgaacttacacggcatcgccaaacagcttcgccagcaaaggttcgtcgacggggctctgcgcctggaccagctgaagctggctttcacactggatcatgagaccggccttccccaaggttgtcacatctacgagtatcgcgagagcaacaagcttgttgaagagttcatgcttctggctaatatggcggtggcacataaaattcacagggctttcccggaacaggcattgcttaggagacaccccccaccacagactagaatgctctcagacctggtggagttctgcgaccagatgggactgcctgttgacttttccagcgccggagccctgaacaaaagtctcacacagaccttcggtgacgacaaatactccctggccagaaaggaggtattgacaaacatgtgtagtaggccaatgcagatggctctatatttttgcagcggcctgctccaggatccggcacaatttcggcactacgccctgaatgtgcccttatacacccattttaccagcccaattcgcagatttgccgacgtccttgtccaccgattactggctgcagccctggggtacagagaacgcctcgatatggcccctgacaccctgcagaaacaagctgatcattgtaacgataggcgcatggcctcaaagcgtgtgcaggagctgtccacctcgctgttctttgccgtcctcgttaaagagtctggccctttggagtcagaggccatggtgatgggaattcttaaacaagctttcgacgtccttgtactccgatatggcgtgcagaaaaggatctattgcaatgctcttgcactacggtcacaccatttccagaaagtcggcaagaagccagagctcacactggtttgggagcctgaggatatggagcaagaaccagctcaacaggtcatcacaattttcagcctggttgaagtggtgctccaggccgagtctactgcacttaaatactctgctatcctcaagcggccaggcacccaaggccatctgggccctgaaaaagaagaggaagagtctgacggcgaacccgaagatagttcaaccagctag

SEQ ID NO: 220913 - DNA, 1071 bp, synthetic construct
  misc_feature 1..1071: note = Description of Artificial Sequence: Synthetic coding sequence
  source 1..1071: mol_type = other DNA
atgagtcacccggattaccggatgaacttgaggcccctgggaacccctcgaggcgtgagcgccgttgctgggcctcacgacatcggtgcatcccccggagacaagaagtcaaagaatcgcagcactaggggcaagaagaagtcgatctttgagacctatatgtccaaagaagacgtgtccgaggggttaaaaaggggcacgctgattcaaggcgttctgcggatcaacccaaagaaattccatgaagccttcattccaagtcctgatggcgacagagatattttcatagatggcgttgtagctcggaacagggcgttgaacggggacttggttgtagtcaaactgctaccggaagagcattggaaggtggtcaagcctgaaagcaacgataaagaaactgaagctgcttatgaaagcgacataccagaagaattatgcgggcaccatctgccccagcagtccctgaagagctataacgatagccctgacgtgatagtcgaagctcagttcgacgggtctgatagcgaagatggccatgggatcacccagaacgttctagtggacggcgtgaaaaagctatccgtgtgcgtcagtgaaaaagataacgagattgaggcccagcgatctagttgggcctatcccgtgagtcaccggaaatctgaagagcgcatggtgatgcacagactgcaaaaaatgcggccacctgcgtttcacaagactcaggaactttatcgcaggaatccgtgtaaagatcagcagcgatggtttacctcatggcggaaaaatatacttgaacaacaaccggcttcatcaaattcctggctcattcggactgcaaattgtttgggaaatactccctgcttcctgccccagacaacagagtgtctggagttcatgtgcttgtccagaactgttcccaggacactgtggcacgggctgaagattatgccaactcactgctcatccgccgcactgtggaccggacggcgtacagccatcttaccctgggggtcgtggctgagggtcttgggaagactggtgaaactgtccttgaagcagaaggaatattag

SEQ ID NO: 220914 - DNA, 2658 bp, synthetic construct
  misc_feature 1..2658: note = Description of Artificial Sequence: Synthetic coding sequence
  source 1..2658: mol_type = other DNA
atgagccatccagattatcgcatgaacctcaggcccctgggaaccccccgtggcgtaagtgcagtggccggaccccatgacataggcgctagtcccggagataaaaaatccaagaaccggagtacaagaggtaaaaagaagagtatcttcgaaacctacatgtctaaagaagacgttagtgaggggcttaagcgcggtacattgatccagggcgtgctgcggatcaaccctaagaagtttcatgaagccttcatccccagcccggatggagaccgggatatcttcatcgacggggtcgtggcgaggaatcgcgctctgaacggagacctcgtggtggtgaagctcctacctgaggagcattggaaggtagttaaacccgaatctaacgataaagaaacagaagcagcctacgagtctgatatacctgaggagctatgcggccatcacctgccccagcagagcctgaaaagttacaacgactcccccgacgtgattgttgaggcacagtttgacgggtctgactccgaagatggccatgggatcacgcagaacgtgcttgtggatggcgtcaaaaagctgtctgtctgcgtgtccgagaagggcagggaggacggagatgccccagtcacaaaggatgagacgacatgcatatctcaggatacccgtgcccttagtgaaaagtcgctgcagaggtccgccaaggtggtgtacatactagaaaagaaacactctagggccgcaactgggttcctgaagctgctggctgataaaaattccgagctgtttcggaagtacgcactgttctccccctccgatcacagggtgccccgaatttacgttcccctcaaggactgtcctcaagatttcgtggcaaggccaaaggattacgctaacacattgttcatttgtcgtatcgtggattggaaagaggactgtaactttgccctaggccagcttgccaaatcccttggtcaggcaggcgaaattgagcccgaaacagagggcattctcactgaatacggggtagacttctctgacttttcaagcgaggtgctagaatgtctcccccaggggttgccttggactatcccacccgaggagttctctaagaggagagatctgagaaaagactgcatctttaccatcgacccaagtactgctagggacctggatgacgctctgagctgcaaacctctggctgacggcaactttaaagtgggcgtgcatattgctgacgtgagttactttgtccctgagggaagtgacctcgacaaagttgcagctgaaagggcaacttcagtgtacctcgtgcagaaagtggtaccgatgctccctcggctgctctgcgaggagctctgttcacttaaccccatgtcagataagcttacgtttagtgttatctggaccttgaccccagaaggcaagatcttggatgaatggttcggcagaaccatcatccggagttgtactaagctgtcatacgagcatgctcagagcatgattgaaagccccaccgagaaaatccctgccaaggagctgcccccaatatcaccagaacatagctctgaggaggtgcaccaggccgtacttaaccttcacggcatcgcgaaacagctaagacaacagcggttcgtggatggagccctgcgattagatcaactgaaactcgcctttacactggaccacgaaacaggtctcccccaagggtgccacatatatgaatacagagaatccaacaagcttgtcgaagagttcatgctgctggccaatatggcggtcgcacataaaattcatcgcgcatttccggagcaggctctgttgcggaggcaccctccccctcagacccgcatgctgtctgacctcgtggaattctgcgaccagatgggcctgcccgttgacttttcctctgctggcgctctgaataagagcttgacgcagacattcggtgatgataagtattccctggcaaggaaagaggtgcttacgaatatgtgttcaagacctatgcagatggcgctctatttctgtagcggattgctgcaggatccagctcagttcagacattacgctttgaacgtacccttgtacacacatttcacctcgcctattaggcggttcgccgacgtattagtgcatcggctactggctgccgcactcggatatcgagagcgcttggacatggctcccgataccctccagaagcaggccgaccactgcaatgataggaggatggcaagcaaacgggtccaggaactgtccacaagcctgttttttgctgttctagtaaaggagtctgggcctttagaatccgaagctatggtgatgggcatactgaaacaggccttcgacgtgcttgtgctaagatatggggtgcagaagagaatctattgtaatgctctggctctaaggagccatcactttcagaaagtcgggaaaaagccagaactgactttagtctgggagcctgaggatatggagcaggagcctgctcaacaggtcattacaattttctcccttgtggaggtcgtgcttcaggcggaaagcaccgcgcttaagtacagtgccatcctgaagcggcctggaactcagggccacctgggaccagagaaggaggaggaggaatctgacggcgaacctgaagatagctccacatcatag

SEQ ID NO: 220915 - DNA, 750 bp, synthetic construct
  misc_feature 1..750: note = Description of Artificial Sequence: Synthetic coding sequence
  source 1..750: mol_type = other DNA
atgtcacacccagactataggatgaatttacggccactggggaccccgcgaggcgtgagtgctgtggccggtccacatgacattggcgctagcccaggagacaagaagtcaaaaaacaggagtacacgcggtaaaaaaaaaagcatctttgagacatatatgtctaaggaggatgtgagtgaggggttgaagcggggaacgcttatccagggagtgctcaggatcaatccaaaaaaatttcatgaggcctttatcccatctcccgacggagatcgggacatcttcatcgatggtgtcgtagccaggaatcgggctttgaacggcgacctcgtggtggtcaaattactccccgaagaacactggaaagtggtgaagccagagagcaacgataaagagactgaggctgcctatgaatcggatatccccgaagaactttgcgggcatcacctgcctcagcagtccctcaaatcctacaatgacagcccggacgtgattgtagaagctcagttcgatggcagcgattcggaggacggccacggcataactcaaaacgtcctggtcgatggggtgaaaaagctgtcagtgtgcgtgagcgaaaagggtagagaggatggtgatgctcccgtgactaaggatgagaccacctgcatttcacaagatacacgggcactctccgagaagtctttgcaacggtctgccaaagtaatcgcataccgctttagtcctcgagtacagatggcctttacttag

SEQ ID NO: 220916 - DNA, 2028 bp, synthetic construct
  misc_feature 1..2028: note = Description of Artificial Sequence: Synthetic coding sequence
  source 1..2028: mol_type = other DNA
atgtcccatccagattataggatgaacctaagacctctgggtactcctagaggtgtctccgccgtggctgggccacatgacataggtgcaagccccggagataaaaagtctaaaaaccgtagcactcggggaaaaaagaagagcatcttcgagacatacatgtctaaggaggatgtcagcgaaggcctgaaacggggtactctgatacagggagtcttgcgtataaatcctaaaaaattccatgaggccttcataccctctcccgacggggatagagacatctttatcgatggggtggtggcccgtaaccgggcattgaacggcgatctagtggtggtaaaactcttacccgaagagcactggaaagtcgttaagccagagagtaacgacaaagagaccgaagccgcatacgaatcggacatcccagaggaactttgcggacatcatcttccccaacaatccttgaaatcatacaacgattccccggatgtaatcgttgaggcgcaatttgacggctccgatagtgaggacgggcacggtatcacacagaatgtgcttgtcgatggagtaaagaagctgtccgtctgcgtatcagaaaaggggcgtgaggacggcgacgccccagtaaccaaagatgaaacaacttgtatatcacaggacacccgcgcactgagtgagaaaagtctgcagcggtctgctaaggtggtgtatatcctcgagaagaaacattcccgcgcagcgacaggctttttgaagctgctggccgataagaatagcgagcttttccggaaatatgctttgttttctccatccgaccatcgtgtgccaaggatatacgttccactgaaagattgtccgcaggactttgtcgcgaggcccaaggactacgccaacaccctgtttatttgcagaattgttgactggaaagaggactgtaattttgccctgggccaattagccaagagtttggggcaggccggagagattgagccagagacagagggaatcctgacagaatatggcgtcgactttagtgacttctcttctgaagtgctagagtgtctacctcagggcctgccctggaccattcctccagaggaattcagcaaacgccgtgatctcaggaaggactgtatattcactatcgatcctagtaccgccagggatctggatgacgccctttcctgcaagccattggctgacggaaactttaaggtcggggtgcatattgctgacgtgagctacttcgttcccgaggggtctgatctggataaggtcgctgctgagagagccacatccgtctatctagtccagaaagtggttcctatgctgccacggctgctttgcgaggagctctgcagcctcaaccctatgagcgataaattgacgttctccgttatttggacgctcacaccagagggtaaaattctcgacgaatggttcggcaggacaataatcagaagctgcactaagttgtcctacgaacatgcccagtccatgatcgaatccccgaccgagaagatccctgccaaagagctgccgcctatcagcccagaacatagtagtgaggaggtccaccaggccgtgctgaatctccatggtatcgcaaaacagctgcgacagcagagatttgtagacggggcattgcggctcgaccaactaaagctagcctttaccctggaccatgagacaggactacctcaggggtgtcacatctacgagtacagggagtctaacaagctagtcgaagaattcatgttattagcgaatatggccgttgcacacaaaatacatcgcgcattcccagaacaagccttgctccgcaggcaccccccacctcaaactcgaatgttaagtgacttagtcgagttttgcgaccaaatggggctgcccgtcgacttttcctccgcaggtgcgttgaataaatcacttacccagaccttcggcgatgacaagtactctctagctcgcaaggaagtgcttaccaacatgtgttctcgcttaccagtcccaccgcattggctttag

SEQ ID NO: 220917 - DNA, 435 bp, synthetic construct
  misc_feature 1..435: note = Description of Artificial Sequence: Synthetic coding sequence
  source 1..435: mol_type = other DNA
atgagccatcctgattacaggatgaacctgcggccactgggtactccccgtggagtgtcggctgtggcaggaccgcacgacataggcgcttctcccggagacaagaagtctaaaaatcggagcaccaggggcaagaagaagtcaatctttgaaacttatatgtctaaggaagacgtaagcgagggattgaaacgcggtaccttaatccagggcgttttacgaattaacccaaagaaattccatgaagcatttatacctagccccgacggtgatcgcgatatattcatcgatggggtcgtcgcacgcaatcgcgcactgaacggcgatctcgttgtagtgaagctgctgcccgaggagcactggaaagtggtcaaacctgaatccaacgataaggagaccgaggccgcttacgagtctgacattccggaagagtag

SEQ ID NO: 220918 - DNA, 1860 bp, synthetic construct
  misc_feature 1..1860: note = Description of Artificial Sequence: Synthetic coding sequence
  source 1..1860: mol_type = other DNA
atgtcacacccggactaccgaatgaatctacgtccattaggtaccccccgaggcgtgtcagcagtcgccggaccccacgatataggcgcttctcccggagacaaaaaaagtaagaaccgctccacaagaggcaagaaaaaatctattttcgagacatacatgagcaaggaggacgtgtcggaaggcctgaagaggggcaccctgattcagggagttcttcggattaatccaaagaagttccacgaggcgttcattccgagccctgatggcgaccgggatatttttatcgacggagtggttgccaggaacagggccctgaatggggatcttgtggttgtgaaactgcttcctgaggagcattggaaggtggttaagcccgagtctaatgacaaggaaactgaagcagcatatgaatctgatattccagaagaactgtgcggccatcacctaccacagcagtctcttaagagctataacgactctcccgacgtcatcgttgaagcccaatttgacggaagtgactcggaagatggtcacggcatcactcaaaacgttctagtggacggggttaaaaagctgtctgtctgcgtgtccgagaaaggaagagaagacggagacgctccggtcacaaaggatgagactacgtgtatcagtcaagatacgcgggctctttccgagaagtcgttacaacggtccgccaaggtggtctacatcttagagaagaagcatagccgggctgcaactggcttcctcaagctcctggctgacaagaattctgagctgtttcgcaagtacgccctcttctctccatccgatcatcgcgtccccaggatctacgtgcctttgaaagactgcccccaggatttcgtcgctcgcccaaaggactacgctaataccctgttcatttgtcgtatcgtcgattggaaggaggactgtaacttcgccctggggcaactggctaagagcttaggacaggctggcgagattgagcccgaaacagagggcatcctgacggaatacggggtagatttttctgattttagctctgaggttttagagtgtctgccccagggtctgccttggacaatccctcctgaggaattttcaaagaggcgggacctgagaaaagattgtatttttaccattgacccttccactgcacgggatctggatgatgctctttcatgcaagccgctggccgacggcaatttcaaagtcggcgtgcacattgccgacgtctcttactttgtgccagaggggtcagatctcgacaaagtagccgcagaacgggcaacgagtgtttatttggtccagaaagtggtacccatgctgccgaggttgctgtgcgaagagctttgctcactgaatccgatgtccgacaagttaactttctctgtgatttggactctgacacccgaaggtaaaatcctcgacgaatggttcggccgaacaattatacgctcttgcacgaagctctcctatgagcacgcacagagtatgattgaaagccctacggagaagatccccgctaaggaattacctcccatctccccagaacatagctccgaggaggtgcatcaggccgtgctgaacctccatggaattgcaaaacagttaagacagcagagattcgtggatggggctctaaggctggaccagctgaaactcgcattcaccctcgaccacgagaccgggttgccccagggctgccacatatatgaatacagagagagcaataagccttgctgtgctggcaccccaaggcccaaacaaggctgctcagtgacctggtggaactcggccacccgctggggctgtccctggacgtcagcgcctcaggagccatcaatgaaggcttag

SEQ ID NO: 220919 - DNA, 615 bp, synthetic construct
  misc_feature 1..615: note = Description of Artificial Sequence: Synthetic coding sequence
  source 1..615: mol_type = other DNA
atgagcaccgagacggagttacaggtagctgtaaagaccagtgcaaaaaaggattctcggaagaaggggcaggaccggagcgaggcaacattgataaagcgatttaaaggcgagggtgttagatataaggccaaactgataggcattgatgaggtttccgccgcacggggagataagctatgccaggattccatgatgaagctcaagggcgtcgtggcgggtgcaaggtcgaaaggagagcacaaacagaaaatcttcctcactatctctttcggcggaattaagattttcgacgaaaaaaccggcgcactgcagcaccatcacgctgtgcacgaaatcagttatattgcaaaggatatcaccgaccaccgggcattcggatacgtatgcggcaaagaagggaaccacagatttgtggctattaaaactgcccaagccgcagagccagtaatcctggacctgcgggacttgtttcaactcatttatgaattgaagcagcgcgaggaactcgaaaagaaggctcaaaaggataagcaatgtgagcaggctgtctaccaggttccaacctctcagaagaaggagggagtttatgacgtcccgaagtcccagccctag

SEQ ID NO: 220920 - DNA, 642 bp, synthetic construct
  misc_feature 1..642: note = Description of Artificial Sequence: Synthetic coding sequence
  source 1..642: mol_type = other DNA
atgtccactgagactgagctgcaggttgccgttaagacctcggccaaaaaagactctcgaaagaaaggacaggatcggtcagaagccactctgatcaagcggtttaaaggggaaggagttaggtacaaagccaagctcatcggcatcgacgaagtgtctgccgctagaggggataaactctgccaggatagcatgatgaagctaaaaggcgtagtggctggggcaagatctaagggcgaacataagcaaaaaatctttctgaccatctccttcggtggtatcaagatattcgacgagaagacaggagcccttcagcaccatcatgccgttcatgagattagctatatagccaaggacattacagaccacagggcttttggctacgtctgtggcaaggaggggaatcacagattcgttgccataaagactgcacaagccgcagaacctgtcattttagatctgagggacttatttcaacttatttacgagctaaaacagagagaggagctggagaaaaaggctcagaaggacaagcaatgcgagcaggccgtataccagaccatcctagaggaggatgttgaggaccccgtttatcaagtcattagtgagactagtcgaggattccggttcaagagtgactag

SEQ ID NO: 220921 - DNA, 1767 bp, synthetic construct
  misc_feature 1..1767: note = Description of Artificial Sequence: Synthetic coding sequence
  source 1..1767: mol_type = other DNA
atgtctaccgaaacagaactgcaggtagcagttaaaacatcggcaaagaaggattcaagaaagaagggacaggaccgctcagaggcaaccctgatcaaaaggtttaagggcgaaggcgtgaggtataaagctaaattgatcggtatcgacgaagtcagcgccgctcgcggagacaaattatgccaggacagcatgatgaagttgaagggggtggttgcaggtgcccgttcaaaaggcgagcacaagcagaagatctttctgaccatatccttcggcggtattaaaatttttgacgagaaaaccggtgcacttcagcaccaccatgccgtccatgagattagctacatcgccaaggatatcacagaccacagggcctttgggtatgtgtgcggcaaggagggcaaccacaggtttgtagctattaagaccgctcaggctgctgagccagtgatcctggacctgcgggatctgttccagttgatttatgaattgaagcagcgggaggagctcgaaaaaaaagcacagaaggacaagcagtgtgaacaggccgtgtatcagacaatcctggaagaggacgtggaggaccccgtttaccagtacattgtttttgaggcgggacatgagcccatccgagatcccgagacagaagaaaacatctaccaagtgccaacgagccaaaagaaagaaggggtgtatgacgttccaaagtcgcagcctgtgtccaatggctactctttcgaagacttcgaagagcgattcgcagcggcaacaccaaaccggaacctgccaacggactttgatgaaatttttgaagccactaaagctgtcacccagctggagctttttggcgacatgagcaccccccctgacattacttcccccccaacaccggctacgcccggtgatgcttttattccatcttcgagccagacactgccagcatccgccgacgtgttcagctcagtgccgttcggtaccgcagccgttccatctggatatgtggcaatgggggctgtactaccttcgttttggggccagcaaccactggtccagcaacaaatggtcatgggagcccaaccacctgttgcacaggtgatgcctggggctcagcccatcgcttggggccagccaggtctatttccagccactcagcagccttggccaaccgttgccggacagtttccacccgctgctttcatgccaacacaaaccgttatgccactcccagctgctatgttccagggccctttaacacccttggccactgtgccaggcactagcgatagcacccgctcctcacctcagacagataagcctcgtcagaagatggggaaggagacctttaaagacttccagatggcacagccacctccagttccatcccgtaaacccgaccaaccgagtctaacatgtacctctgaggcttttagcagctactttaataaggtaggagtcgcacaggatacagacgactgtgatgacttcgatattagccagcttaatctgactcctgtgacctcaacaacaccttccactaactcacccccaactccagcaccacgacagtcgagtccatccaaaagtagcgcctcccatgctagcgatccgactacagacgacatttttgaggagggcttcgagtccccgagcaaaagcgaagaacaggaggccccagatggatctcaggccagttcaaatagtgaccctttcggagaaccctccggcgaaccttcaggcgacaacatctccccacaggccggatcgtag

SEQ ID NO: 220922 - DNA, 720 bp, synthetic construct
  misc_feature 1..720: note = Description of Artificial Sequence: Synthetic coding sequence
  source 1..720: mol_type = other DNA
atgtctaccgagactgagctacaggtagcagtaaaaacctctgctaaaaaggactcgcggaagaaagggcaagatcggtctgaggccacactcattaaacgattcaagggcgaaggggtacgttacaaagcgaaacttattggcatcgatgaggtcagcgccgctcggggagacaaattgtgccaagactccatgatgaagctgaaaggggtggtcgcaggggcacggagcaagggtgagcacaaacagaaaatctttctaaccatatcattcggcggtatcaagattttcgacgaaaaaaccggagtgcctacctctcagaaaaaggaaggcgtgtatgacgtgccaaaatctcagccagtcagcaatggctactcgtttgaggattttgaagaaaggtttgctgcagcaaccccaaatagaaacctcccaacagacttcgacgagatctttgaggctaccaaggcagtaacacagttagaattgttcggtgacatgagcactccacctgatattacaagtccgcctactcccgcaacgcccggtgatgctttcatacccagctcctcacagaccttgcctgcttcggcagatgttttctcaagtgtcccgttcggtaccgccgcagtgccatcggggtatgtagccatgggagccgtgctaccatcattttggggccagcagccgctggtgcagcagcagatggtcatgggagcctag

SEQ ID NO: 220923 - DNA, 1668 bp, synthetic construct
  misc_feature 1..1668: note = Description of Artificial Sequence: Synthetic coding sequence
  source 1..1668: mol_type = other DNA
atgtcaaccgagaccgaactgcaggtggcagtcaaaacttctgcaaagaaggattcccgaaaaaaagggcaagacaggtctgaagccactctcattaagagattcaaaggcgaaggagtgaggtataaggcaaaactcattggaatagacgaggtgagtgcagctagaggggataagctgtgtcaagatagcatgatgaaactaaaaggggtcgttgcaggggctcgctctaagggtgagcacaaacagaaaatcttcctgacgatcagcttcggcggaataaagatcttcgacgaaaagacgggagccctccagcaccaccatgccgtgcatgaaataagttacattgccaaagatataactgatcatcgagcatttggctacgtgtgcggcaaggaggggaatcatcgttttgtggcaatcaagaccgctcaggccgctgagcccgtgattcttgatctgcgcgatctgttccagctcatctatgaacttaagcagcgggaagaactggagaaaaaggctcagaaagataagcagtgtgagcaggctgtgtaccagacgattctggaggaggacgtggaggaccccgtttatcagtacatagtatttgaagcgggtcatgaacccatccgggaccccgagaccgaagagaacatatatcaggtgcccaccagtcagaagaaagagggcgtctacgatgtccctaaatctcaacctgtttcagctgtgacccagctcgagttgttcggggacatgagcacacctcctgacataactagcccccctacacccgctacgcctggtgacgctttcatcccctctagttctcagacactgcccgcatcagcggacgtcttctcgtcggtcccattcggcactgcagcagtcccaagcgggtatgtcgcaatgggcgctgtcctaccttctttctggggtcaacagccactggtgcaacagcagatggtcatgggagcccagcctccggtcgctcaggttatgcccggagcccaaccgattgcctggggacagcccggtctgttcccagcaacacagcagccgtggccaaccgtagctggccagttcccccctgccgcattcatgcctacccaaactgtgatgcccctccctgctgcaatgtttcagggccctttaacgccgttggctactgtgccagggacaagcgatagtactcgtagtagtccccagaccgataagcctcggcaaaagatgggcaaagaaaccttcaaggattttcagatggctcagccaccccctgtcccgagtagaaagccagatcagccaagtctgacgtgtacatccgaagcttttagttcttattttaacaaagtcggcgtggctcaggatactgacgactgtgatgacttcgacatatcccagctgaacctgacacccgtgacgtctacgaccccttccaccaacagtccacccactcctgcccctcgtcagtccagcccttccaaaagctctgcatcacatgcttcagacccgaccactgatgacatcttcgaagaagggttcgaatctccaagtaagagcgaggagcaagaggcaccagatggcagtcaggcgtcatctaattcagaccccttcggcgagccttctggggagccctcaggcgacaatatttccccacaagctggatcctag

SEQ ID NO: 220924 - DNA, 1668 bp, synthetic construct
  misc_feature 1..1668: note = Description of Artificial Sequence: Synthetic coding sequence
  source 1..1668: mol_type = other DNA
atgagcaccgagacagagttgcaagtggcagtgaagacctccgccaagaaagactcaagaaagaagggtcaggatagaagtgaggccacactcatcaaacgtttcaagggagagggggtccgatacaaggccaaacttatcggcattgacgaagtgagtgcagctcggggtgataaactgtgccaagacagtatgatgaagttgaaaggggtggtcgccggtgctcggtccaaaggagaacataaacaaaaaattttcctgacaatctcattcgggggtataaaaatcttcgacgagaaaactggtgcacttcaacatcatcatgcagtgcatgagatatcgtacatcgccaaggacatcaccgaccatagagcgttcggatacgtgtgtggaaaagagggaaaccataggtttgttgctatcaagactgcccaagcagcggagcccgtgatactcgatctgagagatcttttccagttgatctatgaattaaagcagcgggaggagctagagaagaaggcacagaaggacaaacagtgcgagcaggctgtttatcagactattctagaggaggacgtggaggatccggtataccagtacatagttttcgaagcgggacatgagcctattcgcgatcccgagacggaggagaacatctaccaggtgcctacctcacagaaaaaggaaggagtgtatgatgtgcctaagagccagcccgtgagcgccgtgacacagctcgagttgtttggcgacatgtcaacacctcccgatatcacaagcccaccgacacccgctaccccaggggacgcttttattccctctagctcacaaacactcccagcatccgcagacgtcttctcttccgtaccattcgggaccgccgctgtcccttccggctacgtagccatgggcgcagtactgccttcgttttggggacaacagcccctagtccagcagcagatggtgatgggtgcccaacctcccgtcgcacaggtcatgccaggggctcagcctatcgcctgggggcagcctgggctgtttcctgctacacagcaaccttggcctacagtcgcagggcagtttcctcctgcagccttcatgccaacccagaccgttatgcctctgccagccgcaatgttccagggtcccctgacacccctagctactgtgccaggaaccagcgactccacccgttcatcccctcagaccgacaagcccagacagaaaatggggaaggagacattcaaggactttcaaatggctcagcctccccctgtgccctctcgtaagcccgatcaaccttctttgacatgtacctccgaggcgttctccagctactttaacaaagttggtgtggcacaggataccgacgactgcgatgatttcgatatttcgcagctcaacttaacaccagtgacgagtacaacacctagcacaaacagccctccaactcctgctccgaggcagagttccccttcaaaatcctccgctagtcatgcttctgaccccactaccgacgacatctttgaggaaggcttcgaaagtccttcaaagtcagaggagcaggaagcccctgacggcagccaggcatcaagtaattcagatccatttggtgaacctagtggggagccttctggcgataacatctccccccaagcaggatcttag

SEQ ID NO: 220925 - DNA, 1668 bp, synthetic construct
  misc_feature 1..1668: note = Description of Artificial Sequence: Synthetic coding sequence
  source 1..1668: mol_type = other DNA
atgtcaaccgaaacagaactacaggttgccgtcaagacatctgccaagaaggactctcgcaaaaagggacaggataggtcagaagctacattaatcaaaaggttcaagggcgagggcgtaaggtacaaggcgaaactcattggtatcgatgaggtatctgctgcgcgtggagacaaactgtgccaggattcaatgatgaagttgaagggggtggttgccggtgctaggtctaagggtgaacacaaacaaaaaatctttctgaccatctcatttggcggtatcaagatctttgatgagaagacaggcgcactccagcatcaccatgcggtgcacgaaattagttatatcgccaaggacattacagaccaccgcgctttcggatatgtgtgcgggaaggaaggcaatcaccgatttgtcgcaattaagactgcccaggcagcagagcctgtgattctggacctgagggatctattccagctgatttatgaacttaagcagagggaggaattggaaaagaaagcacaaaaggataagcagtgcgagcaggctgtataccagactatcttggaagaggacgtcgaggatcccgtataccagtacatcgtttttgaggccggtcacgaacctatccgagacccggaaaccgaggagaacatttatcaggtccccacaagtcagaagaaggagggagtgtacgatgtgcctaagtctcaaccagtctccgcagtcacccagctggagttgtttggggacatgtcgactcccccagacattacctcaccacccacacccgcaactcctggcgacgccttcatccccagtagctcgcagacactgcccgcttctgctgacgtctttagttccgtcccctttggcacggcagccgttccgtctgggtatgttgccatgggggcagtgctcccttcattttggggccagcagcctttagttcagcagcaaatggtaatgggtgcccagccacccgtcgcacaggtcatgcccggtgcgcagcccatcgcatggggccagcccggtctcttccccgctacacagcagccctggcccactgtggctggacagttccctcctgcagcctttatgcccacacaaactgttatgccactgccggcagccatgttccaggggcctcttacccccctggcaaccgtgcccggtaccagtgattccacacgatccagcccgcaaacggacaagccacgccagaaaatgggcaaagaaacgtttaaggacttccagatggcgcaaccccctccagttcccagtagaaagcccgaccagccctctctaacgtgcacttcagaggccttctcttcttacttcaataaggttggggtcgcgcaggacaccgacgattgcgatgactttgacatctctcagctgaacctgacgccagtaacttctactacaccgtccactaattctcctcctactccagccccacggcagagctctccatccaagtctagtgcctcacatgccagtgacccaacgacagatgatatatttgaggaagggttcgaatctccttcaaagagcgaagagcaagaggccccagacggctcacaggcatcaagtaactcagatccttttggcgagccttctggggagccctccggagataacatatccccacaggccggttcctag

SEQ ID NO: 220926 - DNA, 1614 bp, synthetic construct
  misc_feature 1..1614: note = Description of Artificial Sequence: Synthetic coding sequence
  source 1..1614: mol_type = other DNA
atgagcaccgaaactgaattacaagtagcggtcaaaacctctgcaaagaaggacagcaggaagaagggccaggaccgaagtgaagccactctgataaaaagatttaaaggcgaaggcgtccgctataaagctaaactaatcggcattgacgaggtcagtgctgcgcgaggcgataagttgtgccaagattctatgatgaaactcaagggcgtcgttgcaggagccagaagtaagggggaacacaagcagaagatcttcctgactatctcttttggtggtataaaaatctttgatgagaaaaccggcgctctacagcaccaccatgccgtgcacgagattagctacatcgccaaggacattaccgaccacagagcctttggatatgtttgtggaaaagaaggtaatcacagatttgttgccatcaagactgcacaggccgcagagcctgttattctggatctgcgcgacctttttcagctgatatacgagctaaagcagagagaggaactggaaaagaaggcccagaaggataaacagtgtgaacaggccgtctaccaggttcctactagccagaaaaaggagggggtctatgatgtgcccaagtcacagcccgtgtccaatggttactcttttgaggactttgaggagagattcgccgcagctactcctgcagtgactcagctcgaactgtttggtgacatgtctactcctccagacatcacttccccccctacgcctgccacacctggggacgcattcattcctagctccagtcagactttgccggcttcagctgacgtgttttcctccgtgccgttcggtaccgcggctgtgccctctgggtatgtggccatgggtgccgttcttccctccttctgggggcagcagccactggtgcaacagcagatggtcatgggagcccaaccccctgtggcacaggttatgcctggcgcacagcctatagcctggggacagccgggtctgttcccagcaacccagcaaccctggcctactgtggccggacagtttcctcctgctgcctttatgccgacccagaccgtgatgcccctgccagctgccatgttccagggaccactgacacctctcgcgaccgtaccaggaactagtgacagtacgcggtccagtccacagacagacaagcctcggcagaagatgggtaaagaaacatttaaagatttccagatggctcagcctcctcccgtgccttcaaggaagcccgaccagcctagtctgacgtgcacctctgaagccttctcctcatacttcaataaagtcggggtcgctcaggataccgacgattgcgatgattttgacatcagtcagttgaacctgacaccggtgacaagcacgaccccatccactaacagcccgcctacacccgctcctaggcagagcagcccatccaagtcctccgcgagccacgcctctgaccccacaaccgatgacatcttcgaggaagggtttgagtccccatctaaaagcgaagagcaagaagctcccgatgggtctcaggctagctctaattcagacccttttggagagccgagcggagagccaagcggcgataacatatccccgcaggccggatcctag

SEQ ID NO: 220927 - DNA, 1662 bp, synthetic construct
  misc_feature 1..1662: note = Description of Artificial Sequence: Synthetic coding sequence
  source 1..1662: mol_type = other DNA
atgagcaccgagacagaattgcaggttgccgtgaaaacctccgcgaaaaaggactccaggaaaaaggggcaggatcggtccgaggccacacttatcaagcgatttaagggcgagggggtacgctataaagccaaacttatcggaattgacgaagtatcagcagccagaggggacaaattgtgccaggattccatgatgaaattgaagggcgtggtggcaggcgctagaagcaaaggagagcacaagcagaagatattcctgactatttcattcggaggaatcaaaatctttgacgagaagaccggggctctccagcatcatcacgccgtgcacgaaatcagctacattgctaaggacatcaccgaccatagggcatttggttacgtctgtgggaaggagggaaaccacagattcgtggccatcaagaccgctcaggctgcggagccagttatcctggatctgagggatttgtttcagctgatctatgaattgaaacagcgcgaggagctagaaaaaaaggctcagaaagataagcagtgtgagcaggccgtgtaccaagttccgacttctcagaagaaagagggtgtgtacgacgtgcctaaaagtcagcctgtgagtaatggctattcctttgaggactttgaggagcggtttgccgcagcaacccctaatagaaatctgcctacagatttcgatgagatttttgaggcaacaaaggcagtgacgcaacttgagctctttggcgacatgtcaacacccccagacataactagtccacccacgccagctacgccgggagatgccttcatcccatcatcctctcagactctgccagcaagcgccgatgtattctcctctgtgccctttggcactgcagccgtgccctcaggctatgtggccatgggcgctgttcttccaagtttctggggtcagcagcctctcgtgcagcagcagatggtgatgggcgcacaaccaccagtcgcccaggttatgccaggtgcacaacccatcgcctgggggcagccaggtctcttccctgccactcagcagccatggcccacagtcgcgggacagttccccccagcggctttcatgcccacccagacagtgatgccgctacccgcagccatgtttcagggcccactgactcccttagctaccgtgcccggaacctcagattccacccggtcatcccctcaaacggacaaacctaggcagaagatggggaaagagacattcaaggatttccaaatggcacaaccccctcctgtgccaagccgcaagccagaccagccatccctgacctgcactagcgaagcattcagttcatacttcaataaagtgggggttgcccaggacactgacgattgcgacgactttgatatcagtcagttgaatctgacacctgtgaccagtacaactccttctactaacagccctcccaccccggcacccagacaatcctctccaagcaaatcaagtgcatctcacgcttctgaccccactacggacgatattttcgaggagggttttgagagcccttctaagtcagaggagcaggaggctcctgacggatctcaggccagttcaaactccgacccctttggggaaccctcaggtgaacccagcggtgacaatataagcccacaggccggttcatag

SEQ ID NO: 220928 - DNA, 1410 bp, synthetic construct
  misc_feature 1..1410: note = Description of Artificial Sequence: Synthetic coding sequence
  source 1..1410: mol_type = other DNA
atgagcactgaaacagagcttcaggttgctgttaagacatccgctaagaaggatagtagaaagaagggacaggaccgctctgaggctaccctaattaagcgctttaaaggtgagggggttcggtacaaggccaagctcatcggaatcgacgaagtgtctgccgctagaggcgacaagctgtgtcaggacagcatgatgaagctgaagggtgtcgtggccggagctcgctcaaagggagagcataagcagaagattttcttgactatttccttcgggggtattaaaattttcgacgaaaagacaggagtgccaacaagccagaagaaagagggcgtttacgatgtacccaaatctcagccagtgtccaatggatatagcttcgaggattttgaagagagatttgccgctgccaccccaaatcgcaaccttcccaccgacttcgacgagatattcgaggcaacgaaagcagtcacgcagttagaactgttcggggatatgagcacaccaccagatattacctctccccctacccccgctacgccaggcgatgctttcatcccttcttctagtcagacattacctgcatctgctgacgtgttttccagtgtgccttttgggactgccgctgttccctcagggtatgtggcaatgggggctgtgctgccttcattttggggccagcagccgctggtgcagcagcagatggtgatgggcgcacaacctcctgtcgcccaggttatgccaggcgctcagccaattgcttgggggcagcccggattgtttccggcaactcagcagccgtggcctacagttgcaggacagttccctcctgccgcattcatgcccacccagacagttatgcctctcccggctgccatgttccagggacccctgacccccctcgccacagtgcctggtacctctgatagtacacgctcttccccacagacggacaaaccaaggcagaagatgggtaaagagacctttaaggattttcagatggctcagcccccacccgtgccctcccgcaaacccgatcaaccctctttgacatgcacctcggaggccttctcttcctactttaataaggttggcgtggcacaagacaccgacgattgcgatgactttgacatctcccagctcaacttgactccagtaacctcgacaaccccctccacaaattcacctccaacacccgctcctaggcaaagctctccttctaaatccagcgcctcccacgcatcggacccaacgacagatgacatcttcgaggagggattcgagagtccaagcaagtccgaggagcaggaagcaccggatggaagccaggcaagctctaactcggacccttttggcgagcccagtggtgaaccgagtggcgacaatatttcacctcaggccggttcttag

SEQ ID NO: 220929 - DNA, 2313 bp, synthetic construct
  misc_feature 1..2313: note = Description of Artificial Sequence: Synthetic coding sequence
  source 1..2313: mol_type = other DNA
atgtcgaatgaagtcgagaccagcgcaaccaacggacaacccgatcagcaggctgcacccaaggccccatccaagaaagaaaagaaaaagggcccagaaaagacggacgagtacctactcgccagatttaaaggagacggcgtaaaatataaagctaaacttatcggcattgacgatgtcccggatgcacggggtgataagatgtcccaggacagcatgatgaaactgaaaggcatggctgctgctggcagaagccagggacagcataaacagagaatttgggtaaacatttctcttagcggcataaagataatcgatgagaaaactggcgttattgaacacgaacatccagtgaacaaaatctcctttatcgcgcgagacgtgactgacaacagggccttcggctatgtctgcggcggagaggggcagcaccagtttttcgccattaaaaccggacaacaagcagaaccccttgtcgtcgatctcaaagacctgttccaggtcatatacaacgtgaagaaaaaggaggaggagaaaaagaaaattgaggaagcatctaaggcggtggaaaatggatcagaagctctgatgattctagacgaccagaccaataagttaaaaagcggcgtagaccagatggatctttttggagacatgtccacaccacccgacctgaacagtccaacggaatctaaggatatcctgctggtagacctgaacagtgaaatcgatacaaaccaaaactccctgagagagaatccttttctgaccaacggtatcacgtcctgctcactgcccagaccaacaccccaggccagttttctacccgaaaatgcattttcggcaaacctcaacttcttcccgacccctaacccggacccatttcgcgacgatccttttacacagccagatcaaagcacaccctcctctttcgatagcctcaagagccctgaccagaaaaaggagaattccagcagttccagcacacccctgtcaaatgggccactgaatggtgacgtagactactttggccagcagtttgaccagatatcaaacagaaccgggaagcaggaagcacaagccggaccttggcctttctcaagctctcagacccagcccgctgtcagaacgcagaacggagtcagcgagcgcgagcaaaacggcttcagcgtgaagtccagtccaaatccttttgttggcagcccgccaaagggcctctccatacagaatggagtgaagcaggacttagagtccagcgtgcaatccagtcctcatgactcaattgccatcattcctcccccacagtccacaaagcccggacgcggaagaagaacagccaagtcttccgccaacgatttgttggcctcagacatcttcgcccctccagtgtctgagccgagcgggcaagcttctccaacaggacagccaaccgcgctccaacccaaccctctggacctgttcaagacatccgcccctgccccagtggggcctctggtgggcctgggcggagttaccgtgaccttgccccaggcaggcccttggaatacagcttcattggtcttcaatcagtcccccagcatggccccaggagcgatgatgggcggacagccctctggcttcagccaaccggtgattttcggaacctccccggcagtctctgggtggaatcaaccgtctcctttcgcagcctcaacccctcctcccgtgcctgtggtgtgggggccatccgcctccgtggcccctaatgcttggtccacaaccagtccattgggcaaccccttccagagtaatatcttccctgctccggcagtgagtacgcagccaccatccatgcactcaagcctgctggtcaccccaccccagcccccacccagagccggacccccaaaggatatttctagcgatgcctttaccgcgctggaccctctcggtgacaaagaaataaaagacgtgaaggaaatgttcaaggattttcaactaaggcaaccgccagctgtgcccgctagaaaaggtgaacaaacttcttctggcacactgagcgcttttgccagctacttcaactctaaagtaggaattccgcaagaaaacgctgatcacgacgactttgacgccaaccagctgctcaacaaaatcaacgagcccccaaaacccgctccccgtcaagtgtctttgccagtgacaaaatccaccgacaacgcttttgaaaatccatttttcaaagactcctttgggtcatcgcaggcaagcgtggctagttcccagcccgtcagcagcgaaatgtacagggacccttttggaaatccattcgcctag

SEQ ID NO: 220930 - DNA, 1659 bp, synthetic construct
  misc_feature 1..1659: note = Description of Artificial Sequence: Synthetic coding sequence
  source 1..1659: mol_type = other DNA
atgagtaatgaggtggaaacgagtgccaccaatggccagcctgaccagcaggctgcccctaaggccccaagcaaaaaggagaaaaaaaaaggcccagagaaaactgacgaatacttgttggctcgattcaagggggatggagtgaagtataaagctaagttaataggcattgatgatgtgcctgacgcacggggagacaaaatgtcacaggactccatgatgaagctgaaagggatggccgcagcagggaggtctcagggccagcacaagcagaggatctgggtaaatatttctctgtctggaattaagatcatagatgaaaagacaggtgtgattgaacatgagcaccctgtgaataaaatctcctttattgctcgggacgtgactgacaaccgggctttcggatacgtctgtggcggagaaggacagcaccagttctttgccattaagacaggccagcaggccgagcccttggtggtggacctcaaggatctatttcaagtcatctataatgtcaagaagaaggaggaggagaagaagaaaatagaggaggctagcaaggccgtggagaacggctccgaggctctgatgattcttgacgaccagaccaacaaattgaagagtggggtggaccagatggacctgtttggtgacatgtctacacccccagacctgaactcccccacctctagcgccaatgatctcttagcaagcgatattttcgcccctcccgtgtctgaaccttccggacaggcatctccgaccgggcagcctactgcgctgcagccaaatccgctggacctttttaagactagcgctcccgctccagtcggccctctcgtcggcttaggcggagttaccgtgactctgccccaggccggaccatggaacaccgcctccctcgtgttcaaccaatcaccttctatggctccgggtgccatgatgggtggccagccgtcagggtttagtcaacccgtgattttcgggacgagccctgccgtaagtggctggaatcagccctccccattcgctgcctctactccccctccagtccccgtcgtgtggggccctagtgcatcggtggctccaaatgcttggagcactacatccccgcttggtaatccttttcagagtaatatcttccccgctccagcagtgagcactcagcctcccagtatgcactcatccctgttagttacaccccctcagccacctccacgagccggaccccctaaggacatctcttctgatgccttcactgcccttgatccacttggcgataaagaaattaaagacgtgaaggaaatgttcaaggattttcagctgcgtcagccccctgccgtgcctgcccgtaagggggagcaaactagcagcggaacgctgagtgcatttgcctcctattttaatagcaaggtggggataccacaggaaaacgccgaccacgatgacttcgatgctaatcagctgctgaacaagatcaacgaacctcccaagccagcacccagacaagttagcctccctgtgactaaaagtaccgataacgcttttgagaacccattcttcaaggattcattcggatcttcacaggcaagcgtggccagctctcagcccgtatcctctgaaatgtatagggatcccttcgggaacccttttgcctag

SEQ ID NO: 220931 - DNA, 204 bp, synthetic construct
  misc_feature 1..204: note = Description of Artificial Sequence: Synthetic coding sequence
  source 1..204: mol_type = other DNA
atgagcaacgaagtagaaacaagtgccacaaatggccaacctgaccaacaagctgccccaaaggccccttctaaaaaagaaaaaaaaaaggggcctgagaagacagatgagtacttacttgcccgtttcaagggggacggggtcaaatataaggccaaactgattggaattgacgacgtgcccgacgccagaggcgataagtag

SEQ ID NO: 220932 - DNA, 231 bp, synthetic construct
  misc_feature 1..231: note = Description of Artificial Sequence: Synthetic coding sequence
  source 1..231: mol_type = other DNA
atgtccaacgaagtggagacatctgccacgaacggacaaccagatcagcaggcggctcccaaagccccttcaaagaaagagaaaaaaaagggcccagagaagaccgacgaatacctgctggcccgtttcaaaggcgacggcgtcaaatacaaagcaaagcttatcggcatcgacgatgtccccgacgcgcgaggcgacaaaatgtcgcaggactccatgatgaaattatag

SEQ ID NO: 220933 - DNA, 120 bp, synthetic construct
  misc_feature 1..120: note = Description of Artificial Sequence: Synthetic coding sequence
  source 1..120: mol_type = other DNA
atgtcaaatgaggtcgagacctccgctacaaacggccaacctgaccagcaggccgcacccaaggctccaagtaagaaagaaaaaaaaaaaggtcctgaaaaaaccgacgagtacctgtag

SEQ ID NO: 220934 - DNA, 2250 bp, synthetic construct
  misc_feature 1..2250: note = Description of Artificial Sequence: Synthetic coding sequence
  source 1..2250: mol_type = other DNA
atgtcgaacgaagttgaaacctcagccacaaacgggcagcccgaccaacaggcggcaccaaaggcacctagtaagaaagagaagaagaaaggccctgaaaaaacagatgaatacctgctagcaaggtttaaaggcgatggcgttaaatataaggccaagttaatcggcatagacgacgttccggacgcccgaggcgataaaatgtcccaggacagcatgatgaagctaaaggggatggctgccgcaggccgtagccagggccagcacaagcagagaatttgggttaatatctccttatctgggatcaagatcatagacgagaaaaccggagtgattgagcacgagcatcccgtgaataaaatttcatttattgcgagagatgtgacagacaatcgggcattcgggtacgtttgcggtggtgagggtcaacatcagttcttcgctattaagaccggtcagcaggccgagcccctcgtggttgacctgaaggatctttttcaggtaatatacaacgtcaagaagaaggaagaggagaaaaagaaaatcgaggaagcctcaaaagcagtcgagaatgggtcagaagcgctaatgattctagacgatcaaacgaacaagttaaagagcgagtccaaggatattcttctggttgacttgaactccgagattgacacaaaccaaaactcgctgcgagagaacccgtttcttactaatggcattacgagctgcagtctccctcgaccaacgccgcaggcgagtttcttgccagaaaacgcctttagcgccaatttgaatttctttccaacacccaatccagacccttttcgggacgacccatttactcaacctgaccaatccacgccatcctcctttgactctctgaaatctcccgatcaaaagaaggagaactcaagctctagctctacacctctttccaatggcccattgaatggagacgtggattatttcgggcaacagtttgatcagatcagcaataggaccggaaagcaagaggcacaagctgggccttggccctttagctccagccagactcagcccgcagttaggactcagaacggcgttagcgagcgggagcagaatggcttctctgttaaaagctctcctaatccattcgttggatcaccaccaaagggactttccattcaaaacggtgtaaagcaggacctcgagtcttcggtgcagtcctctccccacgattccattgcaattatccccccaccgcagagtacaaaacccggacgaggtagacgcacagctaaatcatccgctaacgatctcctggctagcgacatttttgctccccctgtgagcgagcccagcggccaagcgtctcccaccggacagcccaccgccctgcaaccaaaccctctcgatctgttcaaaacatccgctcctgcgccagtcggcccacttgtgggactcggtggagtcactgtgacactaccacaggctggcccatggaatactgcatccttggtttttaatcagagtccttctatggcgcctggggcaatgatggggggacaaccttcaggttttagtcaacccgttatatttggaacttctcccgcagtttctggatggaaccagccatcgccgtttgccgcatccactccaccacccgttcccgtagtttggggtccaagcgcctcggtggctcctaatgcttggagtaccacatctccactgggaaaccccttccagagcaatatctttcctgcacccgctgtgtctactcagccaccatctatgcacagtagtttgcttgtgacgccacctcagccccctcctcgcgctggcccaccaaaggatatctcaagtgatgcatttaccgccttggatcccctaggcgataaggaaatcaaggacgtcaaggagatgtttaaggactttcagttaagacagcctccagctgtgcctgcccgtaaaggggagcagacatcgagtggcaccctgagtgcattcgcctcctacttcaactctaaggtgggaattccgcaggagaatgctgaccatgatgacttcgacgccaatcagctgctgaacaagattaacgagccccctaaacccgctccgcgtcaggtctcacttccagtgaccaagtctaccgataacgcattcgaaaatccgttttttaaagatagcttcggcagcagtcaggcaagtgtagcctcctctcaaccggttagctccgagatgtacagggaccccttcgggaatcctttcgcttag

SEQ ID NO: 220935 - DNA, 2568 bp, synthetic construct
  misc_feature 1..2568: note = Description of Artificial Sequence: Synthetic coding sequence
  source 1..2568: mol_type = other DNA
atgatcctgattcctcgaatgctgttggtgctgttcttgctcttaccaatcttatcctcagctaaggcacaggtcaaccccgcaatatgtcggtacccgctcggcatgtcaggtgggcaaattccagatgaggatatcactgcatcttcacagtggtcagagtccactgcggcaaaatatgggagactagatagtgaagaaggcgatggagcttggtgtcctgaaatcccagtagaaccagatgatctgaaggaattcctccagatcgacctccataccctacactttataacgctggtggggacacagggacggcacgccggagggcacggtattgagtttgctccaatgtataagataaactactcccgcgacgggaccagatggatatcgtggcgcaaccggcatggcaaacaggttcttgacgggaactcgaatccttacgacatttttcttaaggatttggagcctccaatcgttgcccgttttgtgagatttattcctgtcacagaccattcgatgaacgtctgtatgcgagtggagctgtatggctgcgtttggttagatggactggtttcctacaacgcacctgccggacagcagttcgttttacccggtggaagcatcatctatcttaacgattcagtgtatgacggcgcagtggggtactcaatgacggaaggcctgggacagctgaccgacggagtgagtggactagacgacttcacacagacacatgagtaccatgtgtggccgggatatgactacgtgggctggcggaatgagagtgccacgaacggctacatcgagatcatgtttgagttcgaccggattcggaacttcacaacgatgaaagtgcactgcaacaacatgttcgccaaaggcgtcaaaatcttcaaggaagtccaatgctacttcaggtccgaggcctctgagtgggagcccaatgcaatatcttttccccttgtcctggatgacgtgaaccctagcgcgaggtttgtgaccgtcccactgcatcataggatggccagcgccattaaatgccagtaccactttgcggatacgtggatgatgttttctgagatcacatttcagagcgacgctgcaatgtataataattccgaggcattacccacaagccctatggctcctactacctacgatcccatgctcaaagtcgatgacagtaacacgcgcatcctcatcggctgcctcgtggctatcatttttattctcctcgcaattatcgtgatcatactttggcggcagttctggcagaaaatgctagagaaagcatcacgacgcatgcttgacgatgagatgacagtgtcattatccctcccttcagatagtagcatgtttaacaacaaccgcagtagctcaccgagcgaacagggcagcaattctacatatgacagaattttccctctgaggccagactaccaggaaccatcgcgactgatccgcaagttgcccgaatttgcacctggagaggaggagtcaggatgttccggcgttgttaagccagttcagccatctggccctgagggcgtccctcactatgcggaggccgacatcgtgaatcttcagggagtcaccgggggaaacacatacagcgtgccagcagtcaccatggatctattgagcggaaaagatgtggctgtcgaagaatttcccaggaagcttctgactttcaaggaaaagctgggggaaggccagtttggagaagttcacttatgtgaagtcgagggcatggaaaaattcaaggataaggatttcgcattggatgtgtccgctaatcagcccgtgcttgtagccgttaagatgctccgcgctgatgccaacaagaacgctaggaatgactttcttaaggagatcaagatcatgagccgcctgaaagaccctaacataatccatctgttagcggtgtgcatcacagacgaccctctatgcatgatcaccgaatatatggagaacggggacctcaaccagtttctaagccgccatgaacctccaaattccagctcctccgatgtacgtacagtgtcctataccaatctgaagtttatggcaacacaaatagcctccggcatgaagtacctgagcagtttgaatttcgtccatagggacctcgcgacacgtaattgcctggtaggaaaaaactatactattaaaattgctgactttgggatgtctaggaacctgtacagtggggactattaccgaatacagggcagagccgtactccccattcgctggatgagctgggagagcattctgctgggaaagtttacaacggcgtctgatgtgtgggcgtttggcgtgactctctgggagacctttaccttttgtcaggagcaaccatactcacagctaagtgatgagcaggtgattgaaaacaccggggaattctttagagatcagggtaggcagacatatctgccccaacccgctatctgcccagacagcgtatacaaactgatgctttcgtgttggcggagagacaccaagaacagaccttcattccaagagatccatctcctattacttcagcagggggacgaatag

SEQ ID NO: 220936 - DNA, 2568 bp, synthetic construct
  misc_feature 1..2568: note = Description of Artificial Sequence: Synthetic coding sequence
  source 1..2568: mol_type = other DNA
atgattctgattcctaggatgcttctcgttctcttcttgttactgccgatactgtccagcgctaaagcccaagttaaccctgccatctgtaggtatcctctgggcatgtctggcggtcagatcccggacgaagacattactgcttctagccagtggagcgagtcgaccgcggcaaaatacggccgtttagatagtgaagagggagatggcgcatggtgtcctgagatacctgtcgaaccagacgaccttaaggaattcctgcaaattgacctgcatactctacactttatcacgttagtagggacccagggcagacacgcaggcggacatgggatagaattcgcacctatgtacaaaatcaactatagcagggatggaacacgctggatctcctggagaaatcggcatggcaaacaggtgcttgacggaaacagtaatccttacgatatatttcttaaggacctggagcctcctatcgtagcgagatttgtgagattcataccggtcacggatcatagtatgaatgtgtgcatgcgggtggagctgtatggatgcgtgtggctcgatggattagtgagctacaacgcacccgctgggcagcagtttgtgttgcccggtggaagtataatttacctgaacgactctgtgtacgatggagctgtgggatactctatgaccgagggacttggacaattgactgacggggtctcagggctcgacgatttcacgcagactcacgagtaccatgtgtggccgggttatgactatgtcggttggaggaacgagtcggctactaatggctacatcgagatcatgtttgagtttgaccggatacggaactttacaacaatgaaagtgcattgcaacaacatgtttgccaaaggcgtaaaaatctttaaggaggtccaatgctattttaggtccgaggctagcgagtgggagccaaacgcaatttcgttccccctggtcctggacgatgtcaacccctcagctaggtttgtgaccgtcccattgcaccaccgtatggcatccgcaattaaatgtcagtatcacttcgccgacacttggatgatgttcagcgaaattaccttccaaagtgatgccgcaatgtacaataactctgaggctcttcctacaagccctatggcacccactacatacgacccaatgctcaaggttgacgatagtaacaccaggattctgattggatgcctggtcgccattattttcatcctgctcgccataatcgtaatcatcttgtggagacagttctggcagaagatgctggaaaaggcttcccggagaatgcttgacgatgagatgactgtctctctcagtctgcctagtgattccagtatgttcaataacaatcgttcctcctccccaagcgaacaaggatctaactccacctacgatcgaatcttccccttgaggcctgattatcaggaaccttccaggctgatccgcaagctacctgagtttgctcccggtgaggaagagagtggttgctccggggtggtgaaacccgtccagccttccggaccagagggagttccacactacgccgaggccgacatcgttaaccttcagggcgttactggtggcaatacttactctgtccctgccgtcaccatggacttgctgagcgggaaggatgtggctgtcgaggaatttcctcggaagctcctgacatttaaggagaagctgggagaagggcaatttggagaggtccacctttgcgaggtggaaggcatggaaaaattcaaagataaggatttcgctttggacgtgtcagcaaaccagcctgtgctggtggctgtaaaaatgctcagggctgatgccaataagaacgcccgaaacgattttctaaaagagataaaaatcatgtctcgactaaaagatccgaatatcatccaccttttggctgtgtgcattacagacgatcccctttgcatgattactgagtatatggagaatggggatctgaatcagttcctttctcggcacgagccacccaacagctcctcctctgatgtcagaacagtctcttatacaaatctgaaattcatggctacccagatcgcttctggaatgaagtacctgagttcactgaatttcgtccaccgggatctggctactagaaattgcctggttgggaagaattatactataaaaatcgccgactttggcatgtcacgaaatttatactctggcgattactacaggattcagggtcgagcagttctaccaataaggtggatgtcatgggagtctatcctgctgggaaaatttacaacagcttccgatgtctgggcctttggtgtgactttgtgggagacctttactttctgtcaggagcagccatattcccagctttcagatgaacaggtcattgaaaatacgggggaattcttccgcgaccaggggaggcagacatacctgcctcaacctgctatttgtcccgactccgtctataagctgatgttgagctgctggcgcagggatacaaagaatagacctagtttccaagagatccacttgctgctactgcagcaaggtgatgagtag

SEQ ID NO: 220937 - DNA, 447 bp, synthetic construct
  misc_feature 1..447: note = Description of Artificial Sequence: Synthetic coding sequence
  source 1..447: mol_type = other DNA
atgattttgatcccgagaatgttgttggtgctgtttctgctgctcccaatattgtcctctgccaaggcccaggtcaatcctgctatttgtcgatatcctctaggtatgagcggtgggcagatccctgacgaagatatcacagcatcctcccaatggagtgagtctacggccgcaaagtacggcagattggattccgaagaaggggacggagcttggtgcccagagatccccgttgagcccgacgacttgaaggagttcctgcagattgacctccacacactgcacttcattaccctggtcggaacccagggacggcatgccggtggacatggcatagagttcgcacccatgtataagataaattactcccgggacggtactagatggatctcctggcggaatcgacatggcaagcaggtactggacgggaattccaacccttactag

SEQ ID NO: 220938 - DNA, 516 bp, synthetic construct
  misc_feature 1..516: note = Description of Artificial Sequence: Synthetic coding sequence
  source 1..516: mol_type = other DNA
tgaatcttcatcctactggccatcattgttatcatcctgtggaggcaattctggcagaagatgctcgagaaagcttctcgtagaatgcttgacgatgagatgaccgtgagcctgtcactccctagtgactcatctatgtttaataataaccggtcttctagcccatccgagcagggatcgaactccacttacgatagaatcttccctttaagaccggactaccaggagccctcgagactgatcagaaagttgccggagttcgccccaggcgaggaggagtctggctgctcaggagtggtaaagccagtccaaccttcgggacctgagggagtgccccactacgcagaggccgatatcgtgaaccttcagggtgttactggtgggaatacatactctgtgccggcagtaaccatggacctcctgtccgggaaggatgtagccgtggaggaatttcctcgcaaactgttgacattcaaagaaaagttgggtgagggccaatttggagaagtgtcctag

SEQ ID NO: 220939 - DNA, 393 bp, synthetic construct
  misc_feature 1..393: note = Description of Artificial Sequence: Synthetic coding sequence
  source 1..393: mol_type = other DNA
atgattctcatcccccgaatgttgctagtactgttcctccttttgcccatcctctcttctgccaaggcccaggttaatcctgccatctgccgataccctctgggaatgagcggaggccagattccagacgaggatatcaccgcaagcagtcagtggtcagagtcaacagcggctaagtatggccgacttgactccgaagaaggtgacggggcatggtgtcccgaaattccagtggaacctgatgatcttaaggagttcctgcagatcgacttacacacattgcacttcatcacgctagtcggtactcagggcaggcacgctggtggacatggcatcgaattcgctcctatgtataagatcaactactcacgggacgggacccgatggatttag

SEQ ID NO: 220940 - DNA, 501 bp, synthetic construct
  misc_feature 1..501: note = Description of Artificial Sequence: Synthetic coding sequence
  source 1..501: mol_type = other DNA
ctcaaagtggatgattctaatacacggattctaattggttgtctggtagccattattttcatcttgctcgctatcatcgtgatcattctgtggaggcaattctggcagaagatgctggagaaggcctcccggcgaatgctggacgacgagatgacagtgtctctttccctcccttctgactcctctatgtttaataataataggagctcttctccctcagagcaaggatctaattcaacctacgatcgcatattcccacttcgccctgactaccaggagcccagtagactaattagaaagctgcccgaatttgcacccggagaggaggagtctggcgaagatgacgtagttggacgcgtttccagagagaaacctcagcaggcgagcggcaggtacgacacccccgctccgtcttcgctgcacctattcttggtcagcgcaaatcttctgcggtccccccactcgctctcccggttcgggttgcccctcctcctcgcctag

SEQ ID NO: 220941 - DNA, 447 bp, synthetic construct
  misc_feature 1..447: note = Description of Artificial Sequence: Synthetic coding sequence
  source 1..447: mol_type = other DNA
atgatactcattcctcgcatgcttttggtcctgttcctcctgctacccatccttagtagcgccaaggctcaagtcaatccagccatttgcaggtatccactgggcatgtctggtggccagatcccagatgaggatattacagcatcaagccagtggagcgagagcactgcggctaaatacggacgactggacagtgaagaaggcgatggcgcttggtgcccagagatccccgtggaaccagatgacctaaaggagttccttcaaattgatctgcacaccctgcatttcattactttagttgggacccaggggaggcacgccggtggacacggcattgagtttgcacccatgtacaagattaactacagccgcgacggaaccagatggatctcatggaggaaccgccatggaaagcaggttctagacgggaatagcaatccctattag

SEQ ID NO: 220942 - DNA, 2403 bp, synthetic construct
  misc_feature 1..2403: note = Description of Artificial Sequence: Synthetic coding sequence
  source 1..2403: mol_type = other DNA
atgaactacatattcgggaacaacacactgctgtacagtcgcggttcacggggtggtaacacgtcttcctcccatggctccgccggacctaaacaaaaacactgggcaaaaaaggggagttctgatgagctccaagccgaacctgagcccagtcgctggcaacagattgtcgccttctttactcgcagacattcatttattgactgcattagcgttgccacatccagcacacaggctaatccaccccctgtgttggtgaacactgattccctggaaacccctacatatgtgaatggtactgacgccgattatgaatacgaggagatcacgctcgagagggggaatagtgggctcgggtttagcatcgctggcggtactgacaatccgcatattggagacgactcctccatctttataaccaagattattacaggaggggctgctgcccaagacggtcgactgcgggtcaatgactgtatcttacgcgtgaacgaagttgatgtgcgcgatgtcacccactcaaaggccgtcgaagccttaaaagaagctggtagcatcgtgcgcctctatgttaaacgacgaaagccagtgagcgagaagatcatggagatcaaactgattaaggggccaaaaggcctcggattcagcattgctggtggtgtgggtaaccagcacatccccggagacaatagcatctacgttaccaaaatcatcgagggcggtgctgcccacaaagacggtaaactgcagatcggtgacaaattactggctgtaaacaatgtttgcctggaggaagtgacccatgaggaagcagttaccgctctgaagaacacaagcgatttcgtgtatctcaaagtcgcaaaaccgacaagcatgtatatgaatgatggatacgcccctccggacattaccaattcttccagccagccggttgataaccatgtgtcgccctctagctttctcggccaaactcccgcatccccagcaagatacagccctgtaagtaaggctgtgttgggtgatgatgagatcaccagagaacctaggaaggtggttcttcacagaggttctacaggactggggttcaacatagttggcggagaggacggcgagggaatcttcatttccttcattttggccggtggacccgcagatttgtctggtgagttgcgcaagggtgacaggataatctccgtgaattcagtcgacttgagagcggcatcccacgaacaggcagccgcagctttgaagaacgcagggcaggccgtgactattgtggctcaatacaggccagaggaatattccagattcgaggcaaaaattcatgacctgagagaacagatgatgaattcctcaatctccagcgggtccggatctctgcggaccagccagaaacgttcgctttacgtcagggccctttttgactatgacaagactaaggattccggactgccgagccagggcctgaacttcaagttcggtgacattctgcatgtgattaacgccagtgacgacgaatggtggcaggcccgacaggtgacccccgatggcgagtctgacgaggtgggggtcatacccagcaaacgtcgggtcgaaaaaaaggaacgagctagactcaagacagtcaagttcaatagcaagactagagacaagggtgagatccctgacgatatgggctctaaaggtttaaagcatgtcacatccaacgcgtcagacagcgagagttcttacttgatcctgatcacagacgagtacggctgttccaaaggtgggcaagaagagtacgtcctaagctatgagcctgttaaccaacaggaagtgaactacactcggcctgtcattatcctagggccaatgaaggacaggatcaatgatgacctgatctcagaattccccgacaaattcggatcctgcgttccccatacgacaaggccaaaaagggattatgaagtggatggcagagattatcacttcgtgacgtctcgcgagcagatggaaaaagacattcaggaacacaaattcattgaagccggtcagtataataatcacctctacggcacgtcagtacagtctgttcgggaggtggccgaaaaagggaagcattgcatcctcgatgtcagcggaaacgcgatcaagagactgcagatagctcagctctatcccattagcatcttcatcaagcccaagtcgatggaaaatattatggaaatgaataaaaggctcaccgaagagcaagccaggaagacctttgaacgcgcaatgaaactggaacaggagttcactgaacactttactgcaatagtacagggagacaccctggaagacatctataatcaggtgaaacaaataattgaggagcaatcgggctcctatatttgggtccccgcaaaagagaaactctag

SEQ ID NO: 220943 - DNA, 2367 bp, synthetic construct
  misc_feature 1..2367: note = Description of Artificial Sequence: Synthetic coding sequence
  source 1..2367: mol_type = other DNA
atgaattatatattcggaaacaatactctgctgtactctcggggatctagaggcggtaacactagttcctctcatgggagtgccggtccaaaacagaagcactgggccaaaaaaggaagttcagatgagttgcaggccgagccagagcctagtcgctggcaacagattgtcgcctttttcaccaggcgacactcattcatcgattgtatcagcgtggcaacatctagcactcaagctaatcctcctcccgtattggtgaacacagactctttggaaaccccaacttacgtgaacggcaccgatgccgactatgagtacgaagaaataacacttgaaagagggaattcaggtcttggcttctcgatcgccggtgggacagataacccccacattggagacgattccagtatatttattacaaaaatcattaccggcggagctgccgcacaggatgggagacttcgagtcaacgattgtatccttcgggtgaacgaagttgacgtccgcgacgtgacacatagtaaggcagttgaggccctgaaggaggccggatcaatagtgcggctctacgtaaagaggaggaagcccgtgtcagaaaaaatcatggaaattaaactgatcaaaggtcccaagggcctgggcttcagtatcgcgggtggagtcggaaatcaacatatccccggagataactcaatatatgtcaccaaaatcatcgaaggtggtgctgcacacaaagacggcaaactgcagatcggcgataagctcctcgccgtgaacaatgtgtgtttggaggaggtgacccacgaagaagcagtaaccgctctcaagaatacatcggatttcgtgtaccttaaagtcgccaaacctacatcaatgtacatgaacgacggatacgcccctccagatattaccaattcctccagtcaacccgttgacaaccacgtgagtcccagctcgttcctgggacagacccccgcaagccctgctcgctactcacctgtatctaaggccgttttaggtgacgatgagatcacacgggagccacggaaggttgtgctccaccggggttccaccgggcttgggtttaatatagtgggaggagaggatggtgagggaatcttcatctccttcatccttgcagggggaccggcagacctgagtggagaactgcgcaagggcgatcggatcatcagcgttaactctgtggatttaagggcggcttctcatgagcaggcggcagctgcactcaagaatgccggacaagcggtgactattgtggcacagtaccggccagaggagtactctcgattcgaggcgaagatccatgaccttcgggaacagatgatgaatagttccatctccagcgggagtggatctttgagaacttctcagaaacgatccctgtacgttagagctctgttcgattatgataagacaaaggattcaggactcccaagtcagggcctgaactttaagtttggtgacattctgcacgtgattaacgcctctgacgacgagtggtggcaggctcgccaagtaaccccggatggtgagagtgacgaggtgggagtgatcccctcaaaacggagagtggaaaaaaaggagcgcgcacggctcaaaaccgtgaaatttaacagtaagacacgcgacaaaggcgagattccggatgacatggggagtaaggggctgaagcacgtgaccagcaacgcttccgactccgaaagcagctatagaggccaggaggagtatgtgctgtcttacgaacccgtaaaccaacaagaggtgaattatacacgcccagttatcatcctggggccaatgaaagatagaatcaacgacgatttgattagcgaattcccagataagttcggcagttgcgtaccacataccacacgaccaaagagggactatgaggtcgatggacgtgactatcacttcgtcacctctagggagcaaatggaaaaagacatccaggagcacaagtttatcgaagcaggtcaatataacaatcatctctacggtacttctgtgcaaagcgttagggaggtcgctgaaaaggggaagcactgcatcctggacgttagcggtaatgccataaagagactgcaaatcgctcagttgtatccaattagcattttcatcaagcccaaatccatggaaaatattatggaaatgaacaagcgtctaaccgaagagcaagctcggaaaacctttgagcgcgctatgaagttagaacaggagttcacagaacacttcactgcaattgttcagggtgatacgctggaggatatatataatcaggtgaagcagattatcgaagaacaatccggctcttatatctgggtgccggctaaggagaagctgtag

SEQ ID NO: 220944 - DNA, 1539 bp, synthetic construct
  misc_feature 1..1539: note = Description of Artificial Sequence: Synthetic coding sequence
  source 1..1539: mol_type = other DNA
atggaaagagccaggaaattttccggcagtggactggcaatgggtcttgggtcagcttcggcatcagcttggcggagggcctctcagcggtgggcctggcctctcaggagtcttcgacctggcggtgacgctcgtgagcctcgcaagatcattctgcacaaggggagcacaggtctgggcttcaatattgttggaggtgaagatggcgaaggcatcttcgtgagctttattttggcgggaggtccagccgacctctctggggaactccgcagaggggaccggatcctgagtgtaaatggagtgaacctcaggaacgccacacacgagcaggccgctgccgctctcaagagggccggacagtctgtcactatagtcgctcagtatcgtcccgaggaatatagtagatttgaatctaagatccatgacttaagggagcagatgatgaatagttcgatgtcaagcgggtctggctccctgcgaacctccgaaaagcggagtctatatgtccgtgctttatttgactacgatcggactcgcgatagttgcttgccgtcacaaggcctgagcttttcatacggggacattctacatgtaattaatgcttccgatgacgagtggtggcaggcccgtctagttacaccccatggggaatcagagcagatcggggtgatcccttctaagaagcgggtcgagaaaaaagagcgtgctcggctgaaaacagtcaagttccatgcacgaaccggaatgatcgaatctaacagatcaatcaaaaccaagcggaaaaaatcttttagactctctaggaaattcccgttctacaagagcaaggagaacatggctcaggaatcctcaatccaagaacaaggcgttacttccaatacttcggactccgagagctcttcaaagggacaagaagacgccatcctatcatatgaacctgtgactcggcaggagatccattatgcacgtcctgtgatcattttgggtccaatgaaggacagggtgaatgacgatttaatcagcgaatttccccataaattcggaagctgtgtcccccacaccacgcggcctcgtcgcgacaatgaggtcgacgggcaggattaccacttcgtggtatcaagggaacagatggagaaggatatccaagataataagtttatcgaagccggtcagtttaatgacaatttgtatggcacgagtattcagtccgtgcgcgcagtcgcagagcgtggcaaacattgcattctggatgtgtccggaaatgcaatcaaacgcttgcaacaggcacagctgtacccaatcgccattttcataaagccaaagagtattgaggccctgatggagatgaatcggagacagacctatgaacaggccaacaaaatttatgacaaggccatgaagctcgagcaggagtttggtgagtacttcaccgccatcgtgcagggcgactccctcgaagagatttataataagatcaaacagatcattgaagaccagtccggacattatatttgggttccttcaccagagaaattatag

SEQ ID NO: 220945 - DNA, 3021 bp, synthetic construct
  misc_feature 1..3021: note = Description of Artificial Sequence: Synthetic coding sequence
  source 1..3021: mol_type = other DNA
gaggaggaggccggagacctggtgcagcctggcatctcgttccccggacccgctgaggaggacctggacccccagtactcttggagtccgacccaacattttaatgaggaaaggtacagccccgctccccgaagcatgaagggcctctctgggtctagaacccagcctccactgtgtagcgggcacacctgcgggctcgcaccacccgaggactgcgaacatctccaccacggtccggatgcccgaccaccttatctgctcagtcctgccgatagttgtccgggaggcaggcataggtgcagcccgaggtccagtgtgcatagtgaatgtgtgatgatgcccgttgtgcttggggaccacgtatctagctcaacattccccagaatgcattactcttcacattacgacacccgagatgattgtgctgtggctcatgccggagccaagatcaaccggataccagccaaccttctggaccagtttgagaaacagctgccgttgcaccgtgacggcttccacacgctccagtaccaacgcacttctgcggcagcagaacagcgctctgaaagccccggtaggatccgtcaccttgtgcattctgtgcaaaagctgtttacaaagtcccactcgttagagggttcctctaagagcaatgcaaacggaacaaaagcagacggtagggcagatgaccaccatcacgcacaccatgcaaagcactcaaaacgtagcaaatcaaaagaacggaaaccagagggaaagccgcgtcccggaatgagctcctggtggagttctgacgacaatcttgattctgactcgacttaccggactcccagtgttctgaatcgccatcacctgggaccggtggcccactgctaccccgatgctctccagtctccattcggggatctgtctttaaaaacatcgaagtctaacaatgatgttaagtgctccgcctgcgaggggttagccctgacccccgatgccaaatacttaaagcgaagttcctggtccacacttacagtgtctcaagccaaggaagcctataggaagagcagtcttaacctagacaagcccctgctgcatcaggatgccaaacctgccctccgcccttgtcattacctccaggttccccaagatgagtggggtggttaccccacaggaggtaaagatgaggagattccgtgtcggaggatgaggtccgggtcttatattaaggctatgggcgacgaggaaagcggagagagtgattccagtcccaaaacttcccccaagtctgccattctacccgaacccctcttgaagtccattgggcagcggcctttgggcgaacatcaaacacaaacgtacctacaagcggcatctgatgtgccagtgggccacagtctggatcccgctgctaactataatagcccaaaatttaggagtcggaatcaatcttatatgcgcgcagtttcaacattgtcacaggcatcctgtgtaagccaggtcagcgaggccgaaatcaacggtcagttcgagtctgtctgtgaatccgtgttctccgaggtggaaagtcaggccatggacgccctggacttaccaggatgtttccggacaagaagtcactcctacctccgggctattcaagccggttacagccaggatgatgagtgcatccctatgatgacccccagtgacattacctctaccataagatcaacagccgctgtgagttacaccaattacaagaagacccccccaccagtcccaccaagaaccaccagcaagccgctcatatcagtgacagcacagtccagcactgagagcacacaggacgcctatcaggattccagagctcagagaatgtccccctggccgcaagatagccgcggtctgtacaattccacagacagtctcgattcaaataaagcgatgaacctggccttggagacagccgcagcccagcggcacctgccggagagccagtcctctagcgtgaggacatccgataaggcaattctcgtctcaaaggccgaagaactgttgaaatcacgctgcagctctataggaatccaggtcgagactgccaccgactccgataccgaatctagggggctgagagagtatcacagtgtaggtgttcaggtggaggacgagaagaggcacggtcggtttaagagaagcaacagcgtaacagccgcagtgcaggctgacctggaacttgagggctttccgggacacatcactactgaagacaaagggctccagtttggaagctcctttcaacgccacagcgagccttctactcccactcagtacagcgctgtgcgaacggttcggacgcaaggcctgttctcctaccgggaggattataggactcaggtggacacttcaaccctgccgccacctgacccatggttagagcccgctattgataccgtggagactgggagaatgtctccatgtagacgtgacgggtcctggttcctgaaactactgcatgccgaaacaaagagaatggaggggtggtgtaaagagatggaacgagaagcggaggagaacgacctctccgaggaaatcctaggtaagatcagatctgccgtgggatcggcccagctcctgatgagtcagaagtttcaacagttttactggttatgtcaacaaaatatggatccctctgctatgccccgtccgacatcccaggaccttgctgggtattgggacatgctgcagctgtcaatagaagacgttagcatgaaattcgacgagctccagcggctacggttgaacgattggaaaatgatggagagtcccgaaagaaaagaggagcggaaggttccccctccgattccaaagaaacctccaaaggggaaatttccaatcacgcgcgagaaatcccttgatctgcctgacaggcagcggcaggaggcccgtcgcagactcatggctgcaaagagagcggcttcattccgtcagaactccgcctcagaaagggcagacagcattgagatatatatccccgaagcccagacacggctgtag

SEQ ID NO: 220946 - DNA, 2928 bp, synthetic construct
  misc_feature 1..2928: note = Description of Artificial Sequence: Synthetic coding sequence
  source 1..2928: mol_type = other DNA
atgaaggggctttcaggcagtagaacacagccacctctttgcagcggacacacctgcggactggcaccacctgaagattgcgaacaccttcaccatggtccagacgcgagacctccctatctgctcagccctgccgacagctgcccgggtggtaggcacagatgcagccctagaagtagtgtgcacagtgaatgcgtaatgatgcctgttgtgctgggggaccatgtgtcttcaagcactttcccgagaatgcattactcgtcccactatgatactagagacgattgtgctgtggcacatgccggtgccaaaattaatcgaattcccgctaaccttttggatcaatttgaaaaacagctccccctccatagagacgggtttcacacattacagtaccagagaacttctgccgctgcagaacagaggagcgagagcccgggacgtattaggcacctcgtgcactctgtgcagaagctctttacgaagtctcattccctcgaaggctcttctaagtcaaatgcaaacggtaccaaagccgacggacgggctgacgatcaccatcacgcacaccacgctaagcatagcaaaaggtccaagtccaaggaacgtaagcccgaggggaagcccagacccggtatgtcctcttggtggagttcggatgataatctcgactccgacagtacatatcggaccccatccgtcctgaaccgccatcacctgggcccagtggctcactgctaccctgatgccctgcagtccccctttggcgacctcagcctcaaaacttccaaatccaacaacgatgtgaagtgctcagcctgcgaaggattagcactgacgccagatgctaagtacctgaagaggagctcatggagtacactcacggtgagccaagctaaagaggcctaccgcaaatcatcgttaaatttggataaacccctcttacaccaggacgccaagcctgccctgcgaccctgccattacctgcaagtcccgcaggacgagtgggggggatacccaacaggcggaaaagacgaggaaatcccttgtcgcagaatgcgctccggatcctacattaaagcaatgggcgatgaggagagcggtgagagcgactcaagccctaaaacctctcctaaaagtgccattctgccggaacctctcttgaaaagtataggccagcgccctctcggagagcaccaaacacagacctacctgcaagctgcttccgatgtccccgtggggcattctctcgaccccgctgcaaattacaactcccctaaatttaggtctcgcaaccaaagctacatgagggcggtgtccactctatcccaagcatcttgcgtgtcccaggttagtgaggccgaaataaatgggcagttcgaaagtgtgtgtgaatctgtgttcagcgaggtggagagccaggccatggatgctctggatctccctggctgtttcaggaccagaagccacagttacttacgtgctatccaggccggatactcccaagatgatgaatgcatccctatgatgaccccctctgacatcacctccaccatccggtccacagccgctgtgtcatacacaaattataagaagaccccacccccagtcccccctcgcactacgagcaagcctctgatttccgtgacggctcagtcttccaccgaatccacgcaggatgcgtaccaagacagtcgagcgcagcggatgtcaccatggccgcaggactccagaggcctgtataattccactgattcactggacagtaataaagctatgaacctggctctggaaacggcagcagcccaaaggcacctccccgagagccaatcctcttcagtcaggacttccgataaggcaattcttgtgtccaaagctgaggagctgctgaagtcgcgttgctcttccattggaattcaggactccgagttcccagaacaccaaccctatcccagaagtgatgtagagacagccaccgacagcgataccgagagccggggactcagggagtatcactccgttggggtccaagtcgaggacgagaagagacacggcagatttaagcgttcaaactcggtgacggccgcagtgcaggctgatttagaactcgaggggtttcctggacatattacaactgaggataaaggtctccagttcgggtcctccttccagcgccatagtgagccctcgacacccacacagtactctgcagtgaggacagtgcggactcagggcctgttctcatacagggaggattacaggacccaagttgatacttctacccttccgcctcccgatccatggttggagcccgcaattgacaccgtcgaaaccggacgaatgtccccctgtcgacgggatggaagctggttcttgaagctgcttcacgccgaaacgaaaaggatggaaggatggtgcaaagaaatggagagagaagccgaggaaaacgacctcagtgaagagatcctcggcaagattcggtcggcagtggggtctgcccagctgcttatgtcgcagaagttccagcaattttattggttatgccagcagaacatggacccaagtgctatgccaagaccgacatcgcaggatctcgccggatattgggacatgctgcaactaagcatcgaagacgtgtccatgaagtttgacgagctgcaaaggttgagattgaacgattggaagatgatggaatctcccgagcggaaagaagaaaggaaagtgccgccacccattccaaagaaaccgccaaaggggaaattcccgatcacacgcgaaaaatccctagaccttccagaccgacagcgacaggaggcacgcaggcggctcatggctgccaagagggctgctagcttccgtcagaacagtgctagtgaacgggcagattccatcgagatctatattccagaagctcagacaaggctgtag

SEQ ID NO: 220947 - DNA, 2937 bp, synthetic construct
  misc_feature 1..2937: note = Description of Artificial Sequence: Synthetic coding sequence
  source 1..2937: mol_type = other DNA
tgacccactcaacacttcaacgaagagagatatagtcccgctcctcggagcatgaagggcctgtcaggaagtaggactcagcctccactgtgttcgggccacacttgcggcttggcaccccctgaagactgcgaacacctacatcatgggccagacgccagaccgccatatctgctgtcccccgctgacagctgccccggaggaaggcaccgctgctcccctcggtctagcgttcacagcgagtgcgtgatgatgcctgtggtactcggcgatcatgtaagttcatccaccttcccacggatgcactacagctctcattacgacactagagatgattgtgctgtggcccatgcaggagcaaagataaatcggatccccgcaaacctgcttgaccaatttgagaagcagctaccccttcaccgcgatggctttcacacacttcagtaccagcgtactagcgcggctgccgaacagagatcagagtcacccggtcgaatccgccacctagtccactccgtgcaaaagttgtttacaaaaagccacagtcttgagggatcctccaaatctaacgctaacggcactaaagctgacggccgagcagacgatcatcaccatgctcaccacgccaagcatagcaagcggtcaaaaagtaaagagcgtaagccagagggaaaaccacgccctggtatgagtagctggtggtcatccgacgataacctcgattccgactccacttacagaaccccatccgtcctgaatagacaccacctgggaccagttgcacactgttatccggacgcactacagtcacccttcggagacctctccctgaagacaagcaagtctaacaatgatgtgaagtgctctgcctgtgagggcttagccctcactccagacgcaaagtacctaaaacgaagctcatggagcacccttacagtctctcaggccaaagaggcttaccggaagagtagcctgaacctcgacaagcctcttctgcaccaggacgctaagcccgctctgaggccttgccactatctgcaggtcccacaggatgaatgggggggttatccaactggcggtaaagatgaagagatcccatgtagacgcatgaggtccggatcatatattaaggccatgggagatgaggaatcgggagagagcgattctagccccaaaaccagtcccaaatccgctattctgcccgagcctctgctgaagtcgataggacaaagacccctcggagaacaccagacccagacatacctgcaggcagcgagtgatgtcccagtggggcactcccttgaccctgccgcaaactataactcgcccaagttcagaagccgcaaccagagctacatgcgcgctgtcagtacgttgagccaggcctcgtgcgtctcccaggtgtctgaggctgagatcaacggacagtttgagagcgtctgtgaaagtgtgttttccgaggtggagagtcaggccatggacgccttggatctgcccggttgctttagaaccaggagccactcttacctgcgggctatccaagctggttatagccaagacgatgagtgtatccctatgatgaccccaagcgacattaccagtacgattaggtcgacggctgccgtgtcctacaccaattataagaaaaccccgccacccgtcccaccgagaactacatcaaagcccctaatctctgtcacagcccagagctccaccgaatccacccaggatgcataccaggattcccgtgcccagcggatgtctccgtggccgcaggacagtagaggtctctataactccaccgattccctcgactctaataaagcaatgaacctggccttagaaacagccgctgcccagagacatctcccagaatcacagtctagttctgtccgcacatccgacaaggctattctggtgtcaaaggcagaggagctcctgaagagcagatgttcctccatcgggatccaggtggaaaccgctacagacagcgatacagaaagccggggtttgcgggagtaccattctgtcggagtgcaggtcgaggatgagaaacgccacggcaggttcaagcggtccaattccgttacggctgccgttcaggccgacctcgagctggaaggctttcctggccacatcacaacagaagataagggactacagttcggctcatccttccagaggcactccgagcccagcacacctacccagtacagcgccgtccgcactgtgcgaactcagggcttgttttcctaccgggaagattacagaacacaggtggataccagcacacttccaccccctgacccgtggctggagccagccatagatacggtcgagaccggccgtatgagcccctgcagaagggatggttcttggtttctgaagctactccatgcggagaccaagagaatggagggttggtgcaaggaaatggaacgagaggctgaagagaatgacctgtctgaagaaattttggggaaaatccgaagcgcagttggaagcgctcagttgctaatgtcacagaaatttcaacaattttactggctgtgccagcagaacatggacccgtccgccatgcccaggccgacatcgcaggatctggccggatactgggatatgctgcagctgagcattgaggatgtgagtatgaaatttgacgagctgcagagactgcgactgaatgactggaagatgatggaatctcccgagcgcaaagaggagaggaaggtgccccctcccatccccaaaaagcctccaaagggaaaattccccatcactcgggagaagtccctggatctccccgatagacagcgacaggaggctaggcgcagactcatggcagcaaaacgcgcagcctcttttcgccaaaacagcgcttcagaaagggcggatagcatcgagatctatatcccggaggctcagacaaggctttag

SEQ ID NO: 220948 - DNA, 2562 bp, synthetic construct
  misc_feature 1..2562: note = Description of Artificial Sequence: Synthetic coding sequence
  source 1..2562: mol_type = other DNA
atgccagttcgcaaacaagatacccagagagcgctgcacctgctggaggagtacaggtccaaactgagccagacggaggacaggcagttgagaagctccatagaacgagttataaatatatttcagtcaaacctgttccaggctctcattgatatacaggagttctatgaggtcaccctgctggacaatcctaaatgcattgatcggtccaaaccaagtgaaccgatacagcctgtcaacacttgggaaatatccagcttaccatcatctactgtgaccagcgaaaccctccctagctctctgagcccgagcgtggagaagtacagatatcaggacgaagatactccccctcaagaacatatctcaccgcagattacaaatgaagtgatcgggcctgaactggtgcatgtttctgaaaagaacctttccgaaattgagaacgtgcatggatttgtatcccatagccacatctccccaatcaaagtgaacggcaccgacgccgactatgagtatgaggagattacactggagcgtggtaattctggcttaggcttctccatagcgggtgggaccgacaacccccacatcggtgacgactcctcgatattcatcaccaagattattaccggaggggcagcggctcaagatgggagactcagggtcaacgattgtatcctgcgggtcaatgaagttgatgttagggacgtcacacattctaaagctgtggaagctctgaaagaagccggttccatcgtgagactttacgttaagaggaggaaaccagtgagcgagaaaatcatggaaatcaagttaattaaaggacctaaaggattgggattcagtattgcagggggtgtgggcaatcagcatattcctggagacaacagtatctacgtaactaaaatcatagaaggcggtgctgcgcataaggacggaaagctccagattggcgacaaactgttggcagttaacaatgtatgtctggaggaggtgacccatgaggaggctgttactgccttaaaaaacacttccgactttgtgtatttgaaagtcgcaaagccaacctccatgtatatgaatgatggatatgcgcctccagacatcacaaacagttcttcccaacctgtagacaatcacgtttccccctcatctttcttgggccagacacccgcttcccccgctcgatatagtcctgtctccaaagcagtgctcggagacgacgagataaccagggagccaagaaaggtggtgctccacagaggatccacaggtctggggttcaatattgttggcggagaagatggggagggcatcttcatcagcttcattcttgctggcggtcccgctgatctgtctggggagctgagaaagggcgatcgaattattagtgtgaattctgtggatcttagagctgccagccacgaacaggccgcagcggcactcaagaacgcaggccaggccgtcacaattgttgcccagtacagacccgaagaatactcccgatttgaggcaaagatccacgacctcagggagcagatgatgaatagcagcatttcaagtggctctggtagtcttcggacctctcagaaaagatccctttacgtacgggctctgttcgattacgacaagaccaaggactcagggctgccctcgcaggggctcaattttaaatttggcgatattctgcatgtgattaacgccagtgacgacgaatggtggcaggctaggcaggttactccagatggggagagcgacgaggtcggagtgatcccctcgaaaagaagggtggaaaagaaagaacgggcaaggcttaagacagtgaaattcaattctaagacgagagacaagggagagatccccgatgatatgggtagcaaaggcctgaagcacgtgacttctaatgccagcgattccgagtcgagctaccgaggacaggaagagtacgttttgtcttacgaacccgtgaaccagcaggaggtgaactatacacgccctgtgattatcctgggcccaatgaaggacaggataaatgacgacctaatttccgagttcccggacaagtttggatcctgcgtcccacacactactaggcccaaaagggattacgaagtcgacggacgggattatcattttgtgacatcacgggagcaaatggagaaggacattcaggagcataaatttattgaggcgggtcaatataataatcatttatacggaactagtgtacagtctgtccgtgaagtggctgaaaaaggcaaacattgtatactagatgtgagtggcaacgcgattaagcggttacaaatagcacagctgtatcctataagcatctttataaaaccgaagagcatggagaatatcatggaaatgaacaagcgactgaccgaagaacaggccaggaaaacatttgagcgtgccatgaaactggaacaggagttcaccgaacactttacagccattgtgcagggtgacaccttggaagatatctacaaccaggtcaaacagatcattgaggagcaaagtggcagctacatctgggtgccggcaaaagagaagctgtag

SEQ ID NO: 220949 - DNA, 2781 bp, synthetic construct
  misc_feature 1..2781: note = Description of Artificial Sequence: Synthetic coding sequence
  source 1..2781: mol_type = other DNA
atgcctgttcgtaagcaggacacccagagagccctgcacctgctggaagagtataggtccaaactcagccagacagaggacagacagctcaggagctccatcgagcgagtgattaatatcttccaaagtaatctgttccaggccctaattgatattcaggaattttatgaggtaaccctgctcgacaatcctaaatgcatcgaccgctctaaaccaagtgagccgattcaacctgtgaacacctgggagatctcgtcgctccccagctcaaccgtcacctccgagacactgccaagcagtctgtcgccctctgtagagaagtaccggtatcaggacgaggatacaccaccacaagagcatatttcgccacagatcaccaatgaagtgataggcccagagctggtgcacgtgtccgaaaagaatctatccgaaatagaaaatgttcacggcttcgtgtctcattcgcacatctctcctatcaaacccacggaagcggtccttccaagcccgccaactgtaccagtcatcccagttttacccgtgccggctgagaatacagttatcctccccactataccccaggccaatccacctcccgtcctggtcaacactgatagtctagagaccccgacatatgttaacggcacagatgccgactacgaatatgaagaaattacgttagaaaggggcaattccggactcggattctcaatcgctggcggaacagataaccctcacatcggagacgactcatctatttttattacaaaaatcattaccggcggtgccgctgcccaggatggcaggctacgggtgaatgactgcatactcagggttaacgaggtcgatgtgagagacgtgacccactccaaagccgtggaggcactgaaggaggcaggttcaattgtgaggctgtatgtaaagcggagaaagcccgtctcggagaagatcatggagattaaactgattaaaggccctaagggcctgggcttttcgatagcgggtggtgttgggaatcaacatatccccggtgacaacagcatctatgttacgaagataatcgagggaggcgctgcccataaggacggaaaattgcagattggagacaaattactcgccgtgaacaatgtgtgtttagaggaagtcacacacgaggaagctgtgacagccctgaagaacacttccgactttgtttacctcaaggtggctaagcccaccagtatgtatatgaacgacggatacgcccctccagatataaccaactcttcttctcaacctgtcgacaaccatgtcagtcctagttctttcctggggcagacccctgcatccccggctagatactccccggtatctaaagcggtcctgggcgacgacgaaattaccagagagcctcggaaagtcgtattgcacagaggcagtaccggcctcggattcaacatcgtgggcggtgaggacggggagggcatctttatcagtttcatacttgcaggcggtccggcagatctgagtggagaacttcgaaagggcgaccgaatcatctctgtgaactctgtggatttaagggccgctagtcacgaacaggcagccgcagccctcaagaacgccggacaggcagtgaccatcgtggcacaataccgcccagaggagtattcccgcttcgaagccaaaatacacgatctgagagagcagatgatgaacagtagcatctcaagtggcagcggctccctacgaactagtcagaagcgtagcctgtatgtccgcgctctgttcgattatgacaagaccaaagactcaggcctgccaagtcagggactgaatttcaagtttggtgacatcctgcacgtgattaacgcttcagatgacgaatggtggcaggccaggcaggtgacccctgatggcgagagcgatgaggtcggcgtcattccatccaaaaggcgcgtggagaagaaagaacgagcaaggcttaagacggtaaagtttaattctaaaacgagggacaaagggcagtctttcaatgacaagaggaagaaaaacctgttcagtcggaagtttcctttttataagaataaggatcagagtgaacaggagacctcagatgctgaccaacacgttacttctaacgcgagcgactccgagtccagctataggggccaggaagagtatgtcttgtcatatgaacctgttaatcaacaggaagtgaattatacgcgacctgtgatcattctcggccctatgaaggaccgcatcaacgacgacctgatctccgagttccccgacaagttcggctcttgtgtgccccacaccactagacccaaaagagactacgaagtcgacggtagagactaccatttcgtgacttcgcgcgagcagatggaaaaggatatccaagagcataagttcatcgaagccggacagtacaacaaccacctctatgggacatccgtgcagagcgttagggaagtggccgaaaagggcaagcactgcatcctggacgtaagtgggaacgctatcaagcgactgcagattgcacagctatacccaatctctatctttatcaagcccaagagtatggaaaatatcatggaaatgaacaagagactgactgaggaacaggcccgtaagacattcgaacgtgctatgaagcttgagcaagagttcaccgaacacttcaccgcaattgtgcagggggacacactagaagatatctacaatcaggtgaagcagattatcgaagaacaaagtggctcttacatctgggtgcccgcaaaagaaaagctctag

SEQ ID NO: 220950 - DNA, 2682 bp, synthetic construct
  misc_feature 1..2682: note = Description of Artificial Sequence: Synthetic coding sequence
  source 1..2682: mol_type = other DNA
atgcccgtacggaagcaggacacacagcgggctctacacctcttggaggaataccgctcgaagctgtctcaaacagaggatagacagctgagatcctcaattgaaagggttattaacatcttccagagcaatctgttccaggcgctgatcgatattcaagaattctacgaggttactttgcttgataatcccaaatgtattgacaggagcaagccaagtgaacctatacagcctgtgaacacatgggaaattagcagcctcccgtcgtccactgtaactagtgaaaccctcccaagtagtcttagcccctcagtggagaagtaccgctatcaggacgaagacacccccccacaggagcacatttccccacaaatcaccaatgaagttattggacctgaactcgtccatgtgagcgaaaaaaacctctccgagattgaaaacgttcatggcttcgtcagccatagccacatctcacccatcaaggctaaccctcctcccgtgctggtcaataccgattcactcgaaacgcccacatacgttaacggtaccgatgccgactatgaatacgaggaaattacattggagagaggaaactctggcttaggtttcagcattgccggaggtaccgataatccccacataggtgatgactcctctatctttatcactaagattatcaccggaggtgccgctgcacaagacggcagactgcgagttaacgactgcatactgagagtgaatgaggtggatgtgcgggacgtgacccattccaaggcggtcgaggcgctgaaagaagcaggttctatcgtcagactgtatgtgaaaagaaggaagcctgtttctgagaagattatggagatcaaactgatcaaggggccaaaaggtcttgggtttagcatagcaggcggtgtcggcaaccagcacatccccggagacaattcaatctacgtaactaagatcatcgagggcggtgccgctcacaaggatggcaagttgcagattggagacaagttactggctgtgaataatgtttgcctggaggaggtcacgcacgaagaggcagtcacagccctgaaaaacaccagcgattttgtttatcttaaagttgcaaagcccacaagcatgtatatgaatgatgggtacgccccacctgatatcaccaactctagctcacaacctgtggataaccacgtgagcccatcttcatttttaggtcagacccctgcttcccctgcaaggtactcacccgtgagtaaagccgttctcggagatgatgagatcacccgagagccgaggaaagtcgtgctgcacagaggatcaaccgggctgggatttaacattgtcggtggagaggacggagaaggaatcttcatctccttcattcttgcgggtggaccagccgatctgagtggagagctacgcaagggggaccgaattatctctgttaactctgtcgatctcagagccgcttcacacgaacaggctgctgcagctttgaagaatgcgggtcaggccgttacaatcgttgcccaataccggcctgaagagtacagtcgattcgaggcaaagatccacgacctgagggaacagatgatgaatagcagcatatcctccggctctgggtctcttagaactagccagaaacggtctctctatgtgagggcactgtttgactacgataagaccaaagattcagggctgccaagtcagggactgaatttcaaattcggcgacatcctccacgtgatcaacgctagtgatgatgagtggtggcaagctagacaggtaacccctgatggcgagtctgacgaagtcggagtcattccctcaaagcgtcgggtcgaaaaaaaagaacgtgctcggctgaaaaccgtcaagtttaattccaagacgcgtgataagggtcagagcttcaacgataagcgcaaaaagaacctgttttccaggaagtttcctttctacaagaataaggaccagagcgaacaggaaacctctgatgctgaccagcacgtgactagtaatgccagcgacagtgaatcttcatacaggggccaggaggagtacgttttatcttacgagcctgtgaaccaacaagaggtcaattacaccaggccagtcatcattttagggccaatgaaagatagaatcaatgacgacctaatctctgagttcccagataagtttgggagctgcgtgccccacaccactagaccgaaaagagactatgaggtggacgggagagattaccactttgttactagcagggagcagatggaaaaggatattcaggagcacaaatttattgaggccggtcagtataacaaccacctttacggtacaagcgtgcaatcagttcgcgaggttgccgagaagggaaaacattgcatcctggatgtgtctggcaacgccattaaacggttgcagattgcccagctttaccctatctcaatcttcatcaaaccgaagagtatggaaaatatcatggagatgaataagaggcttacggaggaacaggcacggaagacatttgaacgagctatgaaattagagcaagagttcacagaacactttacagccatcgttcagggagatacattggaggatatttataaccaggtgaagcagatcatcgaggagcagtctggcagttacatctgggtccccgcaaaagaaaagctctag

SEQ ID NO: 220951 - DNA, 2754 bp, synthetic construct
  misc_feature 1..2754: note = Description of Artificial Sequence: Synthetic coding sequence
  source 1..2754: mol_type = other DNA
atgcccgtgcggaagcaggatacacagagagcgctgcacctgcttgaagaatacagatccaaactgagccaaaccgaggatcggcaactgcggtcatccattgaacgtgtcattaatatatttcagtccaatctctttcaggccctaatcgacattcaagaattttatgaagtgactctcctggacaaccctaagtgtatcgacaggagcaaaccctccgaaccgattcaacctgtgaacacttgggagataagctccctgccgtcatcaaccgttacaagcgagaccctgcccagctcacttagtccctccgtcgagaagtacagataccaagatgaggacacccctccgcaggaacacatatcccctcaaataaccaatgaagttatcggccctgagttagtccacgtgtcagaaaaaaacctctccgagattgagaacgtgcatggctttgtctcacacagccacattagtccaattaagccgaccgaggctgtgctgcccagcccaccgactgtgcccgtgattcctgtcctcccagtgcctgcagagaacactgtgatcttgcccactatcccccaggccaatccgccaccagtcttggttaacactgatagcctggagactccaacttatgtgaacggaacggacgccgattacgaatacgaggagataacactagagcgcggaaattccggactgggcttctcaatagcaggcggaacagataatcctcatatcggagacgactctagcatctttataaccaagatcattaccgggggtgcagcggctcaagacgggaggctcagggtcaatgactgtatcctgcgggtcaacgaggtggacgtccgagacgtgactcactcaaaagcggtggaagcgctgaaagaagccggaagtatagtgcggttgtacgtaaagagaagaaaaccagtctccgagaaaatcatggagatcaagcttatcaagggtcccaagggactagggttttccattgccggaggggtagggaaccaacacatccctggcgacaactctatctacgttaccaagatcatcgagggaggtgccgcacataaagatgggaagctacagattggtgataagctcctcgctgtgaataatgtatgcctcgaggaggtcacacacgaagaggcagtcaccgccttgaagaatacttccgattttgtatacttgaaagtggctaagccaacaagcatgtatatgaacgacggttacgcccctcccgacatcacgaactctagcagtcaacccgtggacaatcacgtgtctccgtcatctttcttagggcagacccctgccagtcccgctcgttattcccccgtctcaaaggcagttcttggtgatgacgaaataacgcgagagcctagaaaagtggtactgcatagaggatctaccgggctcggctttaacatcgttggcggagaggacggagagggaattttcatttcatttatactggcgggaggaccagccgatctctccggggaactcaggaagggggacagaatcataagcgtcaatagtgtggacttaagagctgccagccacgagcaggctgccgcagcactcaagaacgcagggcaggcagttaccatcgtcgcccagtatcgccctgaagagtattccagatttgaggccaaaatccatgacttgcgtgaacagatgatgaactcttccatcagtagcggcagtggttctctgcggacaagccagaaaagatctttatacgtgcgtgccctattcgattatgacaagacgaaggattcaggcctgccaagtcaaggactgaatttcaagttcggggacatcctccatgtgatcaatgcctcggatgacgagtggtggcaggcccgacaagtgacccctgatggggaatcagatgaggtgggagtgatcccctccaagagaagggttgagaaaaaagagagagcaagattaaagacggtgaagtttaactcaaaaacgcgcgacaagggagagattcccgacgatatgggctctaagggtctgaaacatgtgacaagcaatgcctctgattccgaaagctcttatctaatcctaatcaccgatgagtatggttgctccaagggtcgtggtcaggaagagtacgtgctctcgtacgaaccagtgaaccagcaggaggttaattatactcgacccgtcatcattctgggaccgatgaaggatcgaatcaatgacgaccttatctctgaatttcctgataagtttgggtcctgcgtgcctcacaccactagacctaagcgggattatgaggtggatggtagagactaccatttcgtgacttctcgtgagcaaatggaaaaggacattcaggagcacaagtttattgaggctggccagtataataatcatctgtatgggacctcagtgcagagcgtgcgggaagtggcagaaaagggcaagcattgcatcttagatgtgtctgggaacgcaatcaagcgccttcagatagcacagctctacccaatatccatatttatcaagcctaaatctatggagaatatcatggagatgaataaaaggttgaccgaggaacaggccaggaaaaccttcgagcgtgctatgaaactcgaacaggaatttactgagcatttcaccgccatcgtacagggggacacactggaagacatttacaatcaagtaaagcaaatcatcgaggaacagtcagggtcttacatctgggtgccagctaaggaaaaactgtag

SEQ ID NO: 220952 - DNA, 2676 bp, synthetic construct
  misc_feature 1..2676: note = Description of Artificial Sequence: Synthetic coding sequence
  source 1..2676: mol_type = other DNA
atgcccgtgagaaaacaggatactcagcgggcactacatctgctggaggaataccgatccaaattgagtcagaccgaggaccggcagctcaggagtagtatcgaacgcgtgataaatatcttccaaagcaacctatttcaggccctgatcgacatccaggaattttacgaggtcaccctcctggataaccctaagtgtattgaccggtccaaaccttccgagccgatacagccggtgaatacatgggagatatcatcattgccaagtagcactgttacctcagaaaccttaccctcgagcctgagcccaagtgttgagaaataccgttatcaggatgaagacacccctccgcaggagcacataagtccccaaatcacgaacgaagtgatcggcccagaattagtgcacgtgtcagagaaaaacctctcggagatagaaaacgtgcatggctttgtttctcattctcacatatctcccatcaaacctactgaagccgtgctgccttcccccccaaccgtgcctgtcattcctgtgctccctgtgccggctgagaacaccgttattctccccacgatccctcaggccaacccaccacctgttctggtcaataccgatagcctcgaaacccccacttatgtgaacgggaccgatgcagactacgaatacgaagaaattacacttgagcgtggaaactccggtcttggttttagtattgctgggggaaccgataacccacacattggggatgattctagcatttttatcaccaaaatcataactggaggggctgccgctcaggacggcaggctgcgcgtgaatgactgcatcctaagggttaatgaggttgacgtgagagatgtcactcactcaaaggccgtcgaggccctaaaagaagccggtagcattgtcagactatacgtcaaacgcagaaaacccgtgtctgaaaaaatcatggagattaaactgatcaagggccctaaaggactcggcttcagcatcgctggaggagtgggaaatcaacacatccctggagacaattccatctacgtaacgaagattattgagggaggcgctgcacacaaggacggtaagctgcaaatcggggacaagctcctggccgtgaataacgtatgtttggaagaggtgacccacgaagaggcggtgactgcactcaagaataccagtgacttcgtgtatctgaaagttgccaagcctaccagcatgtacatgaacgatgggtacgcaccaccagatatcaccaactcaagttctcagccagttgacaaccacgtcagcccgagctccttcttgggacagactcctgcttcccctgcacggtactcgccagtcagtaaggcagtgttaggagacgatgaaatcactcgggagccacgtaaagtggtcctccaccgtggatccactgggcttggctttaacattgtagggggtgaggacggcgaaggaatcttcataagcttcatcctcgcaggcggacccgcagatctgagtggagagctgaggaagggcgaccgaatcatttcagtgaattctgtcgatctcagggctgcctcccatgagcaggccgcagccgctctcaagaacgccggacaagctgttacaattgtcgcacagtataggcctgaagaatattcaagatttgaggctaaaatccacgatctacgggaacagatgatgaattccagcatttcctcaggaagcggatcgctcagaaccagtcagaaaaggtccttgtacgtcagggcacttttcgattacgacaaaacaaaggacagcgggttaccctcacaagggcttaatttcaaattcggtgatatattgcatgtcattaatgcgagcgatgatgaatggtggcaggcgcgtcaggtgactccagatggcgagagtgatgaggtaggcgtgataccatctaagaggagagtggagaaaaaggagagagccaggctgaagaccgtgaagttcaattccaaaacgagggacaagggggagattccagacgacatgggctctaaggggctaattggaggacaggaggagtatgtgctcagttacgagcctgtcaatcagcaggaagttaactatacaagacctgtcattatcctgggcccaatgaaggaccgaatcaatgatgacctcatatccgaatttcccgacaagtttggcagctgcgtgccacatacaacgagacccaaacgagactatgaagttgatgggagagactatcacttcgtcacttctcgcgagcagatggaaaaagacatccaggaacacaaattcatcgaggcaggacagtacaataatcatctctacggcacttcagtccaaagcgttagagaggttgccgagaaagggaagcactgcattctcgacgtgtccgggaatgctataaagaggctgcaaatcgcccaactctatcccatttccatctttatcaaaccaaagtcaatggagaacataatggaaatgaataagagactcaccgaggaacaggcgaggaaaaccttcgaacgagccatgaagttagagcaagaatttactgagcacttcacagctattgtccaaggggatacacttgaagacatctataatcaggtgaagcagattattgaggagcagagcggatcgtacatctgggtcccggctaaggagaagctctag

SEQ ID NO: 220953 - DNA, 627 bp, synthetic construct
  misc_feature 1..627: note = Description of Artificial Sequence: Synthetic coding sequence
  source 1..627: mol_type = other DNA
atgccagtgaggaaacaggatacccagcgcgcattacacttgctcgaagaataccgctcaaaactttcccaaacagaggatcgccaattacgatcttctatcgagcgggtcattaatatattccaaagtaacctgtttcaggcgctcattgacatccaggagttctacgaggtcactttgttggacaacccgaagtgtatcgacaggtccaagccttcagaacccatccagcccgtgaacacctgggaaatatctagcctcccctcatcaactgtcactagcgaaaccctgccgagcagcctgtctccgagcgtagaaaagtaccgctaccaggacgaagatacccccccacaggagcacattagcccacagattactaacgaagtcatcggtccggaacttgtgcacgtgtctgaaaaaaacttaagcgagattgaaaatgtgcacggatttgtcagtcattctcacattagcccaataaagcctaccgaagcagtgctgccatcacctcccacagtgcctgttatccccgtgttgcctgtacccgcagagaatacagttatactccccactattcctcaggcgaaccctcctccagtgctcgtcaataccgactccctcgaatag

SEQ ID NO: 220954 - DNA, 2616 bp, synthetic construct
  misc_feature 1..2616: note = Description of Artificial Sequence: Synthetic coding sequence
  source 1..2616: mol_type = other DNA
atgcctgttcgcaagcaagacacacagagagctctgcatctgcttgaagaatatcgcagcaagctctcgcagactgaagaccggcagctcagatcttccatcgaacgggtcatcaatatcttccaaagcaacctttttcaggctctgatcgacattcaggaattctatgaagtgacactactggacaatccgaaatgtatagaccgcagcaagccttctgagccgatccagcctgtcaatacctgggagataagcagcctgcccagtagcacagtcaccagtgaaaccctgccatcatcccttagccccagtgtcgagaaatataggtatcaagatgaagacaccccccctcaagagcatatcagcccgcagatcacaaacgaagtgatagggccagaactggtacacgtgagtgagaaaaacctcagtgaaatcgaaaacgtacacgggttcgtttcgcacagtcatatctctcccattaaagccaatccgcctccggttttggtaaataccgactccctcgagacacctacgtatgttaatggtaccgatgccgactatgaatacgaagagataactctcgagaggggcaatagtggacttggcttctcaatcgctggcggaaccgataacccgcatatcggcgacgattctagtatctttatcaccaagatcattacagggggtgccgcagcgcaggacgggcgactgagggttaacgactgcatacttagggtgaacgaagtggacgttagagatgtgactcattctaaggcagtcgaagccctcaaagaagcaggctccattgtccggttgtatgtgaagcggaggaagccagtatccgaaaagattatggagatcaagctgatcaagggtcccaagggtctgggtttcagcatagccggaggagtggggaatcagcacattcctggggacaattctatctatgtgaccaaaatcatagagggaggagcagctcataaggatggaaaactgcagattggcgacaaactgctcgcagtaaacaatgtgtgtcttgaagaggtgacccacgaagaggcagtcaccgcattgaaaaacacaagcgatttcgtctatctgaaggtggccaaaccgaccagtatgtacatgaacgacgggtatgcccctccagacataaccaactctagtagccagcccgttgataaccacgtatcaccgtcctcattcctgggtcagacaccagcaagccccgcacgatacagcccagtgtcaaaggctgtcctcggcgatgatgagatcacgagagagcctcgtaaggtggtgctacaccgtggatctacgggcttaggcttcaatatcgtgggaggggaggacggagagggcatattcatcagttttatactggctgggggaccagctgatctgagtggcgaactgagaaaaggagacagaattataagtgtgaattccgtcgatctcagggctgctagccatgagcaggctgcagcagcactcaaaaatgccggacaggcggtgactattgtagctcagtacagacccgaagaatatagtcgctttgaggcaaaaatccacgacctacgggaacaaatgatgaactcctcaatctcttcaggttcagggtctctgaggacttcccaaaagagatctctctacgtcagggcactcttcgattatgacaagactaaggacagtggccttcccagccaggggctgaacttcaagttcggtgatatcctccatgtcattaatgcctctgacgacgagtggtggcaggcgagacaagtcacacccgatggcgagtccgatgaggtgggggtgattccttcaaagcgtcgcgtcgagaagaaagagagggctaggcttaaaactgtcaagtttaacagtaagaccagggacaaaggggagatcccggatgacatgggaagcaaaggcctgaagcatgtgactagtaacgctagcgactccgaatccagctaccgcggacaggaggagtacgtgctgtcttatgaacctgtgaaccaacaggaagtgaactatacccgccctgtcataatcctgggcccaatgaaggataggattaacgatgacctgatatcggagttccccgacaaattcggcagctgtgtaccccacaccacgaggcctaagagagattatgaggtggacggcagggattaccatttcgtcactagcagagaacagatggagaaagatatccaagaacataagtttatagaggccggacagtacaacaatcatttgtatgggacgtctgtacagagcgtgcgggaggtggccgagaaaggaaagcattgcattctggacgtgagcggcaatgctatcaagaggttgcagattgcgcagctgtatcctatttccatctttatcaagccaaagtctatggaaaacatcatggagatgaataagagactcacggaggaacaagcccgtaagacttttgagcgggctatgaagttagagcaagagttcacggagcactttacagccattgttcaaggtgataccctcgaggatatatataatcaggtcaagcaaatcattgaagagcagtctggctcttacatttgggtgcctgccaaagagaaactttag

SEQ ID NO: 220955 - DNA, 321 bp, synthetic construct
  misc_feature 1..321: note = Description of Artificial Sequence: Synthetic coding sequence
  source 1..321: mol_type = other DNA
atgccggtccggaaacaggacacccagcgggcactgcatctgctcgaggaatatagaagtaaacttagtcagacggaagaccgccagctgcggtcgtccattgagcgggtgatcaacatcttccagtctaatttattccaggccctaattgatattcaggaattctacgaggtgaccctgctggataatccaaagtgcatcgaccggagcaaaccatccgaaccaatacaaccagttaacacatgggaaattagttccctgcctagctccaccgttacgtccgaaaccttgccatcttcgctatcaccctccgtggaatag

SEQ ID NO: 220956 - DNA, 1113 bp, synthetic construct
  misc_feature 1..1113: note = Description of Artificial Sequence: Synthetic coding sequence
  source 1..1113: mol_type = other DNA
atgccagtaagaaagcaggatacacagcgcgctctccatctcttggaggagtataggtccaagctgtcccaaactgaggataggcagctgagaagttccatagagagagtgattaacatcttccagtccaacctgttccaggctttgattgacatccaagaattttacgaggtgacattgttggacaatcccaagtgcattgataggagcaaacctagtgagccgattcagcccgtaaacacatgggagatatccagcctcccgtcctctacggtgaccagcgagaccttgccttcctctctgagccctagcgtcgagaaatataggtaccaggatgaggataccccgccacaggagcacatctctccgcagattacaaatgaggtgatcggaccagagctcgtgcatgtgtcagaaaagaaccttagcgaaattgagaacgtacacgggttcgtcagtcattcccatatcagccctataaaagtgaacggcaccgatgcagactacgagtatgaagaaatcactctcgaaagagggaatagtgggttggggttttccattgcaggtggcaccgataacccacacattggggacgactctagcatcttcatcacaaagattatcaccgggggtgcagcagcccaggacggcaggctgagagttaacgattgtattttgcgggtgaatgaagttgacgtcagagatgtgactcacagcaaagccgtggaggccctgaaggaggccggtagtattgtcagactctacgtaaagcgcaggaagcccgtgagcgagaagatcatggaaattaaactcatcaagggacctaagggcctggggttttcaatcgccggaggcgtgggtaaccagcatatccccggagacaacagcatctatgtgacaaagattatcgagggaggggctgcccataaggatggcaagctgcaaatcggagataaattgctcgcggtgaataacgtctgtctcgaagaggtgacccacgaggaggccgtcactgcactcaaaaatacttctgactttgtatacctcaaagtggcgaaacctacttctatgtatatgaatgatggctatgccccaccagacattacaaattag

SEQ ID NO: 220957 - DNA, 2715 bp, synthetic construct
  misc_feature 1..2715: note = Description of Artificial Sequence: Synthetic coding sequence
  source 1..2715: mol_type = other DNA
atgcccgtacggaagcaggacacacagcgggcattacacctgctggaggagtaccgctccaagctttcgcagaccgaggatcggcaattgagaagcagcatcgagagggtgatcaacatttttcaatccaacctgtttcaggctctgatcgacattcaggagttctatgaagtgacactgttggataatcctaagtgcatcgaccggagcaaaccatcggagcccattcagccagtgaacacttgggaaatctcgagcctgccatcgtccacagtgaccagcgagacgttgcctagttcacttagtccatccgtggaaaagtataggtatcaggatgaggatactcctcctcaggagcatatatcacctcagatcaccaacgaggtgattggcccagaactggtccacgtgagcgagaagaaccttagcgagatcgagaatgtccacggctttgtgtcgcattcacatatctctcctatcaagcccaccgaggcagtgttgccaagtcccccaaccgtcccggtaattcctgtcctaccagtcccagctgagaatacggtgatcctgccgaccataccgcaggccaatccgccacctgtcctcgtaaacactgacagtctcgagaccccgacttacgtcaacggcactgatgcggactatgaatatgaggaaattacacttgaacggggaaatagtggcctcggattcagcatagctgggggaacagacaatccgcatataggtgatgactcctctattttcatcaccaagatcattactgggggagcagccgctcaggacggcagactgagggtcaacgactgcatattgcgcgtgaacgaggtcgacgtgagggatgtaacacactccaaagccgtcgaggcactgaaagaggcgggttccatagttcgattgtacgtgaaacggaggaagcccgtctctgaaaaaatcatggaaatcaaactgatcaagggacctaagggactcggcttttccattgccggtggggtgggaaaccagcatatcccaggggataacagcatatatgtgacgaaaataattgagggcggtgctgcgcacaaggatgggaagctgcaaattggagataaacttctcgcagtgaacaatgtgtgtttagaagaggtcacacatgaggaagccgttaccgccctgaaaaacacaagcgacttcgtgtacttgaaagtggctaaacccacgtccatgtatatgaatgatggatacgcccctcccgatatcacgaacagcagtagccagcccgttgataatcatgtgtcccctagctccttcctgggacagacccctgcgtcccctgcaaggtactcccctgtatccaaggcagttttgggcgatgacgaaatcacccgtgaaccaagaaaggtagtgttgcacagaggaagcaccggacttggttttaacattgtcggaggcgaggacggagagggaattttcatttccttcatcttggccggtggcccagcagacctatcgggtgagctgcgaaagggcgaccggatcataagtgtgaatagcgtcgacttaagggccgcatcccacgagcaagcagccgctgcgctcaaaaacgcgggtcaagccgtcaccattgtggcccagtatagaccggaggagtactcgagattcgaagccaaaatccatgacttgagagagcaaatgatgaattcttcgattagtagcggttcggggtccctgcggacaagccagaagcggtcactctacgttcgcgctttgtttgactacgacaagaccaaggatagtggcctgccctcccagggattaaattttaaattcggcgacatcctgcacgtaatcaatgcatctgatgacgaatggtggcaggctcgccaggttacccccgatggcgagtccgacgaggtgggcgtcattccttccaagagacgtgtggagaagaaggagagggcccgtctgaaaaccgtgaaattcaactcgaagactcgggataagggtgagatccccgatgatatggggagtaagggtttgaaacacgtcaccagcaatgcatccgacagtgagtcttcctatagaggacaggaggagtatgttttgtcctatgagcccgtgaaccagcaggaggtgaattatactagacctgttatcattctcggcccaatgaaagatcggattaacgacgatctgatttccgagttccctgataaatttgggtcatgtgttccacacactactcgaccgaaacgtgactacgaggtcgacgggagggattaccactttgtgacttcccgtgagcaaatggaaaaagatatacaggagcacaagttcattgaggcaggacagtacaataaccacctgtacggtacaagcgttcagtccgtgcgggaagtggctgaaaaggggaagcactgcattctggatgtaagtggaaatgcaatcaaaagactccagattgcacagctatacccaattagcattttcattaagcccaaatcgatggaaaatattatggagatgaacaaaaggttgacggaagagcaggcaaggaagacattcgagcgcgctatgaaactggaacaagaattcactgaacatttcacagccatcgttcaaggtgatactctggaagatatttacaatcaggtgaagcagatcatcgaagagcagtctgggagctacatctgggtgccagcgaaggagaagctgtag

SEQ ID NO: 220958 - DNA, 465 bp, synthetic construct
  misc_feature 1..465: note = Description of Artificial Sequence: Synthetic coding sequence
  source 1..465: mol_type = other DNA
atgcccgtgcggaagcaggacacccagcgggctctgcacctcctggaggagtacagatccaaactgagtcaaaccgaggaccggcagctgagaagttcaatcgaacgcgtcatcaatatttttcagtctaacctctttcaggcgctcatagacatccaagaattctacgaggtgaccctgctggataatcccaagtgcatagaccgatctaaaccttcagagcccatacagccagtgaatacatgggagatctcctccctacctagtagcacagtcacatctgagacactcccctcgagcctgagtccttcagtggagaaataccggtatcaggacgaagacacaccacctcaagagcacatatccccacaaatcaccaacgaggtgattgggccagagctggtgcatgtttcagagaaaaacctgtcagaaattgaaaatgtgcatgggttcgtctcacactag

SEQ ID NO: 220959 - DNA, 2562 bp, synthetic construct
  misc_feature 1..2562: note = Description of Artificial Sequence: Synthetic coding sequence
  source 1..2562: mol_type = other DNA
atgcctgtgcgcaaacaggacactcagcgagcactgcacttactggaggaataccggtccaagctctcacaaacagaggatcggcagctccgatcctctatcgagcgggtcataaacattttccagtctaacctattccaggctttaattgacatccaggaattctacgaagtgactctgttggataatccaaagtgcatcgatcgcagtaagccctcagagccaattcagccagtgaatacgtgggaaatatcatccctgcctagtagtaccgttactagtgagacgctgcccagttccctcagtcccagcgtggagaagtatcgttaccaggacgaagatacaccgccacaggagcatatttcaccccagataactaacgaagtcataggaccggaacttgtgcacgttagcgagaagaacctttctgagatcgaaaatgtgcatggctttgtatcgcacagccacatttcccctatcaaagtcaacgggacagacgctgactatgagtatgaggagattacactggaaaggggtaatagtgggctgggattcagcattgcaggaggtaccgacaacccgcacattggggatgactcttctatcttcatcactaaaatcattaccggtggtgccgctgcgcaggatgggagactgcgcgttaacgactgcatcttgagggtaaatgaggtggatgtgagggacgtgactcatagtaaagccgtcgaggcactcaaagaagccggaagcatcgtgcgcctgtatgtgaaacgacgcaagcctgtgtcagaaaaaatcatggaaatcaaactgattaaggggcctaaaggacttggtttcagcatcgccggaggtgttgggaatcagcatatcccgggagataactctatatacgtcaccaaaattatagagggtggagctgcccacaaagacggcaagctgcagatcggggataaactgcttgccgtcaacaacgtttgtttagaggaagtgacgcacgaagaggctgtaactgctctgaaaaacaccagtgactttgtgtacctcaaggtcgccaagcccacttccatgtacatgaatgacggctatgcgcctccggacatcacaaatagctcttctcagcctgtcgacaatcatgtgagcccatctagtttcttgggacagactcctgccagtcccgctcgttattctccggtgagcaaagccgtgctcggtgacgacgagatcacgcgcgaaccacgcaaagtggtgctgcatcgagggtccacggggctggggttcaacatcgtgggtggcgaggatggcgaagggatctttatcagtttcattttagcaggagggcctgccgaccttagtggagaactgagaaaaggggaccgcatcatcagtgtgaactccgtggatctgcgggcagctagccacgagcaggctgccgcagccttaaaaaacgccggtcaggcagttaccatcgttgcccagtacaggccagaggagtactccaggttcgaggctaagatccatgaccttcgtgagcaaatgatgaattcctccatttcttcgggcagtgggtctcttcgcacatctcagaagcgttccctctacgtccgggcactgttcgactatgataaaactaaggatagcggtctcccaagccaagggctgaacttcaaattcggagacatcctgcacgtgatcaacgcctccgatgatgaatggtggcaggctagacaagtgacacccgacggggagtctgatgaggtcggagtgatccccagcaagaggcgggtcgaaaagaaggaacgtgctcggctgaagaccgttaaatttaattccaagacacgggataaaggcgaaattccagacgacatgggttccaaaggtctaaaacatgtgacctccaacgccagcgattctgaatcatcttacagaggacaggaggaatacgtcctctcgtatgaacccgtgaaccaacaggaagtgaattacacccggccagttattatacttggcccaatgaaggatcggatcaacgacgatctcatatccgagtttccagataagttcggctcctgcgtaccacataccacccgccctaaacgggattatgaggtggacggccgagactatcacttcgtcactagccgagagcagatggagaaggatatccaagaacacaagtttattgaagccggacagtacaacaatcatttgtacggcactagcgtgcagtcagtccgggaggtcgcagagaaaggcaaacactgtatcctggatgtgtccgggaacgccattaaacgactccagattgcccagctgtatcccattagcatctttataaaacccaagtctatggagaacataatggaaatgaataagcgactgaccgaagagcaggccaggaagacctttgagcgcgcaatgaagctggagcaggaatttaccgaacactttactgctatcgtgcagggcgacacactggaggacatttataaccaggtgaagcagatcatcgaggagcagtctgggtcatacatctgggtgcccgcaaaggagaagctgtag

SEQ ID NO: 220960 - DNA, 111 bp, synthetic construct
  misc_feature 1..111: note = Description of Artificial Sequence: Synthetic coding sequence
  source 1..111: mol_type = other DNA
atgccagtgcggaagcaggacacccaacgtgccttacatctattggaggagtataggtccaaactcagccagactgaagaccgtcagctaagaagcagtattgagcggtag

SEQ ID NO: 220961 - DNA, 372 bp, synthetic construct
  misc_feature 1..372: note = Description of Artificial Sequence: Synthetic coding sequence
  source 1..372: mol_type = other DNA
atgcccgttcgtaagcaggacacccaacgggcactacatctactggaagagtaccgttcgaagttgtcccagactgaggaccggcagttgaggagctccatcgaacgggtgattaacatctttcagtctaacctgtttcaagcccttatcgacatccaggagttctacgaggttactctcctcgataatccgaaatgcatcgacaggtctaaaccttcagaacccatacaacctgtgaatacttgggagattagctccctgccctcttcaacggtcaccagcgagacgctcccaagttcactttccccaagcgtagagaagtaccgttatcaagatgaggacaccccaccccaggagcacatatccccttag

SEQ ID NO: 220962 - DNA, 2715 bp, synthetic construct
  misc_feature 1..2715: note = Description of Artificial Sequence: Synthetic coding sequence
  source 1..2715: mol_type = other DNA
atgcccgtgagaaaacaggatacgcagagggccctgcatttactggaagagtacaggtctaagctatcccagacagaggaccgacaactaagatcatcaatagaacgcgtcataaatattttccagagcaacttatttcaggccctgattgatatccaggagttctatgaagtcaccctcctggataaccctaagtgcattgatcggagtaagccctctgaaccgatacaacctgttaatacttgggagatcagttcactccctagttccacagttacttccgagactctaccatcttccttgagccctagcgtagagaaatacagataccaggatgaggatactcctccacaggaacacattagccctcagataactaacgaggttatcggacccgagctggtgcacgtgtccgaaaaaaatctaagcgagattgagaacgtgcacggatttgtgtcacacagccacataagcccaatcaaacccacggaggctgtcctcccatcgcctcctacagtgcccgtaatacctgtgttgccagtgccggctgaaaatacggttattttgcccacaatcccccaagccaaccctccccctgttttggtgaatactgattcgcttgagactccaacctatgtgaacgggacggatgctgactatgagtatgaagaaattactctggaaagaggaaacagcggactgggcttttcaattgctggcggtacagataacccgcacatcggagacgactcaagcatcttcatcactaaaatcattacaggcggagccgcagcacaggatgggaggctccgcgtgaatgattgcatcctgagagtcaacgaagtcgatgtgagggacgttacccacagcaaggcggttgaagcccttaaagaggccggatccatcgtgcgactctatgtcaagagacgaaagccggtgagcgagaagatcatggagatcaaactgattaaagggccaaaaggcctggggttttcaatcgccggtggagtaggtaatcagcatatcccaggcgacaatagtatctatgtgacgaaaatcatcgaaggaggcgctgcgcacaaggatggaaagctgcaaatcggtgacaagctgttggccgtaaataacgtgtgcctggaagaagttactcacgaagaggccgtgaccgccctgaaaaataccagtgactttgtctacctgaaagtggcaaaacctacatctatgtatatgaacgatggctacgctccaccagatatcacgaacagcagctcacaacccgtcgataatcatgtgtccccctcatctttcttggggcagacacccgcttcccccgctcgctatagccccgtgagcaaggcagtcttgggggacgatgaaataaccagggagccgaggaaagtggtgcttcatcgcggaagcaccggccttggatttaatattgtggggggagaggatggagaaggaattttcattagctttatcctggccggtggacctgctgatctttcaggagaattgcggaagggcgataggatcatcagcgtcaacagtgttgacctcagggcagcgtcacacgagcaggcagccgcagccttgaaaaacgccggtcaggctgtcaccatcgtcgcccagtacaggcctgaggagtattcacgattcgaggctaagatacacgacttgcgggagcagatgatgaactcctccatcagtagtggcagcgggtctttgcgtacctcacagaagcgcagtctctatgtgcgcgcactgttcgactatgacaaaactaaggactcgggcttgccctcccaaggactgaactttaaattcggcgatattctgcatgtaataaacgcctccgatgatgagtggtggcaggcacgccaggtcacgccagacggtgaatccgatgaagttggcgtgatcccctcaaagaggcgcgtggaaaaaaaggaacgggctagactgaaaacagtcaaatttaattctaagaccagggataagggcgaaatccccgatgacatgggctctaagggcctgaaacacgtaactagtaatgcgtctgattccgaatcatcataccggggtcaggaagagtacgtattatcatatgagccagtcaaccaacaggaagtgaactatacccgacctgtcattattctcgggcctatgaaggataggattaatgatgatctgatctctgagttccctgataagtttggaagttgcgtccctcacaccactagaccgaagagagattatgaggtcgatgggagggactaccacttcgtaacatctagggagcaaatggaaaaagatattcaggagcacaagttcatcgaagctgggcagtataataaccacttgtacggaacgagcgtgcaaagcgttagagaagtggcagagaaggggaaacactgtatacttgacgttagcggcaatgcaatcaagcggttacagatcgctcagttatatccaatttccatcttcattaaacctaaatctatggagaacataatggagatgaacaaaagactcacggaagagcaggctaggaagacctttgaacgggctatgaaacttgagcaagaattcaccgagcatttcacagcaattgtgcagggggacaccctggaggacatttacaaccaagtcaagcagataatagaggagcaaagtggctcctacatctgggttccggctaaggagaaactgtag

SEQ ID NO: 220963 - DNA, 2682 bp, synthetic construct
  misc_feature 1..2682: note = Description of Artificial Sequence: Synthetic coding sequence
  source 1..2682: mol_type = other DNA
atgcccgtgcgaaagcaggacacccagagggccctgcatctgctggaagaatatcgaagtaaattgagccagacggaagataggcaattgcgaagctccatagaacgagtaatcaatatcttccagtccaatttgtttcaggccctcatcgatattcaggagttctatgaagtcactctcttggacaatccgaagtgcattgataggtctaaaccatctgagccaattcagcccgtgaatacttgggagatttcatccctaccctctagcactgtcacatcagaaactttaccaagcagcttgagtcctagcgttgagaagtaccgttaccaggacgaggatactcctccgcaagagcatataagcccgcaaatcaccaacgaagtgattgggccagagttggtgcatgtgtctgagaagaacctgtccgaaatcgagaacgtgcatggatttgtgtctcatagccacatctctccaattaaagcgaaccccccaccagtgcttgttaataccgactcacttgaaactccaacctacgtgaatggtacagatgcggactacgagtatgaagagataaccctcgagagaggtaatagtgggttgggattcagcatcgccggaggcacagataacccacacatcggagacgactcttctatctttatcacgaaaatcataacaggaggagccgcagctcaggacggaaggctgcgggtgaatgactgtattttgagggtaaatgaggtggacgtgagagatgtcacacactcgaaagctgtggaggctcttaaagaggctggcagtatcgtgcgcctgtacgtgaagcggaggaaacctgtgagtgagaagattatggaaattaagttaattaaaggaccaaaggggctcggattttcaatcgctgggggtgtggggaatcagcacattcctggcgacaattcaatttatgtgaccaagatcatcgaggggggagcagcccacaaagatggaaagcttcaaatcggcgacaagttactggccgtcaacaacgtttgtctggaggaagtgacccacgaagaagcagtcacagccctcaaaaataccagcgactttgtttacctgaaggtagcgaagcccacctccatgtatatgaacgatgggtatgcgcctccggacatcacaaatagtagctctcagcctgtggacaaccacgtctcaccctcctctttcttaggacagaccccagccagcccagcgaggtactctccagtatctaaggccgtgttgggtgacgatgagattacacgggagcctcgaaaagtggtgctgcataggggctccaccggactcggttttaatattgttgggggagaggacggagagggcattttcatctccttcatccttgccggaggtccagcggacttgtcaggagagttgagaaagggggaccgcatcattagtgtgaattcagtggatctgcgcgctgcctcccacgagcaggcagccgcagctctcaagaacgccggacaggccgttaccatcgtagcccagtaccggccagaggagtactcacgctttgaggctaagattcacgacctgcgcgagcaaatgatgaattccagcatttctagcggctctggatctctgcgtactagtcagaaaagaagcctgtacgtcagggccctgtttgattatgacaaaactaaagactctgggctgccaagccaggggctgaactttaagtttggagatatactgcatgtgatcaacgctagtgacgacgaatggtggcaggcacggcaggttacacccgacggtgagagcgacgaggttggggtgatccccagcaaacggagagtggaaaagaaggagcgggctaggctcaagaccgtaaaatttaacagcaagaccagggataaagggcaatcattcaacgataaaagaaaaaagaacctcttttcccggaagttccctttttacaaaaacaaggaccagtccgaacaggagacctccgatgccgatcagcacgtcacatccaacgcctccgacagcgagtctagctacagaggccaggaggaatatgtcctgagttacgaacccgtaaaccaacaagaggtcaattacactcgtcccgttatcatcttgggcccaatgaaggacagaatcaacgacgacctgatcagtgaattccccgataaatttggtagttgtgtaccacacaccactcgccctaagagggactacgaggtagatggccgagattaccacttcgtgacgagtcgtgagcagatggagaaagacatccaagagcataaattcatcgaagcagggcagtataataaccacctttacggaaccagtgtccagtccgtgagggaagtcgctgaaaaaggaaagcactgtattctagacgtgagcggaaatgcaatcaaacggctccagatagcccaactctacccaattagcatattcatcaaacccaaatccatggagaacatcatggaaatgaataagcgtctgaccgaggaacaggcacgcaagactttcgaaagagcaatgaaactagaacaagaattcactgaacattttacggcgattgtccaaggagacaccctcgaagatatatacaaccaagtgaaacagatcattgaggagcagagcggttcatacatctgggttcctgccaaggagaaactctag

SEQ ID NO: 220964 - DNA, 2730 bp, synthetic construct
  misc_feature 1..2730: note = Description of Artificial Sequence: Synthetic coding sequence
  source 1..2730: mol_type = other DNA
atgaatgcctacctgaccaagcagcactcctgctcacgaggctctgatggaatggatgcagtccgaagtgcacccactctaattcgtgatgctcattgcgcttgcggctggcagcgtaattgtcaaggcctcggatattcttctcagaccatgccttcttcggggcctggtggacctgccagtaatcgcacaggaggctcctcattcaacagaaccctgtgggactctgttcggaaatctccccacaagacgtccaccaaggggaaagggacctgcggtgaacattgcacctgtccacatggttggttctcacctgcacaggcttctcctgcccctatcattgttaatacagataccctggataccattccttatgtgaatggaacagaaattgaatatgaatttgaggaaatcacccttgaacgtggaaatagtggccttggattttcgattgccggaggcactgacaatcctcatatcggagatgatcctggtatctttataacaaagatcatacccggaggagccgcagccgaagacggcagactacgtgttaacgattgtattctgagagtcaacgaagtcgatgtctcagaagtctcccatagcaaggccgtcgaggctctgaaggaagccggatccattgtccggctctacgtgaggagacggagaccaattctggagacggtggtggagatcaagctgttcaaaggtcctaaggggctcggctttagcatcgccggaggagtgggaaaccaacacattccaggcgacaattccatctacgtaaccaaaatcatcgatgggggtgcagcccagaaagacggacggctgcaggtgggcgacagactactcatggtcaataattactctctggaagaggtgacccacgaagaagccgttgctatcctcaaaaatacttccgaggtcgtatatctgaaggtcggaaaacctaccaccatttatatgacggatccttatggtcctcctgatatcacacattcttattcgcccccaatggagaaccatttgctcagcggaaataacgggaccctggaatataagactagcctcccacctatctcgcccggaagatattcccccatccctaaacacatgctcgtggatgatgattacactcggccacccgaacctgtttattctactgtgaacaagttatgcgataagcccgctagtcccagacattacagtcctgtagaatgcgacaagagctttcttttaagcgctccttacagccactaccaccttggcttgctgccggattctgagatgaccagtcacagtcagcattctaccgcaacgaggcaaccctcaatgacgctgcagcgcgctgtgtcactggagggagagcccagaaaggtggtgctccacaagggctctactgggcttggctttaatatcgtggggggtgaggacggcgaggggatatttgttagctttatcctggcaggagggccagctgacctgagcggcgagctccagagaggtgatcagatactctccgtcaatggtatcgacctccggggagcttcacatgaacaggcagcggcagcccttaaaggcgctggccagactgtgaccatcatcgcacagtaccagcccgaggattacgccagatttgaggcaaagatccacgacttgagggaacagatgatgaaccacagcatgtcctctggttctggttccctgaggactaatcagaagcgaagcctttacgtgagagcaatgtttgattatgacaaatcaaaggattccggcctcccgtctcaagggctgtctttcaaatacggagatattctgcacgtgattaatgcgtctgacgatgagtggtggcaggctagaagggtcatgcttgaaggtgattcagaagagatgggggtgatacccagcaaaagacgcgtggagcgaaaagagcgcgctcggttgaaaaccgtgaagttcaatgccaagcctggcgttatcgacagtaaaggaagctttaatgacaaaaggaagaagtctttcatcttctcccgcaagtttccattttataagaataaggagcagtctgaacaggagactagcgacccagagcgtggacaagaggacttgatcctatcttatgaacccgtaaccagacaggaaatcaattatacccgtcctgtaataatccttggtcctatgaaagatcgaatcaatgatgacctgatcagcgaattccctgacaagttcggttcttgcgtgccacatacaacaagaccaaagcgcgattacgaagtggacggtcgcgactaccattttgtgattagtcgggagcaaatggagaaagatattcaggaacacaaatttatcgaggcgggacagtataatgacaatttgtatggtacctctgtccagtctgttagattcgtagccgaacggggaaaacattgtattttggacgtgagtggcaatgctatcaagagacttcaagttgcacaactctaccctatcgccatttttattaagcccaggagcctggaacccctgatggagatgaacaaaaggttgactgaggagcaggcgaaaaagacatatgatcgggcaatcaagctcgagcaggaattcggtgagtattttacagcaatcgtgcagggtgacactctcgaagatatctataaccagtgtaaactagtcattgaagaacaaagtggaccctttatctggattccgtcaaaggagaaactatag

SEQ ID NO: 220965 - DNA, 2376 bp, synthetic construct
  misc_feature 1..2376: note = Description of Artificial Sequence: Synthetic coding sequence
  source 1..2376: mol_type = other DNA
atgcagcacgcctttattcccgcttctcctgcccctatcattgttaatactgatacactggacaccatcccatacgtcaacgggacagaaatcgaatatgagtttgaagagattacattggagcggggaaactctggcctgggattttcaattgcaggcggaaccgataaccctcacatcggggacgaccctggcatttttatcacaaagatcatccctggtggcgctgccgctgaggacgggcgtctgagagtgaacgactgcattcttagggtgaatgaggttgatgtctccgaagtgagccacagtaaagcagtggaggcactcaaggaggctggctccatagttaggctgtacgtgagaaggcggaggcctattttggagacagtcgtggagattaagctctttaaaggcccaaagggcttgggattctcaattgccggtggcgtgggcaatcagcatatcccaggtgataattcaatttacgttactaaaatcatcgatggtggagccgctcaaaaagacggacgactgcaggtcggcgatcggctactgatggtaaataactactccttagaggaagtcacccacgaagaggcggtcgccatccttaagaatacctccgaagtggtgtacttaaaggtgggcaagccaacgaccatctatatgactgatccatacgggccaccagacattacacactcctacagtccgccaatggagaaccatttgttatcgggtaataacggtacactggaatacaagactagtcttccccctatcagccccggtcgatactctcctattcccaagcatatgttggtagacgacgactatactaggccgcctgagccagtgtattccaccgtgaataaattgtgtgacaaaccagcttctcccagacattactctcctgtggaatgcgataagtcgttcctgctcagcgctccttacagccactaccacctgggactgttaccagattccgagatgacaagccactctcagcattccaccgccaccaggcagccatcaatgactctgcaaagggcggtaagcctcgaaggagagcctcgaaaggtcgtgctgcacaaaggctccaccggattggggtttaatatcgtcggaggggaggacggcgaaggtatttttgtgagtttcattcttgccggtggacccgctgacctctcgggggagttgcagcggggagaccaaattttgagcgtaaacgggattgatctacggggagcctcccacgagcaagcagcggcagcactaaaaggcgctggtcagaccgttacgatcattgcccaataccaaccagaggattacgctcgattcgaagctaagatacatgatctgcgcgagcagatgatgaaccatagcatgtcttcaggaagcggtagtctgcgaactaatcaaaagaggagtctttatgtgcgggcaatgttcgactatgacaaaagcaaggatagtggattaccaagtcagggacttagcttcaaatacggcgacatattgcacgtgattaacgctagtgacgatgagtggtggcaggcaagacgtgtcatgctggagggagacagcgaggagatgggagtaatcccttcgaaaaggagggtagagcgaaaagaaagagcccgacttaagacagtgaagttcaacgccaagcctggagtgattgacagcaaaggtgatatccccggactaggcgatgacgggtatggcaccaaaaccctcagaggccaggaggatctcattctttcgtacgagccggtgactcggcaggaaattaattatactaggccagtgattatcctgggtccaatgaaagatcggattaacgatgacctgatctctgagttcccggataagttcgggtcatgcgtcccccatacaaccagacccaagcgcgactacgaagtcgacggcagagactatcactttgtgatatcacgggagcagatggagaaagacatccaggaacacaagttcattgaggctggccagtataacgataacttgtacggtacatccgtgcagtccgtgcgcttcgtcgccgagcgcggaaaacattgcatcctggacgtttctgggaacgccatcaagcgtctgcaagttgcccagttgtatcccatagcgatcttcattaagcccagatctctagagcccctgatggaaatgaacaaacgcctcactgaagaacaggcaaaaaagacatacgaccgcgctattaaattagagcaagaattcggcgaatacttcacagccatcgtgcaaggggatacccttgaggatatttacaatcagtgcaaactcgttatcgaggaacagagtggtccctttatctggattccctccaaagagaagctatag

SEQ ID NO: 220966 - DNA, 2928 bp, synthetic construct
  misc_feature 1..2928: note = Description of Artificial Sequence: Synthetic coding sequence
  source 1..2928: mol_type = other DNA
atgggtatctttaagagctcactctttcaggccttgctcgacatccaggagttctacgaggtcacactactgaacagccagaaaagctgtgagcagaagatcgaggaggccaaccaggtcctccaaaagtgggagaagacttctctgcttgccccttgtcacgataggttgcaaaagtcgagtgaactgaccgattgtagcggatcgaaagagaatgccagctgcattgagcagaacaaagagaatcaaagctttgagaacgagacggacgaaacaactacacagaatcaagggagatgtcctgctcagaattgctccgtggaggcacccgcttggatgccggtccaccactgcaccaagtatcggtatcaggatgaagacgctccacacgatcatagtctcccccgacttacccatgaagttagaggtcccgaactcgtgcacgtaagtgagaagaacctcagccagattgaaaacgtacacggctatgtcctgcaatcccatatatccccattgaaggcatccccagccccaattattgtgaacacagacacactagacactattccatacgtgaatggaaccgaaatcgagtacgagttcgaggagattacgctggaaagggggaactccggtctaggatttagcatagccggaggtacggacaacccacatattggtgacgaccccggtatctttatcactaagattattcccggaggtgccgctgccgaggatggcagattgcgtgtgaacgactgcatcctgagagttaacgaggtggacgtctctgaggtatcacactctaaggcggtggaggctttgaaggaggcgggtagcatagtcaggctctatgtgaggagaaggcggccaatcctggaaacagtggtcgaaataaagctttttaagggcccaaaaggattgggcttttctatcgccggaggtgtgggcaaccagcatatccccggtgacaatagtatctatgtcactaaaataatcgatgggggagcagcacaaaaagacgggagactacaggtcggcgatagattactgatggtcaacaattatagccttgaagaggtgactcatgaggaggcggtggcaatcctaaagaacacctccgaggtagtgtacctcaaggtcgggaagccaaccactatttatatgaccgatccctacggaccacccgacatcacgcatagttactcccctccgatggagaatcacctcctttcaggcaataacggcacactggagtacaagacctcactgccacccatatcgcccggtcggtattccccaatccctaaacacatgctagtggatgacgattacactcgccctcccgaacctgtctatagcactgtgaataaattgtgcgataaacccgctagccccaggcactatagtcccgtggagtgtgataagagttttcttctatccgccccatattcccactaccacctcggcctcttgccagactctgaaatgacctctcactctcagcactctaccgccacaaggcagccgagtatgactctccagagagcagttagtctcgaaggtgagccaagaaaggtggttcttcacaaaggctctacaggcttggggttcaatattgtgggaggggaggacggcgagggaattttcgtgagcttcattctagccggaggaccggctgatctgagtggcgagctccagagaggtgatcagatcctgtctgtcaacggaatcgacctccgcggtgccagtcatgagcaggctgccgctgcactaaagggtgccggacagaccgtgactataattgcccagtaccagcccgaagattacgcaagatttgaagcaaagatacacgatttacgagaacagatgatgaatcactccatgtcaagcggatcagggtcccttcgtaccaatcagaaaagatccctctacgtgagggccatgtttgattacgacaaaagtaaagattcgggccttcctagtcagggcctttctttcaaatatggcgacattttacatgtcattaacgctagcgacgatgagtggtggcaggccagacgcgtcatgctcgagggggattcggaggaaatgggcgtcatcccctcaaaaaggcgcgttgagcggaaagaaagagctcgactcaaaacagtcaagtttaacgcgaaacctggagtgatcgattctaagggtagttttaacgacaagcgaaagaagagcttcatttttagtagaaagttccccttctacaagaacaaagagcaaagcgagcaagagaccagcgaccctgaacggggacaggaagacctaatccttagctacgagcctgtgacacgtcaagagattaactacacccggcctgtgattattctgggcccaatgaaggaccgtatcaatgatgacttgatcagcgagttccctgataagtttggatcctgcgtgccacataccactagacctaagagggattatgaggtagacggcagggattatcacttcgtcatctcgagagagcagatggagaaggatattcaggagcacaaatttatcgaagccggacagtataatgacaacctgtacggcacatctgtgcaatctgtgcgcttcgtggctgagcgtggcaaacattgtatcctcgacgtgtccgggaacgccatcaaacgcctacaggtggcacaactgtaccccattgctatttttataaagccgaggtctctggaacccctgatggagatgaataaacgcctcaccgaggaacaggccaagaagacctatgatagagccatcaaactggaacaagagtttggcgagtactttactgccatcgttcagggcgataccctagaggatatctataaccagtgtaagctagttatcgaagagcagtctggtccgtttatctggattccatctaaagaaaaactttag

SEQ ID NO: 220967 - DNA, 1005 bp, synthetic construct
  misc_feature 1..1005: note = Description of Artificial Sequence: Synthetic coding sequence
  source 1..1005: mol_type = other DNA
atgatgaaccattcaatgtccagcgggtcaggaagtttgaggactaaccaaaagcgcagtctctatgtgagagcaatgttcgactacgacaaatccaaggactccggcctcccaagtcagggcctgagttttaagtatggtgacatactgcacgtcataaatgcttccgatgatgagtggtggcaagctcggagggtaatgctggaaggtgactcagaagagatgggggtcataccctccaagagaagggtagagagaaaagagcgtgcaagactgaagacggtgaaatttaacgctaaacctggcgtaattgactccaagggggatattcccggtctcggtgacgatggctacggcaccaaaaccctgaggggacaggaggatctgatcctgagctatgagcccgtgacccgacaagagattaattacaccagacctgtcatcatattgggcccaatgaaggacagaattaatgatgacttaatcagtgaatttccagacaagttcggatcttgtgtgccacacacaactcgccctaagagggactacgaggtagacggaagagactaccactttgtcatctccagggaacaaatggagaaagatatccaggagcacaagttcatcgaagccggacagtacaacgataatctctacggaacgagcgtgcagtccgtgagattcgtggccgagagaggaaagcactgcatactcgacgtgtctggcaatgccattaaacggttgcaggtggctcaattgtaccctattgctatattcatcaaacccagaagtctggagcctctgatggagatgaataaaagactcacggaggagcaagctaagaagacttacgaccgcgctattaagctcgagcaggagttcggggagtatttcacggctattgtgcaaggagatactttagaggacatatataatcagtgcaagttagtgattgaagaacagagtggaccattcatctggataccatctaaagaaaagctctag

SEQ ID NO: 220968 - DNA, 2613 bp, synthetic construct
  misc_feature 1..2613: note = Description of Artificial Sequence: Synthetic coding sequence
  source 1..2613: mol_type = other DNA
atgtttttcgcatgctattgcgccctccgcaccaacgtcaaaaagtacagataccaggatgaagatgcaccccatgaccatagcctccctagactcacccatgaggtcagaggacccgagctggtgcacgtatctgagaaaaacctcagccagattgaaaatgtacacggatacgtcctgcagtcacacattagcccattgaaggcatctccagcccctataatcgtgaacaccgacaccctagacacaatcccctacgtgaatggcacagagatcgagtacgagttcgaagaaataacgctcgaacgaggaaatagcgggttgggcttctctatcgccggtggaaccgacaacccgcacataggtgatgaccctgggatttttataaccaagatcattcctgggggtgcagcagctgaagacggcagactgagggtcaacgactgtatcctccgggtcaatgaagttgatgtaagcgaagttagccacagcaaggctgtggaggcgctgaaggaggctggcagcattgttcggctgtacgtgaggaggagacgaccaatcctggagacagtcgttgaaatcaagctgttcaagggaccgaagggcctcggcttcagcattgctggcggagtggggaatcagcacatccctggcgacaatagcatctatgtgactaagataattgatgggggtgccgctcagaaggacggacggcttcaagtcggcgatagactgctgatggttaataattatagtttagaagaggtcactcacgaggaggctgtagctattctcaaaaatacgtcagaggtagtatacctgaaggtggggaaacctactactatctacatgaccgacccttacggccctccagatattacccacagttatagcccacccatggagaaccacctgctaagcggtaataatggaactctggagtacaagaccagtctgccaccgatctctcccggtcgctactcgccgatccccaaacacatgttagtggacgacgactacactcggccacccgaacccgtgtatagcaccgtaaacaaattgtgtgataagcctgcctctcctaggcattattcaccagtggagtgcgacaagagttttcttctctccgcaccatattctcactaccaccttggccttttgccagattcagagatgactagccacagccagcactccactgcaacacgccagccttctatgactctgcagagagcagtcagtctggagggggaaccccgtaaagtggtattacataagggctcaactgggcttggattcaacatagtgggtggggaggacggtgaaggtatctttgtcagttttatcttggctgggggaccagcggaccttagtggcgagttgcagagaggcgatcagatcctgtccgtgaacggtatagaccttcgaggtgctagtcatgaacaggcagccgcagccctaaagggcgcagggcagaccgtcaccatcatagcacagtatcagcccgaagactacgcgcgatttgaagctaagatccacgatctgagagagcagatgatgaatcactcgatgagctccggctccggcagcctgcgcaccaatcagaaaaggtccctatacgttcgggctatgttcgactatgacaaatcaaaagatagcggcctgccatcccaaggcctctcattcaaatacggggatatcctgcatgttatcaacgccagcgatgacgagtggtggcaggctcggcgagtgatgttggaaggagattctgaggaaatgggcgtgatcccctccaagcgccgtgtggaaagaaaggaaagagcaaggctgaagacggtaaagtttaatgcgaaacctggcgtcatcgacagtaaggggtcctttaatgacaagcgaaaaaagtccttcattttttctcgcaaattccccttttataaaaacaaagagcagtccgaacaggagacctctgatcccgaaaggggacaggaggatttgatactaagctatgagcccgtgactagacaggaaatcaactacacaagacctgttatcatactgggcccaatgaaagaccggattaatgacgatctgatttcagagttccctgataagtttggatcctgtgttcctcacaccacgcgaccaaagagagactatgaggtggacgggagggactaccactttgtgatcagtcgggagcagatggaaaaggacatccaagagcacaaattcatcgaggctggccagtacaatgacaacttgtacggcaccagcgtgcaatccgttcgattcgttgcagagcggggtaaacattgcattctggacgtgagtggtaacgctatcaaaaggcttcaggtagctcaactgtaccctatcgcgatctttattaagccgagatcgttggagccgctcatggagatgaataaaaggctcactgaggaacaggccaaaaagacctatgatcgcgctattaaacttgaacaggagtttggggaatacttcaccgctatcgtgcagggcgataccctcgaagacatttataaccaatgtaagctggtgatagaggaacaatcaggccctttcatttggatcccctctaaggagaagctgtag

SEQ ID NO: 220969 - DNA, 1047 bp, synthetic construct
  misc_feature 1..1047: note = Description of Artificial Sequence: Synthetic coding sequence
  source 1..1047: mol_type = other DNA
atgatgaatcactctatgagctccgggagtggctccctccggaccaatcaaaaacggtccctgtatgttagagcgatgtttgattacgataagagtaaggacagtggattgcccagtcaaggcctgagcttcaagtacggggatatccttcatgtgatcaatgccagcgacgacgagtggtggcaggctaggagagtgatgctcgaaggcgatagcgaggaaatgggcgttatcccctccaaacgtcgcgtcgagaggaaggaaagggcacgcctcaagacagtgaagttcaatgcaaaacccggagtcatcgattctaagggcgatattcctggcttaggagacgacggctacggcacgaagactctgaaacacgttagctccaacgcgagcgactcagagtccagctatcggggtcaggaggatctgatcttaagctacgagcccgtgactcgtcaggaaatcaattatacacgcccagtcatcattttgggtcctatgaaggataggattaatgacgatctgatttcagagttccccgataagtttggtagctgcgtcccacacaccaccagacctaaacgagattatgaagttgacggacgagattatcatttcgtgatcagcagggagcagatggaaaaagacattcaagaacacaaattcatcgaggctgggcagtataatgacaacctgtacggcacgtctgtgcagtccgtccggttcgtggcagaacgcggtaaacattgcatcctcgacgtatctggcaatgctattaaaaggctgcaagtggcccagttgtatccaatcgcgattttcataaaacccagatcactggaaccactgatggaaatgaataagcggctgactgaggagcaggcgaagaaaacctacgatagggctataaaactcgaacaggagtttggtgaatacttcaccgccatcgtgcagggcgatacgctggaagatatctacaatcagtgtaaacttgtgattgaggagcagtctggcccttttatttggatccctagtaaagagaagttatag

SEQ ID NO: 220970 - DNA, 2250 bp, synthetic construct
  misc_feature 1..2250: note = Description of Artificial Sequence: Synthetic coding sequence
  source 1..2250: mol_type = other DNA
atgcagaggccgagcgtgagccgggctgagaattaccagctcctatgggacacaattgcaagcctgaagcagtgcgagcaggccatgcagcacgcttttattcccgtgaacggcactgaaattgaatacgagtttgaagaaatcacactggaacggggaaacagtggcttggggttctccatcgctggaggcacagacaacccacatattggggacgatcctggaatctttatcacaaagatcattcctggaggggcagctgcagaagacggaaggctgcgggtgaatgactgcattctgagggttaatgaggtggacgtctctgaagtgagccacagcaaggcggtagaggccttaaaggaggctgggtctattgtgagactatacgttcgaagacggcgacctatcctggaaacagtggtcgagattaagctttttaaaggccctaagggcctaggcttttccatcgccggaggcgtcggaaatcaacatattcccggagataattctatttacgtcacgaagataattgacggcggtgcggctcaaaaggatggcaggctgcaagtcggggatcgcctccttatggtgaacaattactccttagaagaggtaacacacgaggaagccgtggccatattgaaaaacacatctgaagtggtgtatctcaaggtaggaaagccaacaactatttacatgactgatccttacgggccacccgatatcacccacagttattcacctccgatggagaaccatcttttgagcggtaataacggcacactcgagtataagacaagcttgccgccaatctcccccggtagatacagtccgataccgaagcacatgctggtggatgacgactacacctcccactcccaacattccaccgccactagacagccatccatgacactgcagagggctgttagtctggagggtgagcctaggaaggtggtcttacacaaggggtcaacagggctgggattcaacattgtgggaggagaggacggggaggggatattcgtctccttcatcctggctgggggaccagctgacctgtcaggcgaactgcaacggggagatcagattctttctgtcaacgggattgacctgagaggtgcctcccatgaacaggcggctgccgctttaaaaggggcaggccaaactgttacgatcattgctcaataccagccagaagattacgccaggttcgaggctaagattcatgatctacgggagcagatgatgaaccacagtatgagctcaggctctgggtccctgcgcacaaaccagaagaggtcactgtacgtgagagcgatgttcgactacgataagagtaaggactctgggctcccctcccagggactgagcttcaaatacggcgacattttacatgtcatcaatgcctcagacgatgagtggtggcaagctcggagagttatgctcgagggagatagcgaagagatgggggtcattccgtcgaaaagacgcgtggagcgcaaagagagggccagactgaaaacggtcaaattcaatgctaagccgggtgtgatcgactccaaaggcgatattcccggactgggagatgacgggtatggtacaaaaactctccgtggccaagaggatctgatcctatcctatgagcccgtgacccgacaggaaatcaattacacgcgccctgtgatcatactgggtcccatgaaggatcggatcaatgatgacctaatttcggagtttcctgataagttcgggagttgcgttccccatactacccggccaaagagagattatgaagtcgatgggagggattatcactttgtgatcagccgagaacagatggaaaaggacattcaagagcacaaatttatcgaagcaggacaatataatgataatctctacggcacttctgtgcaatctgtgcgcttcgttgccgaaagaggtaagcactgtatcctggacgtgagtgggaacgctattaaacgacttcaggtcgcccagctctatccaatcgcgattttcatcaagccaaggagcctggaaccattaatggagatgaacaagcggcttaccgaggagcaagcgaaaaagacctatgaccgagccatcaaactcgaacaggagtttggagagtattttaccgccatagtgcaaggagacacgctggaagatatctacaaccaatgtaagctggtcatcgaggaacagagtggaccattcatttggattccctccaaagaaaagctatag

SEQ ID NO: 220971 - DNA, 1005 bp, synthetic construct
  misc_feature 1..1005: note = Description of Artificial Sequence: Synthetic coding sequence
  source 1..1005: mol_type = other DNA
atgatgaatcacagcatgagttctggaagcggctccttacgaactaaccagaagaggtctttatacgtaagagccatgttcgattatgataaaagtaaggatagcgggcttccctcgcagggtctgtcgttcaaatatggcgacatccttcatgtcatcaatgcctcagatgacgagtggtggcaggcacggagagtgatgctggagggggattccgaagagatgggtgtgatccccagtaagcggagagtggagcggaaggagagagcaaggctaaagactgtcaaatttaacgccaagcctggagtcatcgactccaaaggggatattcccggactaggggacgatggctatggaacaaagacattgcgcggacaggaagatctcatcctaagttacgagcctgtgactagacaagaaataaattatacccgaccagtgataatcctcgggccaatgaaggacagaataaatgacgatttgatatccgaattccctgataaatttggctcctgtgtgccccacacgacaagacccaaaagggattacgaggtggatggcagggattatcacttcgtgatctcgcgggaacagatggaaaaggacatccaagagcataaattcatagaggcagggcaatataatgataacctgtacggcacctccgtgcaatccgtgaggttcgtggccgaacggggtaagcactgcattttagatgtaagtgggaatgcaatcaagaggctgcaggttgctcagttgtatcccattgcaatctttatcaagcctcgaagcctggaacctctgatggaaatgaataagcgactgacggaggagcaggcaaaaaaaacatacgaccgcgcaattaagttggagcaggagttcggggaatattttacggctattgtccaaggggatactttagaagacatctacaatcagtgcaagcttgtgatcgaggagcaatccgggccatttatctggattccttccaaagagaagttgtag

SEQ ID NO: 220972 - DNA, 2601 bp, synthetic construct
  misc_feature 1..2601: note = Description of Artificial Sequence: Synthetic coding sequence
  source 1..2601: mol_type = other DNA
atgtttttcgcgtgctactgcgccctccgtacgaacgtgaagaagtaccgttatcaggacgaggacgcacctcacgaccattctctcccacgccttactcacgaagtcagaggaccggagctggtacacgtgagcgaaaagaacctgtcccagattgaaaacgtccacgggtatgtcctgcagagccacatttccccactgaaggctagcccggcacccataatagtgaatacggacaccttagacaccattccctatgtcaacgggaccgaaattgaatatgaattcgaagaaatcactctcgaaagaggaaattccgggctgggctttagtatcgccggaggcacggataatccccacattggagacgacccgggaatcttcattacaaagattatacctggtggcgctgccgctgaggacggtcgtctgagggtgaatgactgcattctgcgagtgaacgaagtggacgttagcgaagtgagtcattccaaagccgttgaggcactgaaggaggcaggttctatcgtgaggctatacgtcaggaggaggcgacccattttagagaccgtagtagagatcaaattgtttaagggtcctaaagggctcggcttttccatcgccggaggagtggggaatcagcacatcccgggtgacaatagcatttatgtgactaaaataatcgatggcggtgctgcccagaaagacggcagactgcaggtgggcgaccgcctccttatggtaaataactactccttggaggaggtgacccatgaggaggcagtcgcaattcttaaaaacacatctgaagtggtgtatcttaaggtaggtaagcccacaacaatctatatgacggatccttacggtcctccggatataacgcattcttattcccctcctatggagaatcacttactctcaggaaataatggaactttggagtacaagacttctcttcccccaatctcaccaggaaggtacagtcctatccctaagcacatgttggtagacgacgactatacccggcctcctgaacctgtgtactccacagttaataagctgtgcgataagcccgcttctcctaggcactatagtccagtagagtgtgacaagagcttccttctgagtgctccctactcacactaccacttaggccttttgccagattctgagatgacttctcatagtcagcacagtacagccacccggcagccgtccatgactctgcagagggccgtcagcctggagggagagcctaggaaggtggtcctgcataaaggctccacagggttgggattcaacatagtcggcggagaagatggagagggtatttttgtgtcctttatcctggccggaggtcccgctgacttgtctggtgagcttcagaggggtgaccagatcctaagcgtgaatggcatcgatcttcggggtgcatctcatgaacaggccgcagctgctttgaaaggagccggacagacagttaccattatcgctcagtatcagcctgaagattacgcccgtttcgaagcgaaaatccacgatctgagggaacagatgatgaaccacagtatgagtagcggcagtggaagcctgaggactaaccagaaaagaagtctatatgtacgggcaatgtttgattatgataagagcaaagacagtggccttccttctcagggactttcctttaagtacggagacattctgcacgtcatcaatgctagtgacgacgagtggtggcaggccaggagggtcatgctcgagggagactccgaagaaatgggcgtgatcccaagcaaaaggcgcgtggagagaaaagagcgagcaagactgaaaactgtgaagtttaacgcaaaaccaggcgtaattgactcgaaaggggacatccccggtctaggtgatgatgggtatggcaccaaaacactcaagcacgtatctagcaacgccagtgacagcgagtcaagctaccggggtcaggaggacctcatcttgtcctacgaacctgtgactaggcaggaaatcaactacacaagacctgtcattatcctcgggcctatgaaggaccgaatcaatgatgatctcatctctgaatttcctgataaatttggaagctgcgtgccacacaccacccgccctaaacgcgactatgaggtggacggaagagactaccatttcgtgatctcacgtgaacaaatggagaaggatatccaggagcacaaatttattgaggctgggcagtacaatgacaacctctacggcactagtgtacaatccgtcaggttcgtcgccgagaggggcaaacattgcatactcgacgtctcaggcaacgccattaaacgcctgcaggtagcccaactgtatccaatagctatcttcattaagcccagatcacttgaaccgctgatggagatgaacaagcgactgactgaggagcaagccaagaaaacatacgaccgcgcaattaaactggaacaggaattcggagagtacttcacagctattgtgcagggggacaccctggaggacatatacaatcagtgtaagctcgttattgaagagcagtccgggccatttatctggatacccagcaaagaaaagctgtag

SEQ ID NO: 220973 - DNA, 285 bp, synthetic construct
  misc_feature 1..285: note = Description of Artificial Sequence: Synthetic coding sequence
  source 1..285: mol_type = other DNA
atgatgaatcactccatgagttccggatctggtagtctgcggacaaaccagaagcggtcactctacgtccgagccatgtttgattatgacaaaagtaaagatagcggtctcccctcgcaggggttaagctttaaatatggggacattctccacgtcatcaatgccagtgatgatgagtggtggcaggctagaagggtgatgctggagggggatagcgaagagatgggggtcattccctccaaaagaagggtggaacggaaggagagggcaagacttaagacttag

SEQ ID NO: 220974 - DNA, 2559 bp, synthetic construct
  misc_feature 1..2559: note = Description of Artificial Sequence: Synthetic coding sequence
  source 1..2559: mol_type = other DNA
atgttctttgcttgttactgcgctctcagaacgaacgtgaaaaaataccgataccaggatgaggacgccccacacgaccattcccttccaagactcacccacgaagtaaggggacccgagctggtccacgtgagcgagaaaaatctgtcccagattgaaaacgtccatggatacgttttacagagtcacattagcccgttgaaggcttctccagcgcctatcatcgtcaacactgataccctcgacactattccatatgtcaacggaaccgagattgagtatgagttcgaagagattactcttgagcgcggtaattccggcctaggcttctccatcgccggagggaccgataaccctcatattggtgatgatccaggcatatttattaccaaaatcatccccggtggggcagcagcggaagatggaaggttgcgcgtgaatgattgcatcttgagggttaatgaagtggatgtgtcagaggtgtcccactcaaaggcagtggaggctctgaaagaggctggcagcatcgtgcgcctttatgtgcgacggcgtagaccaattctcgagaccgtagttgaaatcaagctcttcaaggggcctaaggggctgggcttctcaattgccggtggggttggaaaccagcacatccctggcgacaattcaatctatgtcacaaagatcattgacggaggagcagcacagaaggatggacgccttcaggtaggcgatcggctgctcatggttaataattactcacttgaagaagttacacacgaagaggcggtggccatcctgaaaaacactagcgaggtggtatatctcaaagtcggcaaacctacaactatctacatgacagatccatatgggcctcctgacatcacccactcatatagtcctccaatggaaaaccatctcctctccggcaacaatgggaccctcgaatacaaaacctcgcttccccctatctctcccggacgctatagccctattcccaaacacatgctcgtggacgacgactatacccggccacccgagccagtctactctactgttaacaaattgtgtgacaagccggcttcccccaggcactactctccagtggagtgtgataagtcttttctgttgagtgctccatactctcactaccacctgggcctcttacctgacagcgagatgacaagccattcacagcatagtaccgctacacgacagccatcaatgacacttcaacgcgctgtgtctttggagggagagccccgaaaggtggtactgcacaaaggctccactggactaggcttcaacattgtgggcggagaggacggagagggcattttcgtatctttcatcctcgccggaggcccagctgacctgagcggggagctccaacgtggtgaccagattctgtctgtcaacggaatagacctaagaggcgcatctcacgaacaggcggcagccgctctgaaaggagctgggcaaacggtcaccatcatagcacagtaccagcctgaggactatgctagatttgaagccaaaatccatgacctccgagaacagatgatgaatcactctatgtccagtggcagcggctcactgaggacaaaccaaaaaagatccctctacgtgagagctatgttcgactacgacaagagcaaggactccgggctgccatctcaaggactgtccttcaaatatggggacattctccatgtgatcaatgcaagtgatgacgagtggtggcaggcaagaagagtcatgctggagggggatagcgaagagatgggagtgatcccctccaagaggagagtagagcgcaaagagagagccaggctcaaaacagtgaagttcaacgctaaacctggtgtgatcgattcaaaaggagacattcctggtctcggcgacgatggatacggaacgaagacgctgagaggacaggaggatctgatactgagctatgagcccgtgacccgccaggaaatcaattacactagacccgtgataattctcggcccaatgaaagacagaatcaatgacgatcttatatcagagtttccagataagttcgggtcctgcgttcctcacacgaccaggccgaaaagagactacgaggtggatggcagggactaccacttcgtgataagcagagagcaaatggaaaaggacatccaggagcacaaatttatcgaagccggacagtacaacgacaatttatacggaacttccgtccagagtgttagattcgtggccgagcgtgggaagcattgtatcttagacgtttcaggaaacgctataaaacgcctgcaggttgcccaactgtaccctatcgcaatctttataaagccgcgatctcttgaaccgctgatggaaatgaacaagaggctgacagaggagcaggcaaagaagacgtatgacagggccatcaagctagaacaggaatttggggagtacttcacagcaatcgtgcagggcgacactctggaagatatttataaccagtgcaagctcgttatagaagaacagagtgggcctttcatatggatacccagtaaggagaagctgtag

SEQ ID NO: 220975 - DNA, 1863 bp, synthetic construct
  misc_feature 1..1863: note = Description of Artificial Sequence: Synthetic coding sequence
  source 1..1863: mol_type = other DNA
atggtaaacaactattcactggaagaggtcacacatgaggaagccgtcgctatattgaagaatacttccgaagtggtgtatctgaaggttggtaaacccactaccatctatatgactgacccctatggacctcctgacattactcattcctatagtccgcctatggagaaccacctgcttagcggtaacaatggtaccctggagtacaagaccagccttccaccaatttcccctggtagatattcacccatccccaaacacatgctggtcgacgatgactacacacggccacctgagcccgtctattctaccgtgaataaactgtgcgataaacccgcttcaccgcgtcattattcacccgtggagtgcgacaaatcattcctgctatccgccccatattctcattatcacctgggactgttacccgatagcgagatgacctctcacagtcagcactctaccgctactcggcaaccctccatgaccctgcagcgagcagtctccctggagggggagcctcgaaaagtggtcctgcacaaggggtcaacaggcctgggttttaacattgtgggcggagaggacggagaaggcatattcgtctcctttattctggctggagggccagcggatctgagtggagaactgcagagaggggaccaaatcctatctgtaaacggcatcgacctgagaggcgcaagtcatgagcaggccgcagcagccctgaaaggcgctgggcagacggtgactatcatcgctcagtaccagcctgaagactatgccagatttgaggctaagatccatgatctgcgggagcagatgatgaatcactcgatgtcgagtggtagtggctctcttaggaccaatcaaaagcgtagcttgtacgtcagggccatgtttgactatgacaaatctaaggactctggcctcccgtcccagggtctgagtttcaagtatggagacatcttgcatgtgattaacgcctccgacgacgagtggtggcaggcaaggagggtcatgctcgaaggcgactctgaggagatgggcgtcatcccttccaagcgacgcgtggagcgcaaggagcgggcacgtctcaaaaccgtgaagttcaacgcaaaacccggagtgattgatagtaaaggcgatattccgggactgggagacgacggttatggcacaaaaaccttgaagcacgtctcttccaacgcaagtgattctgagtcctcgtaccggggacaagaagacctgatcctgtcctacgaacccgtcactcgccaggagattaattacacccgcccagtgattatcttgggccctatgaaagaccgcattaatgatgatctcatctccgagttcccggataaattcgggtcctgcgtcccacataccactcggcctaaaagggactatgaggtggacgggagggattaccactttgtcatcagcagggagcagatggaaaaggacatccaggaacataaattcatcgaagcaggtcagtacaacgacaatttgtacggcaccagtgtccagtccgtccgctttgttgcggagagggggaagcactgcatcctggacgtgtccggcaacgctatcaaacgactccaggtggctcagctgtatccgattgctattttcatcaagcctcggagcctcgagccactgatggagatgaataagcgattaaccgaggaacaggccaagaaaacttacgatagagccattaaactcgagcaagaatttggcgagtacttcacagctattgtacagggagataccctcgaggacatctataaccagtgcaagctggtgatcgaggagcaatccggacctttcatttggattccctccaaagagaaattatag

SEQ ID NO: 220976 - DNA, 2928 bp, synthetic construct
  misc_feature 1..2928: note = Description of Artificial Sequence: Synthetic coding sequence
  source 1..2928: mol_type = other DNA
atgggcatatttaaatccagcctgttccaagccttactggatatacaagaattttatgaagtaactcttctcaatagccaaaaatcttgtgaacagaaaatcgaggaagctaaccaggtcctgcaaaaatgggaaaaaacctcactgttggccccttgccatgatagacttcagaaatcaagcgaattgacagattgctctgggagtaaagaaaacgccagttgtattgaacagaacaaggaaaatcaatctttcgagaatgagactgacgaaaccaccactcagaatcagggcagatgcccagctcagaactgttcggtcgaggctcctgcatggatgccggtccaccattgcactaaataccgctatcaggacgaggacgctccacacgatcactcattgcctcggcttacgcacgaggtgcgaggcccagagctggtgcacgtgtcagaaaagaacttaagccagatagagaatgtccatgggtatgtcctgcaatcccacatttcgccactgaaagccagccctgctccaatcatcgtcaacactgacactctggacacaatcccatacgtgaacggcacagagatagagtacgagtttgaggagattacactggagcgaggcaatagtggattgggattttctatcgctggaggtactgacaaccctcatatcggggatgatcctgggatcttcatcaccaagatcattcctggcggagcagcggctgaggatggtagacttcgtgtgaatgactgcatcctgcgcgtgaacgaggttgacgtaagtgaggtgtcccactccaaggctgtggaagcactgaaggaggctggaagcatcgtgcggctctacgtgaggcgccgtagacccatcctggagaccgttgtcgagataaaacttttcaaaggtcccaaggggctgggttttagtatcgccggaggagtgggcaatcagcacatccccggagacaattccatctacgtaactaagatcatagacgggggagctgctcagaaggacggaagactccaggtgggggaccgcctcctcatggttaacaactactccctggaagaagtgacacacgaagaagctgtggctattctcaagaatacgtcagaggtagtctacttaaaggttgggaagcccactaccatctacatgaccgacccctacggccctcccgatattactcatagttacagtcctccaatggaaaatcacctgctaagcggaaataacgggacacttgagtacaagaccagccttcccccaatctctccgggacggtatagcccaattcccaaacacatgctcgtggacgacgattacacacgtccgccagagcctgtgtattcaaccgtcaacaagctgtgtgacaagcctgcttctcctcgtcactactcacctgtcgagtgcgacaaaagctttcttctctcagccccttattctcactatcacctgggtttgcttcctgactctgaaatgacttctcacagccagcacagcactgcaacgcgccagccctcgatgacgctccaaagagccgtctccctggaaggggagcctcgaaaagtggttctacacaaaggatctacaggcctcggcttcaatatagtcggcggagaggatggcgaaggcatattcgtctctttcatcctggcaggcggtccggcagatctgagtggagagctccagcgaggtgaccagattctgtctgtcaacgggattgacttacgtggcgcttcccatgaacaggcagccgcagctctcaagggtgctggccagactgtgaccatcattgctcagtatcagcccgaggactacgcccgatttgaagccaaaatccatgacctcagggagcagatgatgaaccacagtatgtcaagcgggagcgggtccctgaggaccaaccaaaaaagatctttgtatgtacgggcaatgttcgattacgacaagagtaaggattcaggattgccaagccagggcctgtcctttaaatatggcgacatacttcatgtgattaatgctagcgacgatgaatggtggcaagcacgcagagtgatgctggaaggcgacagcgaggaaatgggggttatcccctctaagcgccgagtggagcggaaggaacgagcacgcctgaagacagttaaattcaatgccaaaccaggagttattgacagtaaaggatcatttaatgacaagcgcaagaagtcttttatattcagcagaaagtttccattttacaagaataaggaacagtctgagcaggagacttccgatccggaacgaggccaagaggacctgatcctttcatacgaacctgtcaccaggcaggaaattaattataccagaccagtgattatcttggggcctatgaaggatcggatcaatgacgacctgatcagtgagttcccagataagttcgggagttgcgtcccccataccaccagaccaaagcgggactacgaagtggacggacgagattaccacttcgtgatctccagggagcagatggagaaagatattcaggaacataaattcattgaagcagggcagtacaacgataatctgtatggcaccagcgtccaaagcgtcagattcgtcgccgagagaggtaagcactgcattctggacgtgtcgggcaatgcgattaaacggctccaggtggcgcagctgtatcctattgctattttcatcaagcctaggagtctggagcctttgatggaaatgaacaagaggttgaccgaggagcaggccaagaagacatacgatagagccatcaaactggaacaggaatttggagagtattttacagcaatcgtgcagggggacactctcgaagacatctacaatcagtgtaaacttgtgattgaagaacaaagcggtccatttatttggatcccaagtaaggagaaactctag

SEQ ID NO: 220977 - DNA, 2928 bp, synthetic construct
  misc_feature 1..2928: note = Description of Artificial Sequence: Synthetic coding sequence
  source 1..2928: mol_type = other DNA
ttcggctttattgttagtgtgcactttcagtcctatctgaacattcaggagttctatgaagtgactttgctcaattcccagaagtcttgcgagcagaagatagaggaggcgaatcaagtgctacagaagtgggagaaaacatctctacttgccccttgccatgaccgcttacagaagagcagtgagctgaccgactgcagcggctcgaaggaaaacgcatcctgtattgagcagaataaagagaatcagagctttgaaaacgaaaccgatgaaacaaccactcagaatcaggggcgatgccctgcccagaattgttcagtggaggcccctgcatggatgcccgtgcatcactgcacgaagtatcgataccaggatgaggacgcaccccacgatcattccttaccacgtttgacccatgaggtgcgcggaccggaactggtccatgtatctgaaaaaaacctgtcgcagattgagaatgtgcacggctacgtgctgcagtcccacatttcgcccctcaaggcttctcctgctcccatcatcgttaatacagataccttggatacaatcccctatgtaaatggcaccgagatcgaatacgaattcgaggaaatcacactggagcgcggaaactccggtctagggtttagcattgctgggggaaccgacaatccccacataggggacgacccaggcatcttcatcacaaaaatcattccaggcggagccgcagctgaagatggcagattacgcgtaaatgactgcattctgcgcgtcaatgaagtggacgtctccgaagtgtcgcattcaaaagcagtagaggcgcttaaagaagcaggcagcatagtccggctttatgtgcgcaggcggcgaccgatcctggaaacagtcgtcgagatcaaattgttcaaaggccctaaaggcctcggattttctatcgccggaggggtggggaaccagcacattcccggtgacaacagtatttacgtcaccaaaataatagacggcggtgccgctcagaaagacggcaggctacaggtgggagacaggctactgatggtgaacaattattccctcgaagaggtaacacatgaggaagccgtggcaatattgaagaacacaagtgaggtcgtctacctcaaagttggtaagccaaccacaatttatatgaccgatccctacggccctccagatattacgcacagctatagtccaccaatggaaaaccacctgctttcaggtaacaatggcacactcgagtacaagacctctttgccacctatatcccccggtcgatattcgcccatccccaagcacatgctggtggatgacgactatacaagaccacccgagcccgtctattctacagtgaacaagctgtgtgataagccagcctcgcctaggcactatagccctgtggaatgcgataagagtttcctgcttagcgcgccttattcgcactatcacttgggtctgctgcctgattccgagatgacaagtcactcacagcactccacagcaactcggcagcctagcatgaccctgcagcgtgccgtgtcattagaaggagagccacgcaaggtggttttgcataaaggcagcacaggtctggggtttaatatcgtaggtggcgaagacggagagggaattttcgtgtcatttatcctagcgggtggaccagccgatttgtccggagagctgcagcgaggagaccagattttaagcgtgaatgggatcgacctcaggggagcatcccacgagcaagccgctgcagctcttaaaggcgctggccagacggttaccataattgcgcagtatcaaccagaggactacgccaggttcgaggccaagattcacgatctacgggaacagatgatgaaccattctatgagcagcgggtccgggagcttaaggaccaatcagaaacggagcctgtatgtgcgcgcaatgtttgattacgataagtcaaaggattcagggcttccgagccaaggcctgtcctttaaatatggcgacatcctccacgtcattaacgcgtctgatgatgaatggtggcaggctagacgcgtgatgctggaaggggacagtgaagaaatgggcgtgatcccgagtaaaaggagggtggagagaaaagagagggccagactcaagacggtcaaattcaacgcaaagcctggggtgattgatagtaagggaagctttaacgataaaagaaaaaagtccttcattttttctagaaaattcccattttacaaaaacaaggaacagagcgaacaggagacctctgatcccgagaggggacaggaagatttaatcctcagttatgagccagttacgaggcaggaaattaattacactcgtcccgtgatcatcctggggcctatgaaagaccggattaacgacgacttaataagcgagtttccggataagttcggaagctgcgttcctcatacaaccaggcctaagagggactacgaggtcgacggtcgcgactatcacttcgtgatctcaagggagcagatggagaaagatatccaggagcacaagttcatcgaagctgggcagtacaatgataacctgtatggcacaagcgtccagagcgtgagattcgtagccgaacgagggaagcactgcattctggacgtgagtggcaatgccatcaaacgtctgcaggtcgcccagctctatcctatagctatatttatcaaacccaggagcttagagccgctgatggagatgaataaaagactaaccgaggagcaggccaagaagacctatgatcgtgcgatcaagctcgagcaggaatttggagagtacttcactgctattgtccagggggatacgttggaagacatatataatcaatgtaagctagtgatcgaggaacaatcaggtccttttatctggatcccttccaaagagaagctttag

SEQ ID NO: 220978 - DNA, 2550 bp, synthetic construct
  misc_feature 1..2550: note = Description of Artificial Sequence: Synthetic coding sequence
  source 1..2550: mol_type = other DNA
atgcataaacaccaacattgttgtaaatgccccgagtgttacgaagtaacaagattggccgcactcagaagactagaaccaccgggatatggagactggcaggtcccagacccatacgggcctgggggagggaacggagcctctgccggatatggaggttactccagtcagacactcccgtcccaagcgggtgctactcctaccccgagaaccaaagccaagctgattccaaccggacgtgatgttggaccggtgccccctaagcctgtccctggtaaaagcaccccgaaattaaatgggtccgggccttcatggtggccagaatgtacgtgtactaacagagactggtatgagcaggcacggcctgcacctcttctcgttaatcccgagacactgaaacacagtctgtcagttaacggctccgatgggatgtttaagtatgaggagatagtcctcgagcgcggaaacagcggcctcggattctcaatcgccggaggaatcgacaatcctcatgtgccagacgatcccggaatcttcattaccaagatcataccagggggtgcggcagccatggatggtaggttgggagtaaacgattgcgtgctgagagtgaacgaggtcgatgtgtctgaagtcgttcactcccgggcagtggaggccttaaaggaggcaggcccagtcgtcagactcgtggtgcgaagacggcaaccccctcccgaaacaattatggaagtcaacctgctcaaaggccctaagggactgggcttctcaatagccggtggtattggaaatcagcacatacctggagacaacagcatttacatcactaagattatcgaggggggagcggcacagaaagatgggcgacttcagatcggcgacagactgctcgccgtgaacaacacaaacttacaagacgtgcgacacgaagaggccgtggcctcccttaagaacactagcgatatggtttacctgaaggttgcgaagcctggtagcctgcacctgaatgatatgtacgctccacctgactatgccagcacctttacggctcttgccgacaatcatattagccacaactcatccttgggatatctgggcgcagtggagagcaaagtttcatacccggctccaccacaggtccctccaacccggtactcgcctattccccgtcatatgcttgccgaggaagactttaccagggaacccaggaagattattcttcataagggcagtactgggctgggatttaatattgtggggggagaggacggggagggaatctttgtgtcttttattctggctggtggtcctgcggatttgtcaggtgaattgcgtaggggcgatcggatcctgagcgtgaacggcgtcaatctgagaaacgcgacacatgaacaggccgctgccgcactcaaacgcgcaggacagtctgtcaccattgttgcgcagtatcgacccgaggagtatagtcgctttgagtctaaaatccacgacctgcgggagcagatgatgaattcctcaatgtcatcagggtcgggcagcctgcggacttccgagaaacgatctctgtatgtgagggccttatttgattacgatcgtacccgagattcttgcctgccgtctcagggcctttcttttagttacggagatatcttgcacgtcatcaatgcgtcagacgacgagtggtggcaagcccgattggttaccccccacggggagtcagaacagattggtgtgatcccctccaagaagagggtggagaagaaggagcgggctcggctgaagactgtgaagtttcacgctagaaccgggatgatcgagtctaaccgggatttccctggactatccgacgactattacggggctaaaaatctaaaaggcgtgacttctaacacctctgattccgagagttcctccaaggggcaagaagacgccattctgagctatgaaccagtgacccgccaagaaattcactacgccagaccggtgataatattagggccaatgaaggatagggtgaatgacgacctaatctctgagtttccacacaagttcggctcatgtgtgccacacacaacaaggccgaggagagataacgaagttgatggtcaggattatcactttgtagtgtctcgcgaacagatggagaaagacattcaggataataaatttattgaggcaggccagttcaacgacaacctatacgggaccagcatccaaagtgtacgggctgtggccgaacggggaaaacattgcatactcgacgtcagtggaaacgccattaagcgtttgcagcaggcacagctgtacccaattgccatttttatcaagcccaagtccatcgaggcattgatggagatgaaccggcgtcagacttacgaacaagctaacaaaatttacgacaaggccatgaaactggaacaagagttcggtgagtactttaccgcgattgtccagggggacagtctggaggaaatctataacaagattaaacaaatcattgaagaccagtcaggacattatatttgggttcctagccctgagaagctgtag

SEQ ID NO: 220979 - DNA, 2454 bp, synthetic construct
  misc_feature 1..2454: note = Description of Artificial Sequence: Synthetic coding sequence
  source 1..2454: mol_type = other DNA
atgcataagcatcagcactgctgtaagtgtcctgagtgttatgaggtgacaaggcttgcagccttaaggcggctggagccacccggatatggcgactggcaggttccagacccatatggtcctgggggagggaatggcgctagcgcaggttatggtgggtattcctcacagaccctgccctcacaggcgggagccaccccgacccccagaaccaaggctaagctcatccctacaggcagagacgtgggccctgtgccccctaagccagtacccggaaaaagtacccctaaactgaacggatccgggcctagttggtggccagaatgcacatgcaccaaccgggactggtatgaacaagtgaacggctcagacgggatgttcaagtacgaagagattgtgttagaacggggaaacagcggactcgggttctcgatcgcgggaggcatcgacaatcctcatgtgcctgacgatccaggcatttttattactaagattattcctggtggggcagctgcaatggacggtcgtttgggagtaaacgattgcgttctgcgagtgaacgaggtggatgtttccgaggtggttcactcaagggccgtggaggctctgaaagaggcaggtcctgttgtgaggctggtcgtcagacggcgacagcctcctcctgagacaatcatggaggtaaacttgttaaagggccctaagggattggggttttctattgctggaggaatcggaaatcaacatatcccaggtgataacagcatttatattactaaaataatcgagggaggcgcagcccagaaagatggacgcctgcagattggtgataggctgctggccgtcaacaataccaacctgcaagacgtgaggcacgaggaagcggtggcaagcttaaagaacacctcggacatggtgtacctcaaggtagcaaagccaggttcactgcacctaaatgacatgtacgctccacccgactacgccagtaccttcactgcactggcagacaatcatattagccacaactcaagtttgggatatctgggcgcagtagagtccaaggtgagctaccccgcacccccacaagtcccgcctacccgatattcacccattcccaggcacatgctcgccgaagaagacttcacacgggaacctcgtaagattattctgcacaaggggtctacaggccttggatttaatatcgtgggaggggaagatggagaaggaatctttgtaagcttcatcctcgcgggagggcctgctgacctgagcggtgaactccggcgaggcgacagaattttgagcgtgaacggagtgaacttaagaaatgccactcatgaacaggccgcagccgctcttaagcgggctggccaaagtgtgaccatcgtcgctcagtatcgtcccgaagaatatagcaggttcgagtcaaaaatccacgacctgcgagaacagatgatgaattctagcatgagcagtggttctgggagccttcgcacttccgaaaaaaggtctctgtatgtgcgcgctttgtttgattatgacagaacacgcgattcttgtctgccaagccaaggcctctcttttagctatggcgacatcctccatgtgattaatgccagtgacgatgagtggtggcaggccagactcgtgacgccacatggggagtcagaacagattggtgtgatcccttccaagaagagggtggaaaaaaaagaacgcgcaaggctgaagacagtaaaatttcacgcgcgtactggcatgattgaatcaaatcgggattttccagggttatcagacgactactacggagccaagaacctaaagggacaagaagacgctattctgtcgtatgaacctgtgacccgacaggagattcactatgcgagaccagtaatcatcttgggacctatgaaagatcgcgtcaacgacgacctcatcagcgaattcccccacaaatttggctcctgcgtaccccacacaaccaggccacgaagagacaatgaagttgatggccaggactatcacttcgtcgttagccgggagcagatggagaaagatattcaggacaataaattcatcgaagccggacagtttaatgacaatctctacggtaccagtatccagagtgtccgggctgtggccgagcgcggtaagcactgtatcctggatgtttcagggaacgctatcaaacgtctccagcaagcacagttgtacccgatagcaatctttatcaagcccaaatcaatcgaagccctgatggagatgaatcgacgtcaaacctatgagcaggccaataagatctatgacaaggccatgaaactggagcaagagtttggggagtacttcaccgctattgtgcagggcgatagtctggaggagatttacaataagattaaacagatcatcgaggaccagtccggacactacatctgggtaccatcaccagaaaagttgtag

SEQ ID NO: 220980 - DNA, 1101 bp, synthetic construct
  misc_feature 1..1101: note = Description of Artificial Sequence: Synthetic coding sequence
  source 1..1101: mol_type = other DNA
atgatgaatagttctatgtcatcaggatccggaagtctgcgcacatcagaaaaaaggtctctgtacgttcgggctctgttcgattacgataggactcgggacagctgtctcccctcccagggattgtccttttcctatggggatatcttgcatgtgattaatgcatctgacgatgaatggtggcaggccaggctggtcactccgcatggcgagtcagagcagattggggtcattccaagcaaaaaaagagttgagaaaaaggagagggcaaggttgaagaccgtgaaatttcacgctcgtacaggtatgattgaatcaaatcggtctataaagaccaaacgcaaaaagtcatttcgattatccaggaaattcccattttacaagagtaaggagaacatggcacaggagagcagcattcaggagcagggagtgacatccaacacttcagatagcgaatcatcaagcaaggggcaagaggatgcgatcctcagctatgaacccgtaacccgacaggagatacattacgctcgccctgtaataatactgggacctatgaaagatcgcgtcaacgacgatctgatctctgagtttccccataagtttggcagctgcgtgcctcacaccaccaggcccagaagagataacgaggtggatgggcaggattaccatttcgtggtgtcaagggagcagatggaaaaagatatacaggataacaaattcattgaggccggacaattcaatgataatctctacggcacatctatacagagcgtgcgagcggtggccgagaggggcaagcattgcatcctggatgtgagcgggaacgccatcaaacgcctccagcaggctcagctgtaccctatcgccatcttcatcaagcccaagtcaattgaggccctaatggaaatgaatcgcagacagacgtacgaacaggctaacaagatatacgacaaagctatgaaactggagcaagaatttggagaatactttactgccatagtccagggggacagcctcgaggaaatctacaacaaaatcaaacagatcatagaggatcagtctggacattatatctgggtgccctcccctgaaaagctgtag

SEQ ID NO: 220981 - DNA, 2304 bp, synthetic construct
  misc_feature 1..2304: note = Description of Artificial Sequence: Synthetic coding sequence
  source 1..2304: mol_type = other DNA
atgtcacagagacccagagctcccaggagtgccctgtggctcctggcccctccattgctaaggtgggcccctcccctccttacagtgttgcatagcgacttgtttcaggccctgcttgacatcctggattactatgaagcatctctcagtgagagccaaaaataccgctatcaggatgaggacacacctcccttggagcactctcctgctcatttgccaaaccaggccaattctccccctgtgatcgtgaatacagacactctggaggcgcctggctatgaactccaggtaaatgggacagaaggggaaatggagtacgaggagataacattggaaaggggtaactcagggctaggattctcgattgctggaggcaccgacaacccccacatcggtgacgaccccagcatcttcataacaaaaataatccctgggggtgcagcagcacaggatggacgcttgcgggtgaatgacagcattctgttcgtcaacgaggtcgatgtgcgagaagtgacacactcagccgcagtcgaggccctcaaagaagcgggaagcatagtgcgtctgtatgtgatgaggaggaagccacccgcagaaaaagtgatggagatcaaactgataaaaggccctaagggtctagggttttcaattgctggaggggttggaaaccagcacattcctggggacaactctatttacgtcacgaagatcatcgagggcggtgctgctcataaggacggacgcctccagattggcgacaaaatcctcgccgtgaattcagtgggactggaggacgtgatgcacgaggacgccgtcgccgctcttaagaatacatacgacgtggtctacctgaaagtcgctaagccaagcaatgcgtatcttagcgactcctatgcacctccagacattacaacatcctactctcagcacttagacaatgagatctcccatagtagctacctgggcacagattacccgacggcaatgactcctacaagtccccgtcggtacagtccagtggctaaggacttactgggtgaagaggatatccctcgagagccaagacgcatagtgatccacaggggctccactggcctgggcttcaacatcgtcggtggcgaagatggagagggaatttttatctccttcatattggctggaggtccagctgatctgagtggcgagctgcgcaagggggaccagatcctttctgtgaatggagttgatctgaggaatgcatcccacgagcaagctgccatagctctaaaaaacgcgggacagaccgtgactataattgcccaatataagcccgaggagtatagccgcttcgaagcgaaaatccacgacctgagagaacaactgatgaactcttccctcggctcagggacagcatctctccggagcaatccaaagcggggtttctatatcagagctctattcgactatgacaagacaaaagactgtggttttctaagccaggcattatcattccgttttggagacgtgctccacgtgattgacgctagcgatgaggaatggtggcaggcccgacgtgtgcactcagacagtgagaccgacgatattggctttattcctagcaagaggcgcgtcgagaggagggaatggtcccgcttgaaggccaaagattggggaagcagctctggaagccagggaagggaggatagcgtcctatcttacgagacagtcacacagatggaggtacactatgcacgccctataattattctcggcccaaccaaggacagggccaatgacgacttgctgtccgaattccctgacaaattcgggtcctgcgtccctcatactactcggcctaaacgcgaatacgaaattgatgggagggattatcatttcgttagttcaagggaaaagatggagaaagatatccaagcccataaatttatagaagccggacaatataacagccacctgtacggtacttccgtccagtcagtgcgtgaggttgcagagcagggaaaacattgcattctggatgtgtcggcaaacgcggtcagacggctgcaggcagcgcacctgcatcctatcgcaatttttatccggccacgttctcttgaaaacgtactcgagattaataaaagaattactgaggaacaagcgaggaaagccttcgacagggccacaaagctggagcaagagttcaccgagtgtttcagtgccattgttgaaggcgattcatttgaagagatttaccacaaggtcaagagggtgattgaggatctgtcaggtccttacatttgggtgcccgctagggaacgcttgtag

SEQ ID NO: 220982 - DNA, 2166 bp, synthetic construct
  misc_feature 1..2166: note = Description of Artificial Sequence: Synthetic coding sequence
  source 1..2166: mol_type = other DNA
atggattgcttgtgtattgtgacaacaaaaaagtatagataccaggatgaagacacccccccacttgagcattccccagcacatttgccgaatcaggccaatagcccgccagtcatcgtgaacacagatacattggaggcacctgggtatgtcaatggcaccgaaggagagatggagtacgaagagattactctagaacgtggtaactcaggcctggggttcagcatcgccggtgggaccgataatccgcatataggggatgaccctagcattttcatcactaaaattatccccggaggggctgccgctcaagatgggaggctgcgggtcaatgattctattctgttcgtgaatgaagtcgatgtgagggaggtgactcactccgcagctgttgaggctctgaaagaggccggaagtatcgttcgcctttatgtgatgcgacggaagccccctgccgagaaggtgatggaaataaaactgatcaaagggccaaaagggctgggattttccattgcagggggagtgggcaaccagcacatccccggagacaacagcatatatgtgacaaaaattattgaggggggagcagctcacaaggatgggaggctgcaaatcggagataagatcctggctgtgaactcagtaggactcgaggacgtcatgcacgaagacgcagtcgctgcactcaaaaatacatatgatgtggtgtatctcaaggttgcgaagccgagcaacgcttacctttccgactcctatgccccaccagatatcactaccagttactctcagcacctggataacgaaatatcacattctagttatctcggcaccgattatcctacggccatgacaccaacttccccacgccgatacagccccgttgccaaagacctgcttggtgaagaagacattcctcgcgagcctcgccgaattgtcatccacagagggagcactggactgggtttcaacattgtcggtggtgaggatggcgagggcatctttatcagctttatccttgctggcggtccagctgacctaagcggcgagcttagaaagggagatcagattctctcagttaatggggtcgaccttcgcaatgcctcccatgagcaggccgcaatcgcattgaaaaacgcaggacagaccgtcaccatcatcgctcaatataagcccgaggagtattctcgcttcgaggccaagatccacgacctgcgagaacagctgatgaattcgtcgctggggtcaggcaccgctagtctgcggagtaaccctaagcggggtttctatattcgtgctctattcgattacgacaagaccaaggattgtggctttttatctcaggcgctgagctttaggtttggcgatgtcctgcacgtcatagacgcgagtgacgaagagtggtggcaggcacgacgcgtacacagcgactctgaaacagacgatatcggcttcatacctagcaaaaggcgggtggaacggcgagaatggtcccggttgaaagcgaaagactggggctcctcctctggctcgcaggggagagaagacagcgtgctctcctatgaaactgttacccagatggaggtccactacgccagacctattattattcttggacccactaaggatagagctaatgacgatttactgtccgagttcccagataagttcggcagctgtgtgccgcacaccacccggcctaaaagagagtacgagattgatggaagagattaccactttgtgtcctcccgagaaaagatggagaaggacattcaagcacataagttcatcgaagcaggccagtataactctcacctttacggtacgagtgtgcagagtgtcagagaggtcgcagaacagggcaaacattgtattcttgacgtgagcgcgaacgctgttaggcgcctacaagcggcacatctccaccctatagccatcttcatcagacctcggtcactagagaacgtcctggagatcaacaagcgaatcacagaagaacaggccagaaaagccttcgatcgagctacgaagctcgagcaagaatttaccgagtgcttctctgccatcgtggaaggcgatagttttgaggaaatctaccacaaagtgaagagggtaatcgaggatctgtctggcccttacatctgggtcccggcacgagaacggttatag

SEQ ID NO: 220983 - DNA, 1995 bp, synthetic construct
  misc_feature 1..1995: note = Description of Artificial Sequence: Synthetic coding sequence
  source 1..1995: mol_type = other DNA
atggaatacgaagagattactctggaacgagggaacagtgggctgggcttttccatcgcaggaggcaccgacaacccgcacataggggacgatccttccatcttcataaccaaaatcatcccaggtggcgctgcggcacaggacggccgtcttagagtgaacgactctatactgttcgtaaatgaagttgatgtgagagaagttacacattcggctgccgtcgaggctcttaaggaggcgggaagcatcgtgcggctctatgttatgcgcagaaaaccccctgcagaaaaagtgatggagattaagctaattaaaggacctaaaggattaggtttttcaattgccggaggcgtaggaaatcaacatatccctggggacaacagcatatatgtcactaaaatcattgaagggggagcggcacacaaggatggacggctgcagatcggggacaagatcctggccgtcaattcagtcggcttagaagatgtgatgcatgaggacgcagtcgccgcattgaagaacacatatgacgttgtctacctgaaggttgctaagccttccaacgcctatttgtccgattcttacgccccacctgacatcacaaccagctattcacagcatttagataacgagattagccactcctcatacctggggactgattatccaaccgcgatgaccccaacaagcccacgccgttacagtccagtggcgaaggacctgctaggggaagaagatatcccccgagaacctaggcgaatcgtcatccatagagggagtactggacttggatttaatatcgtgggtggagaagacggtgagggcatctttatctcattcattttggctggaggcccagcagatttgtccggggagctcagaaaaggggatcaaatcttgtccgtgaatggggttgacttgaggaatgcatctcatgagcaggctgccattgcactgaaaaatgctggtcaaacagtcactattattgctcagtacaagccggaagagtacagtaggtttgaagccaagattcatgatctgcgggaacagctgatgaattcttcactgggctcaggcaccgcttcactgcgcagcaatcctaaacgaggcttttacatacgggctctgtttgattacgataagaccaaggattgcggtttcctcagccaagccttgtccttcagattcggagatgtccttcacgtgattgacgcaagtgacgaagaatggtggcaggctaggcgcgtgcactctgactccgagactgatgacatcggcttcatccccagcaagcggagagtcgaaaggagggagtggtcgaggttaaaagcgaaggactggggatcatccagcggctcacagggtcgggaagattccgtcctcagctacgaaaccgtgactcagatggaagtgcattacgcacgccctatcatcattctggggcctactaaggatcgggctaacgacgacctgttgagcgaattccctgacaagttcggctcctgtgttccccataccacacgccctaagcgggagtacgaaatcgatgggcgagattatcacttcgtgagttcaagggaaaaaatggagaaagatatacaggcccataagttcattgaagccggtcagtacaatagccatctttacggcacaagcgtgcaaagtgtgagggaggtggcggagcagggtaagcactgtatcttggatgtctctgccaacgcagtccggaggcttcaggctgcacacctgcaccctatagcaattttcatccgaccgagaagtctggaaaacgtcttggagattaataagcgtattaccgaggagcaggctaggaaagcgtttgatcgagcgaccaagctggaacaggagttcacagaatgctttagcgcgatagtagagggcgattccttcgaggaaatttaccataaagtaaaaagagtcatagaggacctgtctggaccctacatatgggtgccagcccgagagcggctctag

SEQ ID NO: 220984 - DNA, 2175 bp, synthetic construct
  misc_feature 1..2175: note = Description of Artificial Sequence: Synthetic coding sequence
  source 1..2175: mol_type = other DNA
atggattgcctatgtatcgtgacgacgaaaaagtaccgatatcaggatgaggacactcctcccctggagcacagtccagcacatctgcctaaccaggctaactctcccccagtgatagtgaacactgacactctggaagccccaggctacgttttgcaagtgaatggaaccgagggggaaatggaatacgaagagataacccttgagcgcggtaactcagggcttgggttttcaattgcgggaggcacggataatccccacattggtgatgacccgtccatttttattaccaaaatcatcccagggggagccgcagcccaggacggaagacttcgcgtaaatgacagtatcctctttgtgaacgaagtggatgtgagagaggtgactcattcggcagctgtagaggccctcaaggaggcaggcagcattgtgcgcctgtatgtgatgagacggaagcccccagcagaaaaggtgatggaaatcaaattgatcaaaggccctaaggggttgggattcagcattgcgggaggcgtgggtaatcaacatatccccggagataactctatctacgtcacaaagatcatcgaaggtggggcagctcataaagacggccgtctgcagataggagataaaatcctagctgtgaactctgtgggcctggaggacgtaatgcatgaggacgctgtggcagccttaaaaaatacgtatgatgtcgtttacctaaaagtggctaagcctagtaacgcctatttgtctgatagctacgcgcctcctgacatcactacctcatacagccaacacctcgacaatgaaatatcccactctagctatctggggacagattacccaacagccatgacgcctacatccccaaggcggtacagtcccgttgcaaaggaccttctgggagaggaggacataccgagggagcctcgacggatcgtgattcacagaggatccacgggactgggattcaacatcgtcgggggtgaagacggagaggggatctttattagctttatcttagcagggggtcctgcagacctttccggcgagctccggaagggtgaccagattctgtctgtcaacggggtcgatctaaggaatgctagtcatgaacaggcagctatcgcactgaagaacgctggccagactgttaccatcatcgcccagtacaaacccgaggagtattcacgtttcgaagctaagatccatgatctgcgcgagcagctgatgaacagctctctgggatctggtaccgctagcctgagatcaaaccccaaaaggggtttctatatcagggcccttttcgactatgataagacaaaagattgcggatttctgagccaagccctatcatttaggttcggcgacgtattgcacgtgatcgatgctagcgacgaagagtggtggcaggccaggagagtgcacagtgattctgaaaccgatgacataggcttcattccctcaaaacgaagagttgagcgacgcgagtggtccagactgaaggctaaagattggggctcctcctctggaagccagggcagggaggattctgtgctgtcttacgagacagtaactcaaatggaagtgcactacgccaggcctataattattcttggccctactaaggacagagccaatgacgatctcctgtcagagttccccgataagttcggtagttgtgttccccatacaaccagacccaaacgggagtacgagatcgacgggagagactaccatttcgtctcatccagggagaaaatggagaaagatattcaggcccataaattcattgaggcagggcaatacaactcgcacctctacggtacgagcgttcagtcagtgcgagaggtggccgagcaggggaagcactgtattcttgatgtatccgctaacgctgtcagaagactccaggctgcccatctgcaccccatcgccatttttatccggccacgctcattggaaaatgtgctcgagatcaacaagaggataacggaagagcaagcaagaaaagcctttgaccgggctaccaagttggagcaggaatttaccgaatgtttttccgcgatcgtggagggagattcgttcgaggaaatctatcacaaggtcaaacgtgtgatcgaggacttgtcggggccttacatttgggtgcccgcaagggagcgtctgtag

SEQ ID NO: 220985 - DNA, 2304 bp, synthetic construct
  misc_feature 1..2304: note = Description of Artificial Sequence: Synthetic coding sequence
  source 1..2304: mol_type = other DNA
atgagtcagaggcccagggcgccacggtcagcgttgtggctcctagcccctcctctgttacgttgggcaccacccctgctgaccgtgctccattctgacttattccaggccctcctggacatacttgattattatgaagcgagcctctcagaaagtcagaagtaccgctaccaggatgaagacactccgcctctcgaacactcccctgcgcacctgcccaatcaagctaactccccaccagttatcgtcaatactgacactctggaggccccaggttacgttttacaggtaaatgggacggagggggaaatggagtacgaggaaatcactttagagcgcggtaactccggccttggcttttctattgccggagggacagataacccccacattggggacgatccctctattttcatcaccaagattatcccaggaggcgcagcggctcaggacgggaggctgagggtcaatgacagtattctgttcgttaatgaagtggatgtgcgcgaggtgactcattcagccgcagtggaggcactgaaagaggccggttctatcgttaggctgtatgtcatgcgcagaaagcctcccgcagagaaggttatggagattaagttaattaaagggcctaagggcctgggttttagtattgccggaggagtcggaaaccagcacatccccggtgataactctatctatgtgaccaagattattgagggaggagccgcacacaaggacgggcgactccagattggcgataagatcctcgcggtcaacagcgtcgggctagaagatgttatgcacgaagacgcagtcgccgctctgaaaaacacctatgacgtcgtatacctcaaggtggccaaaccttcgaatgcctacctgtccgactcatatgcaccacccgacatcacgacatcctacagccaacacttggataacgaaatcagccactctagctacctcggcacagactatcccaccgctatgacgcccacatcgcccagaaggtattcccccgtggctaaggacctgctcggagaggaagacataccacgggaacccaggcggattgtcattcatcgaggcagcactggactgggcttcaatatcgttgggggtgaggacggcgaaggaatctttatttccttcatcttggcaggcggtcctgctgatttaagtggagaactacgcaagggagatcaaatcttatccgtaaacggcgtcgatctgagaaatgcaagccatgaacaggccgctatcgccctcaagaacgccggacagacagtgacaataattgcgcaatacaagcccgaggaatacagtcggtttgaggcgaagattcacgaccttcgggagcagctgatgaacagttcacttgggtccggcactgcctctttacgttccaaccctaaaagaggcttttatattcgtgccctgtttgactacgataagactaaagactgcgggttcctatctcaggctctcagctttcgatttggggatgtgctgcacgtgatagatgccagcgacgaagagtggtggcaagctaggcgcgtccacagtgatagtgaaacggacgacatcgggttcattccttctaagcgtcgagttgaacggagagaatggtccagattaaaggccaaagactggggtagcagttcaggaagccaaggcagggaagactcagtactcagctatgagaccgtaacacaaatggaggtgcactatgctcgccctattataatcctcgggccaacaaaagatagggctaatgatgacctgttgagcgagttcccggataagttcggttcgtgcgtcccgcacacaactcgcccaaagcgcgaatatgaaatcgacggcagggactaccatttcgtctcgtcccgcgaaaaaatggaaaaggatattcaggcccacaagtttatcgaggccggacagtataactcacacttatacggcacctccgtgcagagcgttcgcgaggtcgctgaacagggaaagcattgcatacttgatgtctccgctaatgcggttcgacgactgcaggcagcacatttgcaccctattgcaatctttatccggcctcgatctctcgagaacgtgcttgagattaataaaaggatcaccgaggagcaggcacgcaaagccttcgacagagccacaaagctggaacaggagttcaccgagtgcttctccgctatcgttgagggggacagctttgaggagatctaccacaaagtgaagcgtgtgatcgaggatcttagcggaccctacatttgggtgccagcccgtgagaggctctag

SEQ ID NO: 220986 - DNA, 2004 bp, synthetic construct
  misc_feature 1..2004: note = Description of Artificial Sequence: Synthetic coding sequence
  source 1..2004: mol_type = other DNA
atgagtcagcggccaagggctcccagatcggcactctggctgctggccccaccactattacgttgggcccctccacttctgacggtcttgcacagcgacctcttccaggctcttttagatatcctcgattactacgaagccagtttgtcagaaagtcaaaaatatcgctatcaggatgaggacacccccccacttgaacactcccctgcccatctgcctaaccaagccaatagtcctccggtgatcgtgaatactgacaccttagaggcccctgggtacgagctacaggtcaatggcactgaaggcgagatggaatatgaggagattaccctggaacgcggaaactccgggctgggttttagcattgctgggggaacagacaatccgcatatcggcgacgatccaagcattttcatcactaagatcattccagggggagctgctgcacaggacggaagattgcgcgtgaatgacagcattctttttgtaaatgaggtggatgtgcgcgaggtaacgcactcggcagcggtggaagccctgaaggaggccggttccatagtgagactgtacgtaatgcgcaggaaacctcctgccgaaaaggtgatggagattaaactaattaagggtccaaagggccttggattttctatcgccggaggtgttggcaaccagcacattccaggagacaactctatatatgtaacgaagataatcgagggtggcgcagcgcataaagatggcaggttgcagataggtgataaaatcctagctgtcaatagtgttggattggaggacgttatgcacgaggacgctgtcgctgctcttaaaaatacatacgatgtggtctatttaaaggttgcaaagccttctaatgcatacctgtcagattcctacgctccacccgacatcaccacctcttacagtcagcaccttgataacgaaatcagccactcatcctacttgggaaccgattacccgactgcgatgacaccaacctctcccagacggtacagccccgtcgcaaaagatctgctgggggaagaagacatccctagagagccccgacggatcgtaatccatcgaggctctactggcctggggtttaacattgtgggaggggaagatggagaaggaatctttatctctttcatcctggctggcggaccggctgatctatccggtgaattgaggaagggagatcagatcctgagcgtgaacggagtggacttgcgaaatgcctctcacgaacaagcagcaatcgcgctaaaaaacgctggacagacggtgaccatcatcgcgcagtacaagccggaagagtacagtaggttcgaggcaaaaatccatgacctcagggaacagctgatgaatagctcactgggttctggaactgccagcttgaggagcaatcctaaacggggtttttacatacgcgctttgttcgattatgataagacgaaggattgcggcttcttgtcgcaggctctcagcttcaggttcggcgatgtgctgcatgtcatcgatgcctcagacgaggaatggtggcaggctcgaagggtgcacagcgactcggaaactgatgacataggtttcatcccaagcaagaggagggtggaacgtcgagaatggtcacgcctcaaggcaaaagactgggggtccagcagcgggagtcagggacgcgaggattcagttctctcctacgaaacagtgacccaaatggaagtccattacgctcgaccaatcataatcctcgggcctaccaaggacagggcgaacgatgacctgctcagtgagttccctgacaaatttgggtcatgtgtgccacacaccactcgccctaaaagggaatacgaaatcgacggaagagattaccacttcgtgtccagcagagaaaagatggaaaaggacattcaggcccacaaattcatcgaggctgggcaatacaacagtcatctgtacggcacaagcgtgcagtccgtgcgggaggttgctgaacagagagattag

SEQ ID NO: 220987 - DNA, 4740 bp, synthetic construct
  misc_feature 1..4740: note = Description of Artificial Sequence: Synthetic coding sequence
  source 1..4740: mol_type = other DNA
atggagccccagaggagggagctgcttgcacagtgccagcaaagcctcgcgcaggccatgaccgaagtggaggcggtgctcgggttattggaggccgctggggctctctctccaggagagcgcaggcagttggacgaggaagctggcggagccaaagctgagctcctgctcaaactcctcctggcaaaagagcgggaccattttcaggacctgcgggctgccctggaaaaaacccagcctcacctgctgcccatcctctatttgaatggcgtcgtgggaccaccgcagccggcagagggtgctgggtcaacttactctgttctgagtaccatgccaagcgacagcgaatcatcctctagtttgagctccgtgggtaccaccggcaaggcccctagccctccccctctgttaaccgatcagcaggttaatgaaaaagtcgagaacctttccattcaactccgtttgatgacacgcgaaagaaatgagttgcggaaacgtctggcttttgctacccacggcactgcatttgataagcgcccataccacagactcaatcccgattatgagaggttgaagatccaatgcgtacgagccatgtctgacctgcagagtcttcagaatcagcatacaaatgcgctgaagagatgcgaagaagtggctaaggagacggacttttatcacactctgcactcccgcctgctgagtgaccagacaaggctcaaagatgacgtggacatgctacgacgggagaacgggcaattgctgcgggaacggaatctgttgcagcaaagttgggaagatatgaaaaggctccacgaagaagatcagaaggagatcggagatctccgtgcacagcagcaacaagtgttgaaacataacggctcctccgaaattctcaacaagctgtacgacaccgccatggacaaactcgaggtggtgaaaaaagattatgacgccctgcggaagcgatacagcgagaaagtggccatccacaatgccgacttgagtcgcctggagcagctgggggaggaaaatcaaagactcttgaagcagacagaaatgctgacccagcagagggataccgcaatccagctccagcatcaatgcgctctgtctctgcgcaggtttgaggccattcaccacgagctgaataaagccactgcacaaaacaaggatttgcaatgggagatggagctgctgcagtctgaattgaccgagctgcggaccactcaggtgaaaaccgcaaaagagtccgagaagtatagggaggaaagggatgccgtgtatagtgagtataagctgatcatgtcagaaagagatcaggttataagcgagttggataagctgcaaaccgaagtggagctcgcagaatcgaagctgaagagcagcacaagtgagaagaaggcagcaaacgaggagatggaagcactgaggcagataaaggacaccgtgactatggacgctgggagggctaataaagaggtggaaatcctcaggaaacagtgcaaggccctctgtcaagaacttaaagaagcactgcaagaggctgatgtcgcaaaatgccggcgagattgggcatttcaggagagggacaaaattgtggccgagcgcgattccattcgcactctatgcgacaacctgcgccgagaacgagaccgggcagtttctgagctagctgaggctttaagatccctcgatgacactcggaaacaaaagaacgatgtgtctagagaactgaaagaactcaaagaacagatggaatcacagttggaaaaagaagccaggtttcgccaattaatggctcacagttctcacgacagtgctatcgataccgacagcatggaatgggaaaccgaagtcgtggagttcgagagggagaccgaggacatagatttgaaagctctgggattcgacatggccgaaggcgtaaacgaaccatgctttcccggagactgcgggatcttcgtgacaaaggtggacaaagggtcaattgctgatgggcgactccgggtcaatgattggctactgcgtataaatgacgttgatcttattaataaagataagaaacaggcaataaaggcacttttgaatggagagggagccattaatatggttgtcaggcgcagaaagtccctgggaggtaaggttgtcaccccactgcatatcaatctgtcaggacaaaaggactcaggtatttctctggagaacggtgtgtacgcagcagccgttctccctggatcgcctgccgctaaagaaggctctcttgctgtgggcgaccgaatagttgctatcaacggaatcgcactggataacaaatccttaaatgagtgtgaatctcttcttcggtcctgccaagactctctaaccttgtccctgctgaaagaacaaaaatgcgtgcctgcatctggtgaactgtcccctgaactgcaggaatgggccccatattcccctggccacagctcccggcactctaatcctcctctgtatcccagcaggcctagcgtgggcacggtacccaggagtttgactccgtctaccactgtctctagtatcttgcgcaatccaatatacacagtgcggagccacagggtcggtccctgctcaagtcctcctgcagccagggatgctggacctcaaggtctccacccatcagttcagcatcagggcagactatcactggatctttctcacagaacttgttccgactattctgaaatgagagccactcatgggagcaattccttgccttcatcggcaaggctaggctctagttcaaatctgcagttcaaggcagaaaggataaaaattccaagcaccccgagatatccccgttcggtggtcggcagtgagagggggagtgtgtcccactccgagtgcagcactcctccccagtctccattaaatatcgacaccctgtcttcttgttcacagtcacagacatctgctagtacgctgcctaggatagcggttaaccccgcttcgcttggggagcgtcggaaggatagaccgtatgtagaagaaccccgacacgttaaggtgcaaaagggatctgagcctctggggatctctattgtcagtggcgagaaggggggtatctacgtttctaaagtgacagttggctctatcgcgcaccaggcgggacttgaatatggcgaccaactccttgagtttaatggcataaacctgagatctgccacggagcagcaggcccgactgattataggtcagcagtgtgatactatcactattttagcacagtacaatcctcacgtgcatcaattaagttcccactcacgttcctcatctcatctggaccctgctggcacacactctaccctgcagggcagtggcactactactcctgagcatccatctgtcatcgatccactgatggaacaggacgaaggtccatctacccccccagccaagcagtcaagctccaggatcgcgggtgatgccaacaaaaaaaccctggagcctcgggtcgtgtttataaagaagagccagctggaactcggggtgcacctctgcgggggaaatttgcatggggttttcgttgctgaagtcgaagacgattcccccgctaaggggccagacggacttgtgccaggagatttaatactagagtacgggtcactggatgtgcgcaacaagaccgtagaggaggtgtacgttgagatgctgaaaccccgagatggtgtaaggctgaaggtgcaatatcgacccgaggaattcacgaaagccaagggactgccaggcgactcattctacattcgggcactgtacgatagactagctgatgtggaacaggaactatcattcaaaaaggacgatattctgtacgtggacgacacgttaccacagggtacttttggatcgtggatggcttggcaactggatgagaatgcacagaagatccagagaggtcagatacccagcaaatacgtcatggaccaggaattctctcgaagactgtccatgagcgaggtgaaagatgataacagcgcgaccaaaactctctcagcagctgctcgcaggtcttttttccgacgtaagcataaacacaaacgttcaggctctaaggacggcaaagaccttctggccctggatgccttcagcagcgatagcatccccttgttcgaggactccgtgtcattggcttatcaacgagttcagaaggtggactgtacggccctccgccctgtgctcatcctggggcctctgctcgacgtcgtgaaggagatgctggtcaacgaggctccgggaaagttttgtagatgtccattggaagtgatgaaagcttcccagcaggccatcgaaaggggtgtcaaagattgtctatttgtggactacaaacgcaggtctggtcactttgacgtcaccactgttgcatctatcaaagaaattacagaaaagaacaggcattgtctccttgacatcgcaccccatgcaattgaacgacttcaccacatgcacatttatcccatagttatctttatccattacaagtcagccaagcatatcaaggagcagcgagatccaatctacttgagagataaagtaacccagagacatagcaaagagcagttcgaagccgctcagaaactagaacaggaatattcccgctacttcaccggcgttatccaaggaggtgccctgagctcaatttgcacgcaaatccttgccatggtgaatcaggaacagaacaaagtcctgtggattcctgcatgccctctctag

SEQ ID NO: 220988 - DNA, 5759 bp, synthetic construct
  misc_feature 1..5759: note = Description of Artificial Sequence: Synthetic coding sequence
  source 1..5759: mol_type = other DNA
atggaaccgcaaaggcgtgaattgctggcccagtgccaacagtccctggcccaggccatgacagaagtagaagcagtgttggggctgctggaagccgctggcgctttatcccccggagaaaggcgacagctggatgaagaagcaggcggagccaaagccgagctccttctgaagctccttctcgccaaggagcgggaccacttccaggacctgcgcgcagctttggagaagacacagccccaccttcttcctatcctctatttgaatggcgtcgtgggaccacctcaacctgctgaaggagcagggagtacatactccgtgctgagtaccatgcccagtgacagcgaatcctctagttccctgagctccgtcgggaccactggtaaagctcccagcccaccacccctgcttacagaccaacaggtgaacgagaaggtagaaaatctcagcattcagctgcggctgatgacccgcgaacgaaatgaactgcggaagaggttggctttcgccactcacggcactgcattcgacaagcgcccttaccacagactcaatcctgactatgagcgactgaagatccagtgcgtgcgcgcaatgtccgacctgcagtccctccaaaaccagcacactaacgctcttaaacggtgcgaagaggtggccaaggaaaccgatttctaccatacacttcatagccgccttttaagcgaccagacacgactcaaagatgacgtggatatgctcagacgggaaaacgggcagctgctgagagagagaaatttgcttcagcaatcttgggaggatatgaaaagattgcatgaggaggaccaaaaagagatcggtgatctgcgagcccagcagcagcaggtgctgaagcacaacggatcttcagaaatccttaacaagctttatgatacggcaatggacaaactggaggtggtgaaaaaggattacgacgctctccgcaaaaggtatagcgaaaaagtggccatacacaacgctgatctctcaaggttggaacagttaggagaggagaaccagagactgctaaagcagactgaaatgctgacacagcaaagggataccgccatccagctgcaacatcagtgtgctctttccctgcgcagatttgaggccatccaccacgaacttaacaaggccacagcccagaacaaagacttgcaatgggagatggagcttctccagtccgagctgacggaactgaggactacacaggtgaaaacagctaaagagtccgaaaaatatcgcgaggaacgtgacgctgtctattctgaatataagctgattatgtccgaaagagatcaagtgatctctgaacttgacaaacttcaaactgaggttgagttggccgagtccaagctgaagagctctacaagcgagaagaaggccgcaaacgaagaaatggaggcgctgaggcagatcaaggatacagtgacgatggacgccggacgcgcaaacaaagaggttgagatcctgaggaagcaatgtaaagccctgtgccaagagctgaaggaggccctgcaggaagcagacgttgccaagtgccggcgagactgggcattccaggagagagataagattgtggctgagcgagactctattagaactctttgtgataacttaagacgggaacgagatagggctgtgtctgaactcgcagaagcattacggtctttggacgacacccgcaaacagaagaacgatgttagccgggagctcaaagagcttaaagagcagatggagagccagctggaaaaagaagcgagatttagacagctgatggctcacagctcccatgactccgctatcgatactgattcaatggagtgggaaaccgaggtggtcgaattcgagagggaaacagaggatatagatcttaaggccctcggcttcgatatggccgagggtgtgaacgaaccatgtttccccggagactgtgggatctttgtgaccaaagtggacaaggggtctattgcagacgggagactgagagtgaatgattggttactccgcatcaatgacgtggacttaatcaacaaggataaaaaacaagcaataaaggcgttgctgaatggagaaggcgctataaatatggtggttcgcagacggaagtcactcggcggtaaggtggtaacacctttacacatcaatctgtccggtcagaaagatagcggtatcagtctcgaaaatggggtgtatgcggctgccgtgctgccaggctcaccggcagctaaagagggctcattggccgtgggggacaggattgtggcaatcaacggcatcgcactcgacaataagtctctgaacgagtgcgagtcgcttctgaggagttgtcaggattcactcaccttgtctctgttgaaagtttttccccagtctagctcctggagtggacagaacattttcgagaatatcaaagactccgacaaaatgctctccttccgggcacatgggcctgaggtgcaggcacataacaaaaggaacctaattcaacacaacaacagtacacaaacggacatattttatacagaccggctggaggacaggaaggaaccgggtccgccagggggatcatcttcatttctgcacaaacccttccccggaggacctctgcaggtctgcccacaggcatgcccttcagcatccgagcggtcactcagctctttcaggtccgacgctagtggcgataggggtttcggtctcgtggatgttcgcggaaggcggccacttcttcctttcgagacagaagtcggtccttgcggtgtgggtgaagcatcactggataaggccgattcagagggttcaaactccgggggaacctggccaaaagcgatgctgtcatccacagccgtccccgaaaagctgtccgtttataaaaaacccaagcagcgcaagagtatcttcgatccgaatacattcaaaagaccccaaacccctcccaagattgactatctcctgccagggccagggcctgcacattctccccagccgtcaaagagagccggtcccctgacacctcccaaacctcccagaagatccgactctattaaatttcagcatagacttgagacttcgtctgagagcgaggccacgttagttggcagctcccccagcacatctccaccatctgctctgcccccagatgtcgaccccggtgaacccatgcacgcaagtcctcccaggaaagcaagagtgcgcatcgcgagcagctactatcccgagggggacggggattcttctcatctgcctgcaaagaagagttgcgacgaggatctgacttcccagaaagtggatgaactgggacagaaacgccgaagaccaaagtcggcgccttcatttaggcctaagctggctcctgtagtcatccccgcacagttcctagaggaacagaagtgcgttcctgcttcaggcgagcttagtcccgaattgcaggaatgggcgccatatagccctgggcattcttccaggcattccaatccccctctatatccttcccggccatccgtcgggactgttcccagatctctgactcccagtaccacagtgagttcaattttgaggaaccccatttacacagtacgctcccaccgggtcggcccatgctcatctccgccagccgcaagggacgctgggccacaaggccttcatccatccgtccagcatcagggtcggttgagcctggacctgtcgcatagaacatgtagtgattattcagagatgcgcgcaacacacggctccaactccctccccagctccgctagactaggaagttccagtaacctgcagttcaaggcagaaaggattaagatcccatcaacgccccgttacccaagatccgttgttggaagcgaacgtgggtccgtgtcccacagcgagtgttccacccctccccaaagccctctgaacatagatacgctgtcctcttgtagccagagccagactagcgcctccacgttacctcggatcgcagtgaatccggctagtctgggcgagaggaggaaagatcgcccatacgtggaagagcccaggcacgtaaaggtgcagaagggcagcgagccactcggcatctcgatagtgtccggcgaaaaaggcggaatatatgtttccaaggttacagtcggatccatcgcccaccaggccggtctggaatacggtgatcagctcctggagtttaatggcattaatctgagaagcgccaccgaacagcaagcgagactgatcatcggacagcagtgtgatacgataaccatattagcacagtacaacccgcatgtgcaccagttgtctagtcacagccggagttcctcccacctcgatcccgctggcacacattccacccttcagggatcagggactacaactcctgaacatcctagcgtgatcgatccattgatggagcaggacgagggcccttcgacccccccagctaagcagtcctcgtcccgaatcgccggagatgctaataaaaagacactggaaccccgtgtggtgttcatcaagaagagccagcttgaactaggtgtgcatctctgcggaggcaacctgcacggcgtattcgtcgcggaggttgaggacgacagtcccgcaaaaggacctgatggcctcgtgcctggagatttaatcctggaatacgggtcccttgacgtgcgtaacaagaccgtggaggaggtatatgtggaaatgctgaagccacgagatggcgtgcgcttgaaagtccagtaccgtcccgaggagttcaccaaggcgaagggacttccgggtgactccttttacattagagccctttacgataggcttgccgacgtggaacaggagttaagcttcaaaaaagacgatatcctttatgttgatgacaccctgccacaggggacttttggtagctggatggcctggcagctggacgaaaacgctcagaagatccagcgtggccagattccatctaagtatgtaatggaccaggaattctctaggcggttatccatgtcggaggtaaaagacgataatagcgccactaaaactctcagcgccgctgccagacgttcattttttagaagaaagcataagcacaaacgatccggctctaaggacggcaaggacctgctcgccctcgacgcctttagttctgattctatccctcttttcgaagattccgtttccttggcataccagcgggtgcaaaaagtcgattgtacagccctgcgcccagtgctgatcttaggacccctgttggatgtcgttaaggagatgcttgtgaatgaagccccaggaaagttctgtagatgccccttggaggtcatgaaggcctcccagcaagcaattgagcggggtgtcaaggactgcctctttgtggactacaagagacgctcaggccattttgacgttactactgttgcatctatcaaggagataaccgaaaaaaatcgtcattgtctgctagatatcgctcctcacgctatcgagagactccatcacatgcacatatatccaattgttatcttcatccactataaaagcgccaaacacattaaggagcagagagaccccatctaccttagagataaggtcacacagcggcactccaaggagcaatttgaggccgctcagaagctcgagcaggagtacagtcgctacttcacaggagtgatacagggcggagcactgagttcaatatgcacacagatcctggcaatggtgaatcaggagcagaataaagtgctgtggattccagcctgccccttgta

SEQ ID NO: 220989 - DNA, 2052 bp, synthetic construct
  misc_feature 1..2052: note = Description of Artificial Sequence: Synthetic coding sequence
  source 1..2052: mol_type = other DNA
atggagccccagcggagagaactgttggctcaatgccagcaaagccttgctcaagccatgacagaggttgaagccgtgctgggcttgctggaggcagcgggagctctgtcaccaggagagcgtcgccagttagacgaggaggctggcggtgctaaagccgaactgcttcttaagctgctactcgcaaaagagcgggaccatttccaggacctgagggccgctcttgagaaaacccagcctcatttactacccattctctatcttaatggcgtggtgggccctccacagcccgctgagggggcaggaagcacatacagcgtgctgtcgacaatgccttcagacagtgagtccagcagcagcctgagtagtgtcggaacaaccgtcaagcacctccgcgaacagatggaatcccagcttgagaaagaggcccgttttcggcagcttatggcgcacagcagccacgactcagccatcgatacagattctatggaatgggagacagaagtcgtcgaatttgaaagagagacagaagatatcgatcttaaagctctggggtttgacatggcggaaggagtgaatgaaccgtgctttccaggagactgcgggatcttcgttaccaaggttgataagggaagtatcgctgatgggaggcttagagtgaacgattggttactgagaattaatgacgtcgacctcatcaacaaggacaaaaagcaggccatcaaagctctgcttaacggtgagggcgctatcaatatggttgtaaggcggcgaaagagcctagggggaaaagtcgtaactcccctgcatattaacttgagtggtcagaaggatagcgggatcagtcttgagaacggcgtatacgctgctgccgtactgccagggagtccagccgctaaggaggggtcccttgctgtaggagaccgtatcgtggcaattaatggaattgccctcgacaataaatctctcaatgaatgtgaaagcttacttcgctcgtgccaagactcactgacactgtcccttctgaaagttttcccgcaatcctcttcatggtccggacagaacattttcgagaacattaaggattccgacaagatgttgtccttcagggctcatggaccagaggttcaggcacacaacaagagaaatctgattcagcataataacagtacccagactgacatcttttatactgataggctggaggatcgcaaggaacctgggcctccaggtggttcctcttcattccttcacaagcctttcccaggcggacctttacaagtgtgcccacaggcctgtccctccgccagcgaacgtagcctctcctcctttagatccgatgcctccggcgatcgtggcttcggacttgtcgatgtgagaggtcggagaccccttctaccatttgaaactgaggtcggaccctgcggggtgggggaggccagcctggataaagccgactcagaaggctcaaacagcgggggaacttggccaaaggcgatgctttcttccaccgcagtccccgagaagcttagtgtctacaagaagcctaaacagcggaagtcaatctttgaccccaacactttcaaacggccacagacaccgccaaaaatagactacctgctccccggtcccggtccagcccactcccctcagccttccaaaagagccggaccactgacacctcctaagcctcccagaaggtccgattccattaaatttcagcaccgtctggaaacctccagtgaaagcgaggcgaccttggtggggtcttccccatcaacatctcccccttccgcgttgccaccagacgtggaccctggcgagcccatgcacgcaagcccgccacgtaaggcacgtgtcaggattgcaagctcatactatccggagggcgacggcgacagcagccacttacccgcaaagaagtcctgcgatgaggacctgacctctcagaaagtcgacgagctcggccagaaaagacgcagacccaagtccgcgcctagttttagaccaaagctggcaccagtggtcattcctgcacagtttctagagtag

SEQ ID NO: 220990 - DNA, 2643 bp, synthetic construct
  misc_feature 1..2643: note = Description of Artificial Sequence: Synthetic coding sequence
  source 1..2643: mol_type = other DNA
ggcgcaatcaatatggtggttcgcaggaggaaatccttgggcggtaaagttgtgaccccactccacatcaacctttcagggcagaaggattcagggatctctctcgagaacggcgtttatgccgctgcggtgctgccaggaagccccgcagcgaaggaaggcagcttagcagttggcgaccggatcgtggccatcaacggcatcgccctcgataacaagtcactcaacgaatgcgagtctctgttgaggtcttgtcaggattcactgacactgagcttgctgaaagaacagaagtgtgtgccggcttcaggagagctatcccccgagctgcaggaatgggccccttatagtccaggccattcttcacgtcacagcaacccgcctctttatcctagcaggccatccgtgggtacggtccctcgctcactgacgccttcaacaacagtctcaagcatactcagaaaccctatatatactgtcaggtcacaccgggtgggaccatgctcaagccccccagcagcaagggacgccggaccccaggggctccacccctcagtgcagcatcaaggccgtctgtccctggacctgtcccaccgaacatgcagcgactattccgaaatgagagccacacacggatcgaatagcctccccagttccgcaagactcgggtctagctccaatctccagttcaaggccgagcggataaaaataccaagcactcccaggtacccgaggagtgtggtgggaagcgaaaggggaagtgtgagccactccgagtgctctacacccccacagagccctctcaatattgataccctgtcctcttgttcccagtctcagacctccgcctccacactgccgaggatagcagtgaaccctgcctccctgggcgaacgacgcaaagaccggccttacgtcgaagagccaaggcacgtaaaggtgcagaaaggctcagagcccctcgggatttcgatcgtgtctggcgagaagggcggaatctatgtctctaaggtaacagtcggctccatcgcccatcaggccggactggagtatggggaccagctcctggagttcaatggaattaacctgcgctcagccactgaacaacaggcacgactgattatagggcagcaatgcgatacaataacgattctagctcagtacaaccctcacgtgcatcagttgtctagtcacagtaggtcttcaagtcatctggacccagccggaacacactccaccttgcaaggaagcgggacaactacaccagaacaccccagtgtcattgaccccctcatggaacaggatgagggaccatccactccacccgctaaacagagctcctcaagaatcgccggagatgccaataagaagactctggaacctcgggttgtttttatcaaaaagagccagttagaactgggagtccacttatgcggaggaaatctgcatggggtgttcgtcgccgaggtggaggacgattcaccagcaaaaggaccagacggacttgtgccaggagacttgatcctggagtatgggtctttggatgtaaggaataagacagtcgaggaagtctatgtggagatgctgaaacccagggatggagtcaggctgaaggtccagtaccgcccagaagagtttactaaggcaaaaggtctgcccggtgacagcttctacatccgagccctttacgaccgtctcgccgacgtggaacaggagctgtcttttaaaaaggatgacatcctgtacgtagacgacacactgcctcaggggacatttgggtcctggatggcttggcagctcgatgagaacgcacagaaaatacagaggggtcagattccctccaaatacgtcatggaccaagagttctcgaggcggctcagcatgagtgaggtgaaggacgacaatagtgccactaaaaccctgagtgctgccgcacgaagatctttttttcggcgaaagcacaagcacaagcgcagcggaagtaaagatggtaaggatctccttgctctcgatgcgtttagttcagatagtattcctctatttgaggactccgtctcccttgcatatcagcgggtgcagaaagtcgattgtactgctttgcgtcccgtgctaatcctcggacctctcctcgacgtggtgaaagagatgttggtgaatgaggcgccaggcaaattttgtaggtgccctctggaagtgatgaaggcctcccagcaggccatcgaaaggggggtcaaggactgcctgttcgtggattataaaaggagatcaggccacttcgatgtgaccacggttgcaagcatcaaggaaattactgaaaaaaatcgtcactgtctgcttgatattgcaccacatgccattgaaagactgcaccatatgcatatttatccaatagtgatctttatccactataagtcagcaaaacacataaaggaacagcgggaccccatctacctgcgggacaaggtcacgcagcgtcactccaaagagcagttcgaagccgctcaaaagctggagcaggagtacagccgctactttactggggttatacaggggggtgctctttcatctatctgcacacaaattctggcgatggtgaatcaggagcagaataaagtcctttggatcccggcttgtcctctgtag

SEQ ID NO: 220991 - DNA, 3237 bp, synthetic construct
  misc_feature 1..3237: note = Description of Artificial Sequence: Synthetic coding sequence
  source 1..3237: mol_type = other DNA
atggccccacggaagcggggaggtagggggatctcctttatcttttgctgctttcgcaataacgaccatcctgagataacctatagattgaggaacgattccaacttcgctctgcagaccatggagccggctctccctatgccccctgtcgaagagctggacgtgatgttctctgagcttgttgacgaattggatctaacggacaaacatagagaggctatgttcgcgctccctgccgagaaaaagtggcagatctactgtagcaagaaaaaagatcaggaggaaaacaagggggctacttcttggccagagttctatattgatcagctgaacagtatggccgcaaggaagtctctcctcgctcttgaaaaggaagaagaggaggagcgatctaaaacgatcgagtcgctgaagaccgcgctcagaaccaagcccatgagatttgtgacgaggtttatcgacctagatggactgagctgcatactcaacttcctcaagacgatggattacgaaacctccgaatctcggatacacacctctcttatcggttgtatcaaagccctcatgaataacagccaggggagggcccacgtgctcgcccacagcgaaagtatcaacgtcattgcccaatctctgtccacagagaacatcaaaacgaaggtggctgttttggagatcctgggcgcagtttgcttggtgcccggagggcacaaaaaggtgctgcaggcaatgctgcactaccagaagtacgcttctgagcgcactcgcttccaaacactgatcaacgatctagacaaatctactgggaggtaccgggacgaggtgtcactgaaaactgcgattatgagcttcatcaacgcagttctgagccagggggcaggggtggaatcactggacttccgcttgcaccttagatacgaattcctgatgcttggcattcaacccgtgattgacaagcttagagagcacgaaaattcgacactggataggcacctcgacttctttgagatgcttcggaacgaggatgagctggaattcgcaaagcgctttgagcttgttcacattgatacaaagtcagctacacagatgtttgagctgactcggaagcgcttaacccatagcgaggcctatccccattttatgtctattctgcatcactgcctgcagatgccctataaaagaagtgggaataccgtacagtattggctcctgctggatagaatcatacagcaaattgtcatacaaaacgataaggggcaagatccagacagtacgccactggagaatttcaacatcaaaaacgtcgtgagaatgctggtgaatgagaacgaggtaaagcagtggaaggaacaggcagaaaagatgcgcaaagaacataatgaactacaacagaagctcgaaaagaaagagcgggaatgtgatgcgaaaacacaggagaaagaagaaatgatgcaaaccctcaacaagatgaaggagaagctggaaaaggagacaacagagcataagcaggttaagcagcaggtggcagatctcaccgctcagctgcacgaactgtctcgtagagccgtgtgcgcaagcattcccggaggacctagtcccggagccccagggggaccattcccttcttctgttcctgggagtctcttaccacctcccccaccccctccattgcccggtggaatgttgcctcctccaccccctcccctaccaccagggggtcccccaccccctcccggtccccctcccctgggagccatcatgccaccaccaggcgctcccatgggactggctctgaagaagaagagcatcccacaacctacaaacgcactaaagtccttcaactggagcaaactgcctgagaataagctggagggaacagtgtggacagaaatcgatgacacaaaagtctttaagatattagatcttgaagatttagagcgcacattttctgcataccaacggcagcaggactttttcgtgaacagcaactcaaaacagaaggaagccgacgccatcgacgacaccctttccagtaaactcaaagtgaaagaactgagtgtgatagatggccgacgagcacagaactgtaacattctgttgtcccggttgaaacttagcaatgatgaaatcaagcgggctatattaactatggacgaacaggaagatcttccgaaagacatgcttgagcaattgctcaaattcgtgccagagaagagcgacattgatctcctcgaggagcacaaacatgagttagaccggatggctaaggcagatagatttctgtttgagatgagtaggatcaatcactatcagcagcggctgcagagcctttattttaagaagaagttcgctgaacgggtggcagaagtgaagcccaaagtggaggcaatccgaagtggctccgaggaggtcttcagatccggagcgctcaagcagctcctggaggttgtgttggcgtttggcaattacatgaacaaaggccaacggggtaatgcgtatggttttaagatttctagcctgaataagatcgcggacacgaagtcatcaatagataagaatatcacgcttttgcactacttgattaccattgtggagaacaaatacccgagcgtcctaaatctgaacgaggagctccgcgatattccgcaggcagccaaagttaatatgaccgagttagacaaagagatctcgacactccgctcaggtctgaaggcggtcgaaacggagctggagtaccaaaaatctcagccccctcagcccggtgataaatttgtgagcgtggtcagccagttcattactgttgcgagcttctcgttcagcgacgttgaggacctcctggctgaggcaaaggatctatttactaaggcggtcaaacattttggcgaagaggcgggaaagatccagcccgacgagttcttcggcatcttcgaccagtttcttcaggcagtgtccgaggcaaaacaggaaaatgagaacatgaggaagaagaaagaggaggaggaacgcagggcccgtatggaagcccagctgaaggagcagcgcgagcgcgagcggaaaatgcgtaaggccaaggagaacagcgaggagtccggagaattcgacgacctcgtgagtgcattgaggtctggcgaggtgttcgacaaggacctctccaaactgaagaggaaccggaaacggatcaccaaccaaatgaccgattcaagccgtgaacgcccaataaccaaacttaacttttag

SEQ ID NO: 220992 - DNA, 2649 bp, synthetic construct
  misc_feature 1..2649: note = Description of Artificial Sequence: Synthetic coding sequence
  source 1..2649: mol_type = other DNA
atggctcctcgcaaacgaggcggtcgcggtatatccttcatcttttgctgctttcggaataacgaccacccagaaatcacctacagactgcggaacgactccaacttcgccctgcagactatggaacccgcattgcccatgcccccagtggaggaactggatgtgatgttttcagagctagtcgatgaattagacctcaccgacaagcaccgcgaggccatgttcgcactcccggcagagaagaaatggcagatatattgctctaagaagaaggaccaggaggaaaataagggcgctacctcttggcccgagttttacatcgaccagctcaactccatggccgctagaaagtcattactcgccctcgagaaagaagaggaagaagagcgatcgaagactatcgagtctctgaaaaccgcactgaggactaaacctatgaggttcgttacaaggttcatagacctggatggactttcctgcattctcaactttctcaaaaccatggactatgagactagcgaatctcgcatccatacttcccttatcggatgcattaaggctctgatgaacaactctcaaggtagggcacatgtgctggctcacagcgaaagcatcaatgtgattgcccagtcactgtctacggaaaatattaagactaaggtcgcagtgctagagattctcggagctgtttgtctggtacccggaggccataagaaggtgttgcaggctatgctccattaccagaagtacgcaagtgagcgcactcgctttcagaccctgatcaacgacctggacaagagtacggggaggtaccgggacgaggtcagcttgaagactgctatcatgagtttcatcaacgctgtgctgtcacagggcgcaggcgtggagtccctcgactttcgcctgcacttacgttatgagtttctaatgctgggaattcaaccggttattgacaaactccgggagcatgagaacagcaccctggaccgccaccttgacttcttcgaaatgctgcggaacgaggacgaactggaattcgcgaaacgatttgagctcgtccatatcgatacaaaatctgctacgcaaatgtttgagctgacacggaaacgtctgactcactccgaggcctaccctcattttatgagcatattacaccactgtctccagatgccctataagcgcagtggtaataccgttcagtactggcttttgctagataggatcatacaacaaattgtcattcagaatgacaagggtcaggacccagattctacccctctcgaaaattttaacatcaagaacgtggttaggatgttggtgaatgagaacgaggttaagcaatggaaggaacaagccgaaaagatgcggaaggagcacaatgagctgcagcaaaaactcgagaagaaggaacgggaatgtgatgccaaaacacaagaaaaagaggagatgatgcagacactcaataagatgaaggaaaaactcgaaaaagagactactgaacataaacaggtgaaacagcaggtagccgaccttactgcacaactgcacgagttatcaaggagagccgtctgtgcctctattccaggcggaccttcaccaggggctcccggtggaccattcccatcaagtgtgcctggtagcttgctacctccaccccctcccccaccgctgcccggaggcatgctcccaccccctcctccccctttgccccctggcggaccccctcctcccccagggcctccaccactgggagcaatcatgccccctccaggtgccccaatggggctcgcattgaagaaaaagtccataccccagcccactaatgcgctgaaatcatttaattggagcaagctgcccgagaataagttggaggggacagtttggaccgagattgacgatactaaggtgttcaagattcttgatctggaggacttagagcgtacattttccgcttatcagcgtcagcaggatttcttcgtaaatagcaactcaaagcagaaggaagccgacgccatcgacgatacattatcgtccaagctcaaagttaaggagctctcagtcattgatggtaggcgggctcagaattgcaacattctgctgtcacggttgaaactctccaacgatgagatcaaacgagccatcctcactatggacgaacaggaagacctgcctaaagacatgctcgagcagctgcttaaatttgtgcctgagaaatcagatatagacctcttagaagagcataagcacgaactggacagaatggctaaggcagataggttcctgttcgagatgtctcggatcaatcactaccagcagagattacagagtctgtactttaaaaagaaatttgccgaacgagtggcttttgggaactatatgaataaaggtcagcggggtaacgcatacgggttcaagatatcttctcttaacaagatcgcagatacaaagtcttctattgataaaaacattaccctcctccactacctcatcacaatcgtcgagaacaaataccccagcgtcttaaatctgaatgaagagcttagggatattcctcaagccgctaaagtgaagtcttggaatatccgttctctgtctccccatagtcctgaaatttccctgtgcctgctcagcgcttcctcttcacaatag

SEQ ID NO: 220993 - DNA, 3207 bp, synthetic construct
  misc_feature 1..3207: note = Description of Artificial Sequence: Synthetic coding sequence
  source 1..3207: mol_type = other DNA
atggctcctcgcaagagaggcggtcgcggtatttcattcatcttctgttgtttccgcaataacgaccatcccgaaatcacatacagactgcggaacgattctaactttgcgcttcaaaccatggaacccgctttacctatgccaccggtcgaagaactggatgtcatgtttagcgaacttgtggatgagttagacctcacggataagcatagagaagcgatgttcgctctccccgctgagaagaagtggcagatttattgctctaaaaagaaggatcaggaagaaaacaagggagccacctcctggccggaattttacatcgaccagctgaatagcatggcggcacgaaagagcttgctggccttggaaaaagaggaagaggaggaaaggtccaagactatcgagtccctcaagacagcattgcgcactaaacctatgagatttgtcactagatttattgacctcgacggcctgtcctgtattctaaactttctgaagacaatggactacgaaacgagtgaatcccggattcatacttcactgataggttgcattaaagccctgatgaacaactcacagggtagagctcacgttctggctcactccgagtcaatcaatgtgattgcccagagtctgtccaccgaaaacatcaaaaccaaggtcgctgtcctcgagatccttggagccgtctgtttggttccaggaggacataaaaaggttttgcaggcaatgcttcactatcaaaaatacgcgtcagaacggactcggttccagactctcattaatgatttggacaaatccactgggaggtaccgtgacgaagtatctcttaagactgctattatgagcttcattaatgccgttcttagtcagggcgctggcgtggaaagtctggacttccggcttcacctccgctacgagttcctgatgctgggcatacagccagtcatcgataagctccgagagcacgagaacagcactcttgatcgacacctcgacttctttgaaatgctgaggaacgaagatgagctggagtttgccaagaggtttgagctcgttcacatcgatacaaagagcgctacacagatgtttgagctcacacgcaagagactgacccattccgaggcctatcctcattttatgtccattttacaccactgtttacagatgccatataagcgcagcggtaatacagtgcagtactggctgttactggatcgtataatccagcagattgtcattcaaaacgacaaaggacaggaccccgactccacacccctggaaaacttcaacatcaaaaatgttgtgcgcatgctcgtaaacgaaaacgaagtcaaacaatggaaagaacaggcagaaaagatgcgtaaagaacataacgaacttcaacagaagttggagaagaaagagcgagaatgcgatgccaagactcaagaaaaggaggagatgatgcagacactgaataaaatgaaggagaaacttgagaaggagaccaccgagcacaaacaagtgaagcaacaggtggctgacctgaccgcacagctgcacgagctaagtagaagagccgtgtgcgcttctatcccaggaggcccatcaccaggtgcaccgggaggaccgttcccaagtagtgttcccggatccttactgcctccccctcctcccccacccctaccagggggtatgctgcctccgccacctcctccgctgcctccgggaggccctcctccccctcccggaccgccaccattgggagccattatgcccccaccaggggcaccgatggggctggccctgaagaaaaagtcgatcccacagcccacaaacgccctcaaatctttcaactggtcaaagttgcccgagaacaaactggaaggaactgtctggacggaaatcgacgatactaaggttttcaagatcttggacctcgaagacttggagcgtaccttcagtgcctaccagcggcagcagaaggaggccgacgcaatcgatgatacgctcagcagcaaattgaaagtgaaggagcttagcgtgatcgacggcagacgagctcagaattgcaacattttgctgtcccgactcaagctgagcaacgacgaaatcaagcgggctatcttgaccatggatgagcaggaggacttgcccaaggacatgttggagcagttactcaaatttgtgccagaaaagagcgacattgacctgctggaggaacacaagcacgaactggatagaatggctaaggcagatagattcctctttgagatgtcccgaattaatcattaccagcaacgccttcagtcactttactttaagaaaaaattcgccgagagagtcgctgaagtgaaacctaaggttgaagcaattcggtccgggtctgaggaagtgttcaggtcaggtgctctcaagcagttattagaagttgtgttggcctttggcaactacatgaacaagggccaaagaggaaacgcctacggatttaaaatcagcagtctgaacaaaattgcagataccaaatcgagtatagacaagaatattaccctgctgcactacctgatcacaattgtcgagaacaagtacccctccgtgcttaatctgaatgaggaattgcgcgatattccccaggccgcaaaggttaacatgaccgagctggacaaggagataagcacacttaggtccggactgaaagccgtggaaacagaactagagtaccagaagtcccaacctcctcaaccaggcgataagtttgtcagcgtggtctcacaattcatcacagtagcctccttctcgttcagcgacgtggaagatctgctcgccgaggcaaaggatctgttcaccaaagccgttaaacatttcggcgaggaagcaggaaagattcagccggacgaatttttcggcatctttgatcagtttctgcaggcagtaagcgaggcaaagcaggagaacgagaacatgcgaaagaagaaggaggaggaggagcgccgtgcccgtatggaagcacagcttaaggaacaaagggaacgagagcggaagatgagaaaggccaaggagaactctgaagaatctggggagttcgatgacctggtgagtgctctgagaagcggagaggtgttcgacaaggatctgagcaagctgaagcggaaccggaaaagaatcacaaaccaaatgactgactcatctcgggaacgcccaattactaaactcaacttctag

SEQ ID NO: 220994 - DNA, 3237 bp, synthetic construct
  misc_feature 1..3237: note = Description of Artificial Sequence: Synthetic coding sequence
  source 1..3237: mol_type = other DNA
atggcgcctagaaaacgcggtggcagggggatatcttttatcttctgttgctttaggaacaacgatcacccagagattacataccgccttagaaacgactccaacttcgcgctgcagaccatggagccagccttgccgatgccgccagtggaggaactggacgtgatgtttagtgagttagtggacgagctggacctgactgacaagcatcgggaagcaatgttcgccctcccagccgagaaaaagtggcaaatatactgctctaagaagaaagatcaggaagaaaataaaggcgctactagctggcccgagttctatatcgatcagttgaatagcatggctgcacgtaagagtctcttggctcttgagaaagaagaggaagaagaacggagtaagacaattgagtctctgaaaactgccttgagaacaaaacctatgaggttcgtaactcgtttcattgacctcgacggcctcagttgtattctaaattttttgaaaaccatggattatgaaacgagcgagtcacggatccacacgtctctcattggatgcatcaaagccctgatgaacaattcccaggggagagctcacgtgctagcccacagcgaaagcatcaacgttatagcgcagagcctgtctacagagaatataaaaactaaggtagcggtactagagattctaggagctgtgtgtctcgtccctggtggacacaagaaagtgctccaagcgatgctgcactatcagaaatatgcgtcagaaagaacaagattccaaacattaatcaacgatctcgacaagtccacaggtaggtaccgggacgaggtgtcattaaaaaccgcgatcatgagttttatcaacgcggttctgtcacaaggggcaggtgttgagtcactggattttcggctgcacctgagatatgaattcttaatgctgggcatccagcctgtgatcgacaagctgagagagcacgagaattctacgctggatcgtcatctcgattttttcgaaatgttaagaaacgaggacgagttggagttcgccaaacgattcgagctggtgcacatagacactaagtccgccactcagatgttcgagcttacaagaaaaaggctgacacactctgaggcctatcctcacttcatgtctatcttacaccattgcctccagatgccctacaaacgttcggggaacaccgtgcagtactggctgttgctggatcgcattattcagcaaatagtgattcaaaatgacaaaggccaagacccagactctacccccctcgagaattttaacattaaaaatgttgtgcgaatgttggtgaatgagaatgaggtcaaacagtggaaggagcaggcagaaaaaatgcggaaggaacacaacgagttgcagcagaaactggagaagaaggagcgagaatgcgacgccaagacccaagagaaggaggagatgatgcagacattaaataagatgaaggaaaagctggaaaaagagactactgagcacaagcaagtgaagcagcaagtggccgacctgactgctcagttacatgagctctctcggagagccgtttgcgcaagcatccctgggggacccagcccaggcgctcccggtggaccttttccgagctcagtcccagggtctctgctccctcctcctcccccaccccctctaccgggtgggatgcttccaccgccaccacccccactgcctcccggaggacctcctccaccgcctgggcctccaccactgggcgcaatcatgcccccaccaggggcacctatggggctggccctcaagaaaaaatcaattcctcagcctaccaacgcattaaagagctttaactggagtaaattgccagagaacaaattagagggtacagtttggacagaaattgatgatactaaagttttcaaaatattagacctggaagacctcgaacgtaccttctcggcctaccagcgacagcaagacttcttcgtcaatagcaactcaaagcaaaaggaggccgacgcgatagacgatacattgagcagcaagctgaaggtcaaagagctcagtgttatcgatgggagacgtgcacagaattgtaacattctgctgtcccgacttaagctgtctaatgatgagattaagcgggctatactgactatggacgaacaagaggaccttccaaaagatatgctggaacagctccttaagttcgttccggagaaatcggacatcgacctgctggaagagcacaaacacgaactggataggatggcaaaagccgaccgtttcctgtttgaaatgagcaggatcaatcactaccagcaaagattgcagagtctctacttcaagaaaaagttcgcagagagagtggctgaggtcaagccgaaagtggaagctatcaggtccggatctgaagaagtgttcaggtctggtgctctgaagcagctgctcgaggtggtgctcgccttcggcaactacatgaacaagggacagcgtggcaacgcctatggctttaaaatttcaagcctaaacaagatcgccgatacaaagagctccattgataaaaacataacactcctacactatctgattacgattgtggagaacaagtatccctcagtgctaaacctaaacgaagagctgagagacattccccaagcagccaaggtcaacatgaccgagcttgataaggaaattagcactcttcgtagtggcctgaaggcagtggagaccgagctggagtatcagaagtcacagcctcctcaacctggagacaaattcgtttctgtcgtctcccagttcattactgtagcatccttcagtttctccgacgtggaagaccttctggcagaggctaaggatctgtttaccaaggcagttaagcattttggcgaagaggctggaaagattcagcccgatgagttttttggcatttttgatcagtttctacaggcggtcagtgaagccaaacaggagaatgagaatatgcgcaagaaaaaagaagaagaagagaggagagcaagaatggaggcccagcttaaggagcaacgggagcgcgagcgcaagatgcgtaaagcgaaagaaaactccgaggagtccggcgaattcgatgatttggtatctgccttgagaagtggcgaggtctttgataaggatctgagtaaactaaagcgcaaccgcaagaggataaccaatcaaatgaccgacagcagccgggagaggcctattacgaagctcaatttctag

SEQ ID NO: 220995 - DNA, 3207 bp, synthetic construct
  misc_feature 1..3207: note = Description of Artificial Sequence: Synthetic coding sequence
  source 1..3207: mol_type = other DNA
atggctccacggaaacgctcacatcacgggctcggcttcctgtgctgttttggcggttccgacataccggagataaatctcagggacaaccaccctctgcagttcatggaattttcgtcaccgattcctaatgctgaagagctcaatattcgattcgccgaacttgtcgacgagctggatttgaccgacaagaatagagaggctatgttcgctctgccccctgaaaagaagtggcagatttactgtagcaagaaaaaagagcaggaggatcccaacaagctggccaccagttggccagactattacatcgaccgaattaatagcatggccgctatgcagagcctatatgcctttgacgaggaggaaacggagatgaggaatcaggtagtggaggacctgaaaacagctctgaggacacaacctatgagattcgtcacacggtttatcgagctggagggcttgacctgtctgctgaatttccttcgctctatggatcacgcaacttgtgaaagtaggatccacaccagtctcatcgggtgtatcaaggcactgatgaataactcacaaggccgagcccatgtcctcgcccagccagaggcaatttccaccattgctcagagccttcgtactgagaactcaaagaccaaggtcgctgtgcttgaaattcttggcgctgtctgtctcgttcccggaggccacaaaaaagtgctgcaggccatgttacattaccaggtctatgcggctgagcgtacacgcttccagacgctgctcaacgaactggaccgctctctgggtcggtatcgcgatgaggtaaatctgaagaccgcaattatgtcttttataaacgcggtattaaacgccggagccggagaggataacttggagttcaggctgcacctccggtatgaatttctcatgctgggaatacagcctgtcattgacaagttgcgtcagcatgagaatgcaatcctggataaacaccttgacttctttgagatggtcagaaatgaagacgatcttgagctcgctaggcgttttgatatggtgcacatcgacactaagtccgcctcacaaatgttcgagctgatccacaaaaagttaaaatacacagaggcttatccctgcctgctgtcggtgctgcaccactgcctccagatgccttataagcgtaacgggggatactttcagcaatggcaactgctggaccgcattctccagcagatcgttctccaggatgagcgcggagtcgaccctgacttggctccactggagaatttcaatgtcaagaatatcgttaacatgctcatcaatgagaatgaggtgaagcaatggcgagatcaggcagaaaagtttcgcaaagagcacatggaactagtgagccgcttggaacgcaaggaaagagagtgtgaaaccaaaacactggagaaggaagaaatgatgagaaccctgaataaaatgaaggacaaattggctagggagtctcaggagctaaggcaggcacgaggacaggtggctgagctagttgctcagctgagtgagctgtctacgggaccagtgtcctcaccaccaccaccagggggtcctctgaccctttcttcctccatgacaaccaatgacctgcccccaccaccgcctcctctgccctttgcgtgctgccccccacctccgccaccgcctttgccccctggcggacctcctacaccccctggggctcccccttgcctgggcatgggcctgcccttgccacaagatccttatccttccagtgacgtgccactccgcaagaagagggtgccgcagccctctcatccactcaaatcatttaactgggttaagctgaatgaagaaagagttccagggaccgtctggaacgagatcgacgacatgcaggtttttcgcatcctcgatttagaggatttcgaaaaaatgttttcagcttaccagcgccaccagaaagagctggggtcgacggaggatatttacctggcttccagaaaggttaaggagctcagtgtgatcgatgggagacgcgcacagaattgcatcattctcctgtctaagttaaagctctcaaatgaggagatccggcaggccatcctgaaaatggacgagcaggaagacctggccaaggatatgttggagcaactactgaaattcatccccgaaaaaagtgatatcgacctcctcgaggagcacaagcacgagattgagcgaatggcacgtgccgaccgtttcctgtacgagatgtcccgtatcgatcactatcagcagcggctccaagctcttttttttaaaaaaaaattccaggagcgcctggcagaggccaagcccaaagtggaggctatactgctagcctctcgagaattagtccggtcaaagagactcaggcagatgctagaggttatccttgcgatcggcaatttcatgaataaagggcagcgaggcggagcatatgggttccgggtcgcctcactcaataaaatcgctgatacaaaatcctctatcgatagaaacatcagtttgctgcactacctgattatgatcctcgagaagcacttcccagacattctgaacatgcctagcgaattgcagcatctgcctgaagcagctaaagtgaatttggccgaactggagaaagaagtgggaaatctgcggagaggcctccgcgcagtggaggtcgaactggaataccaacggcgacaagtcagggagcccagtgataagtttgtccccgtgatgagcgattttataactgtgagttcgtttagcttctccgagctcgaagatcagctgaacgaagccagggacaaatttgcaaaagctttgatgcactttggcgaacacgatagtaagatgcagcctgatgagttttttggcatttttgatacttttctgcaagcttttagcgaagctaggcaggacctggaagccatgcgtcggcgtaaagaggaagaagaaaggcgagctaggatggaagctatgttaaaggagcagcgagaaagggagcgatggcagagacagagaaaagtgctggccgctggttcttcgctggaagaaggcggtgagtttgatgatctagtgtcagctctgaggtcaggtgaagtgtttgataaggacctgtgcaaattaaaaagatctcgcaaacggtccggctctcaggcgctggaagttactcgcgagagggcgattaataggttgaattattag

SEQ ID NO: 220996 - DNA, 3207 bp, synthetic construct
  misc_feature 1..3207: note = Description of Artificial Sequence: Synthetic coding sequence
  source 1..3207: mol_type = other DNA
atggctcctaggaaaaggagccaccatgggctggggtttctgtgttgctttgggggatcggacataccagagatcaatttacgcgataatcaccctctccagtttatggaattcagctctccaatccccaatgccgaggagctgaatatacgctttgctgaacttgtggatgagctggatcttactgataaaaaccgggaagcaatgtttgcccttccgccagaaaagaagtggcagatttattgttccaagaagaaggagcaggaagatccgaacaagctggcaaccagctggcctgactactacattgatcgcatcaactccatggccgcaatgcaaagtctgtatgcctttgatgaggaggaaaccgagatgcggaaccaggtggtggaggatctgaaaactgccttgcgtacacaaccaatgcgatttgtcactcggttcattgaactcgaagggcttacatgcctgctgaactttctcagatcgatggaccacgctacatgtgaatctaggattcacacatctctcatcgggtgcatcaaggcacttatgaataactcacaggggagagctcacgtattagcccagcccgaagctatctccacaatcgctcagagtctcagaacagagaactcgaaaactaaggtggctgtgctggagatcctaggagcggtgtgcctcgtaccaggcggacacaagaaagttctccaggccatgctccactaccaagtttatgcagctgagcggactagattccaaacactgttaaacgagttggatcgcagtctcggcaggtaccgcgacgaagtgaacctgaagacagccattatgtcttttatcaacgctgtgctcaacgccggagccggtgaggacaatctggagtttaggctccacctaagatacgagttcttgatgttggggatacagccggtcattgacaagctacgccagcatgaaaatgccatccttgataagcacctggatttttttgagatggttagaaacgaagatgacctggaacttgccagacgttttgacatggtgcacatagacacgaagtccgcatcacagatgttcgagttgatccataagaagctcaagtataccgaagcgtatccttgccttttgagtgttctgcaccactgcctgcagatgccttataaacgaaatggtggttacttccaacagtggcaactgctggatcggatattgcaacagatcgttttgcaggacgagcgaggcgtcgacccagaccttgcgcctctggaaaatttcaacgtcaagaatatcgtcaacatgctcattaatgagaatgaggtgaagcaatggcgagatcaggccgaaaagtttcgcaaggaacacatggagctggtgtcaagattggagcggaaagagcgggagtgcgagactaagacattggagaaggaagagatgatgagaaccctcaacaagatgaaggacaaactggccagagagtcacaggagctgcggcaagctcgcggtcaggttgccgaactagtggcccaactgtcagaactctcaacaggaccagtatctagccccccaccccctggcggaccacttactctgtcgtctagcatgaccactaacgacctacctccccctccgccacccctgcctttcgcatgctgccctcctcctccacccccaccgctgccgcctggaggtcccccaacacctcccggagcacctccctgcctggggatgggactgcccctgccccaggatccctacccaagcagcgacgtgccactccgcaaaaaaagggtaccacagccctcacaccctctgaaaagcttcaattgggtcaagctgaacgaggaaagagtccccggtaccgtgtggaacgaaattgatgacatgcaggtgttcaggatcctggatctagaagactttgaaaagatgttttccgcctatcagcgtcatcagaaggaactcggctccactgaagacatatatttagcctctagaaaagtgaaggagttgtccgtcatagacggacgacgagcgcagaactgcataatactgctttctaagctcaaactgagtaacgaggaaatacggcaagcaatactaaagatggacgagcaggaagaccttgctaaggacatgttagaacaactgctgaagtttatcccagagaaaagcgacattgacctgttggaagagcataagcacgaaattgaaagaatggctagggccgatcgcttcttgtatgagatgagcaggattgatcattaccaacaacggttacaggccctcttttttaagaagaagtttcaggaaaggctcgctgaggcgaagcccaaggtcgaggcaattctcttggccagccgggaactggttaggtccaagcgcttacggcaaatgctggaagtcattttggccatagggaacttcatgaacaagggccaacggggaggcgcttacgggttcagagtcgcatctctgaacaagattgccgatacgaagtcaagcatcgatcgcaacatctccctgctccactacctgattatgatcttggagaaacatttcccagacatactcaatatgccatcagaactccaacatttgcctgaagcagccaaggtcaatctcgccgagctagaaaaggaggtaggtaaccttagaagaggtctaagagccgttgaggtggagcttgagtaccagcgccgacaggtgagggaaccatccgataagtttgtacccgtgatgtctgacttcataacagtcagtagcttcagtttctcagagctggaagatcaacttaacgaagcccgagacaaatttgcaaaagccttgatgcacttcggagagcatgactctaagatgcagcctgatgaattctttggtatcttcgatacttttctgcaagcgttttccgaggcaaggcaggacctggaagctatgcggaggcgcaaagaggaggaggaacgtagggcacggatggaagccatgttgaaggaacagagagagagggagcggtggcagagacagaggaaggtgctggctgcaggtagcagtctggaagaaggcggagaattcgatgatcttgtctcagcactgcggtcaggggaagtgtttgacaaggacttatgtaaactgaaaaggtcccgcaaacgctccggctcccaagcactggaagtgaccagagagcgcgcaatcaaccggctgaattactag

SEQ ID NO: 220997 - DNA, 399 bp, synthetic construct
  misc_feature 1..399: note = Description of Artificial Sequence: Synthetic coding sequence
  source 1..399: mol_type = other DNA
atggctccaaggaagcgatcccaccatggcctgggattcctctgttgttttggagggagcgacatacccgaaataaatttgcgggacaatcaccctctgcaatttatggagttcagctcccccatcccaaacgctgaggagctcaacatcaggtttgcggagctggtagatgaactggacctcacggacaagaaccgcgaggccatgttcgcgttgcctccagaaaagaagtggcagatttactgcagcaagaagaaggtcccgtcacttaccccattagccacaagtcaagggtcctggcatggggttgctctcgctgctctggcatgctcctgtatccacctgatgttcattacgtgtcagccttgtagcaggtgttggcgaaataactccgagtag

SEQ ID NO: 220998 - DNA, 3204 bp, synthetic construct
  misc_feature 1..3204: note = Description of Artificial Sequence: Synthetic coding sequence
  source 1..3204: mol_type = other DNA
atggcccctagaaaacggagccaccacggactgggattcctgtgttgttttggcggatccgatatccctgaaatcaatttgcgggacaatcaccccctgcagttcatggaattttcaagccctattccaaacgccgaagagctcaacataaggttcgcagaactggtcgacgagctcgacctaactgacaagaatagggaagccatgtttgcattaccacctgaaaaaaagtggcaaatatattgctcaaagaagaaggaacaggaagacccaaataagttggcaacctcatggccagactattacatagacaggattaacagtatggccgcaatgcagtcactgtatgctttcgacgaagaagagaccgagatgcgcaatcaggtggtggaagaccttaaaactgccttacgcacacagccaatgagatttgtgacccggtttattgagctcgaggggttgacatgcctgctgaactttctgagaagtatggatcacgcgacctgcgagagtcgcatccacacatctctaatcggctgcatcaaagcactcatgaacaactctcagggcagggcccacgtgcttgcccaacctgaagcaatctctaccattgcacagagcctacggaccgaaaatagtaagactaaagtagcggtacttgagattctcggagccgtttgcttggtccctgggggacacaaaaaggtgttgcaggcgatgctccactatcaggtctacgcagccgagagaactagattccagacactgctgaacgaactggatcgcagcctgggacgttacagagacgaggtcaacctgaagacagccattatgtctttcattaatgctgttctgaacgccggtgcaggagaagacaacctcgagttcagattgcacttacgctacgagttcctgatgctgggaattcaacctgttatcgacaaactgcgtcagcacgagaatgccattcttgataagcacctggactttttcgagatggtccggaacgaggatgacctggaactggcccgacggttcgatatggtgcacatcgatacaaaatcagcctcccagatgttcgagctgattcataagaagctgaagtacaccgaggcatacccttgtctgttgagcgtgctgcatcactgcctccagatgccttataagagaaacggtgggtattttcagcagtggcagctactggacagaatccttcaacagattgtcctgcaggatgagcgaggcgtggacccagatctggccccactcgagaatttcaacgtcaagaacatcgtgaacatgcttatcaacgagaatgaggtgaagcaatggcgggaccaagctgaaaaattccgtaaggaacacatggaattagtgtcccgcctggagcgaaaggaaagagagtgtgaaacaaaaactcttgagaaggaggagatgatgaggacactgaataaaatgaaagacaagcttgcgagggagagccaggagttgaggcaagccagggggcaggtggcagagttagtggcccaattgagcgagctatccacagggcctgtgtcttcccctccaccacccggtggcccactgacactttcatcctcaatgacgacaaatgatctgcccccaccaccaccccctctgccctttgcctgttgtcctccacctcctccacctcctctgccacctggcggaccacccaccccacccggagctccaccatgtctgggcatggggctgcctctgccccaggacccgtaccctagctctgatgtacccctccggaaaaagcgcgtgccacaaccaagccatccccttaagtccttcaactgggttaagctgaacgaggagcgtgtgcccggtaccgtgtggaatgagatcgatgacatgcaggtgtttcgaatccttgacctagaagatttcgaaaaaatgttcagcgcctaccagaggcaccagaaagaactggggtcaacagaggacatctacctggcgagtaggaaagtcaaagaactctcagttattgacgggagacgggcacagaattgcatcatcctgctaagtaagctcaaattaagtaatgaggaaatcaggcaggccatcctcaagatggatgagcaggaggatctggccaaagatatgcttgagcagcttctcaagtttattcctgagaagtccgatatcgacctcctggaggagcataaacacgaaattgagcgaatggcccgtgccgaccgattcttgtacgaaatgagccggattgaccactatcagcaacgcctccaagctctatttttcaaaaagaagtttcaggaacgtcttgcggaagcaaaacccaaagttgaagctattttgttggcctctcgagaactggtacgttctaaacgtctgcgccagatgttggaggtgatactcgccatcggcaattttatgaataaaggccagcgaggtggagcttatggtttccgcgtagcctccctcaataagatcgctgataccaaatcgtctatcgatcgcaacatcagcctgctccattacctgattatgattctggagaagcacttccctgacattctcaatatgccttctgagctccagcacctccctgaggccgcaaaggtgaatctcgccgagctcgagaaagaggtggggaacctgcggcgagggctccgtgcagtagaggtcttggaataccagcgtagacaggttagagagccctcagacaaatttgtgcccgttatgtcagactttattacggtgtcaagcttctccttctcggagttggaagaccaactcaatgaggcacgggataagtttgcaaaagcactgatgcatttcggcgagcatgactctaaaatgcaaccagacgaattcttcggtatatttgacacctttctgcaggcattcagtgaggctcggcaggacctagaagccatgcgccgacgcaaggaggaagaagagcgtagagcacgcatggaggcaatgctaaaagagcagcgggagcgtgagagatggcagcgccaacgtaaggtactggccgcaggctctagtctagaggagggcggagagtttgacgatttagtgtcagctctgagaagtggtgaggtctttgataaagacctgtgcaagctgaaaaggtctcgcaaacggtccggcagtcaggccctcgaggttacaagggagcgggctataaacaggctgaactactag

SEQ ID NO: 220999 - DNA, 1062 bp, synthetic construct
  misc_feature 1..1062: note = Description of Artificial Sequence: Synthetic coding sequence
  source 1..1062: mol_type = other DNA
atgggtgcactcttgtgtgaccatcgctcctgtcgcccaatttccctaacagtggccaagtgttgggatccaactccaaggtcctactttacagtacctagagctgacccagtgagacctatcgatcctgctgcctggctgagccacaccgctgccctgaccggcgcattgccgagatatgaactggaggaggcccctctgaccgtgaaatcagatatgtccgctgtggtccgtgttatgcagctacccgatagcggcttagaaattcgggacagaatgtggctgaagataacaattgcaaatgcggtcataggggcagacgtcgtcgactggttatacacacacgtggagggcttcaaggaacgtcgagaggcgaggaagtatgcgtccagtctgctcaaacacggttttttacggcacaccgtgaataaaattacattcagtgaacagtgctattacgtgttcggagacttgtgcagcaacctggccacactcaatctcaatagcggttctagtggcacctcagaccaagacacgctggctccactgccccatccagcagccccttggcctttggggcaggggtacccctatcagtaccctgggccacctccctgtttcccccctgcttaccaggaccctggcttctcttacggcagtggatccaccggctcacagcagagcgagggaagcaagtcaagcggctcgacccggtcatctagaagagcccctggtcgcgagaaggaacgcagagcagctggtgccggtgggagtggatccgagtcggaccatacagccccttccggcgtcggcagttcctggcgggagagacctgcagggcagctctctagagggtcctcgcccagaagtcaggccagtgccaccgctcctggcttgccaccaccacatccaaccaccaaggcatacaccgtagtcggcggacctccagggggacccccagtcagagagctcgctgcagttccgccagaattgactggatcacgccagagtttccaaaaagctatgggcaatccttgtgagttttttgttgacattatgtag

SEQ ID NO: 221000 - DNA, 1335 bp, synthetic construct
  misc_feature 1..1335: note = Description of Artificial Sequence: Synthetic coding sequence
  source 1..1335: mol_type = other DNA
atggctgagacaaaaatcatataccacatggacgaagaggaaacaccctacttggtgaagttgcccgtggctcccgaaagggtcactttagctgattttaagaacgttctctccaaccgtccggttcacgcttacaaatttttttttaagtccatggaccaggattttggtgtagttaaggaagaaatattcgatgacaatgcaaaactgccttgttttaatggccgagttgtgagctggcttgtcctcgccgagggagcacactcagatgcgggtagtcaaggtacagactcccacactgacttgcctccgcctctggagaggaccgggggaattggggattctagaccaccttcattccatcccaatgttgcgtctagcagggatggaatggacaatgagaccggcactgagtcaatggtttcacatcgaagggagagagctagacgtagaaacagagaagaggccgcaagaaccaatgggcaccccaggggcgatcggagaagggatgtcgggctccctccagactccgcttcaacagctctgtcctctgaactggaatcatcttcatttgtggactcagacgaggatggctctaccagccgtctctcatctagcactgaacaatcaacatctagcagactaattcgaaagtacgcgagtagcctgctgaagcacggattcttgcggcacacggtaaacaagatcaccttctctgaacagtgctactatgttttcggggatttatgttcaaatctagccaccttgaacctcaactccgggtccagtggcacctccgatcaggatacgcttgcaccactgccacatcccgctgcgccttggcccctgggtcaagggtatccttaccaataccctgggccacccccttgcttcccgccagcttatcaggaccccggattttcgtacggcagcggatctacagggagccagcagtccgagggaagcaaaagttctgggtctacccgttcatctaggcgagcccctggcagggaaaaagagaggcgagcggctggggcaggcggaagcgggtccgagagtgaccatacagcaccatctggagtcggatctagctggagggagagacctgcaggtcagttatcacgaggaagctccccacgatcgcaggcaagtgcaactgccccaggcttgccccctccccaccctaccactaaagcctacaccgtcgtggggggaccgccaggcggtcctccggtcagagagctggccgcagtgcccccagagctgactggatcccggcagtcatttcagaaagctatgggaaatccttgcgaatttttcgtcgacatcatgtag

SEQ ID NO: 221001 - DNA, 2088 bp, synthetic construct
  misc_feature 1..2088: note = Description of Artificial Sequence: Synthetic coding sequence
  source 1..2088: mol_type = other DNA
atggctgaaacaaaaataatttatcacatggatgaggaggagacaccttatctagttaaattacccgttgcccctgagcgggtaacactggcggactttaagaatgtcctatcaaatcgacctgtgcacgcatacaaattcttttttaaatcgatggatcaggatttcggcgtagtaaaagaggagatctttgatgataatgccaagttaccctgctttaacgggagggtggtctcctggctggtgctggccgagggggctcatagcgacgctggcagccaagggactgactcgcatactgacctaccaccccctctggaacgaacaggaggaattggcgattccaggccaccctcctttcatcccaatgtcgcaagcagtagagacggcatggacaacgaaactggcacggaatccatggtgagtcaccggcgtgaaagagctcgccgaaggaatcgtgaggaggccgcacgaaccaatggccacccccgaggagaccgccgaagagatgtgggcttgccgccagactcagcttctactgccctgtcttctgaacttgaaagctcctcatttgtcgacagcgatgaggacgggtctacatctcgattgtcgtccagcacggaacagtccacttccagccggctcataaggaagcacaagcggaggagaaggaagcagaggttaagacaggcggaccgggcatcatcattcagcagcattacagactcaacaatgagcctcaacatcgttactgtgacactgaatatggagagacatcactttctcggaattagcatcgtggggcagagcaatgacaggggagatggtggcatatatattggctcaattatgaaaggaggcgctgtcgccgcagatggcaggattgagccaggggatatgctgcttcaagttaacgacgtcaattttgagaatatgagcaatgacgacgcagtgagggtgttgcgcgagattgtgtcccagaccggacctatctcactcaccgtcgcaaaatgttgggaccccactcccaggtcttattttaccgtgccgcgagccgacccagttcggcctatcgatcctgctgcatggcttagccatactgccgcactgacaggcgctctgccacggtatgggactagtccctgtagctccgctgtgactcggaccagctcttcctcactcacatcttccgtgccgggtgccccacagctggaagaagcgccactgaccgtcaaatctgatatgagtgccgttgtgagggtcatgcagctgcccgattcaggtctcgagatcagggatagaatgtggctcaagataacgatcgcaaatgccgtgattggcgctgacgttgtggattggctctatacacacgtcgaaggctttaaggaacggagggaagcgaggaagtatgcctcctccctgctcaagcatggcttccttcggcacacagtaaacaagatcacatttagcgagcagtgctactacgtcttcggggatttgtgctccaacctcgccacccttaacctgaactctggctctagcggcaccagtgatcaggacaccctggcaccactgccgcacccagctgcaccatggccgctgggccagggctacccttaccagtaccctggcccaccaccctgttttccgcctgcttatcaggatcccggttttagctacggctctggcagcactggaagccaacagtccgagggaagcaagtcttcaggatcaaccaggtctagccgcagagcacctggcagagaaaaagagaggagagcggctggcgctggtggctctgggtccgagagtgatcacaccgcaccctccggggttgggtcctcttggcgtgaacgaccagccggacagcttagtagaggctccagcccacgctcgcaggctagtgcaaccgctcccggtcttccccctccccaccctaccacaaaggcctatacagtcgtgggcggtccacctggtggccctcccgttcgcgaactggccgctgttcccccagagctcacgggctcccgtcaaagctttcagaaggcaatgggaaacccgtgtgaattctttgtcgatataatgtag

SEQ ID NO: 221002 - DNA, 2013 bp, synthetic construct
  misc_feature 1..2013: note = Description of Artificial Sequence: Synthetic coding sequence
  source 1..2013: mol_type = other DNA
atggccgaaactaaaattatttaccacatggatgaggaggagaccccctacctggtcaagctccccgttgccccagagagggtcacactcgccgactttaagaatgtgctttcgaacagacccgtacacgcttacaagttcttcttcaaatcgatggaccaggacttcggggtggtgaaagaggaaatcttcgacgataatgccaagctgccatgcttcaatggcagggttgtgagctggctcgtgctggcagagggagcccacagcgatgcaggcagtcaaggcacagattctcatacggaccttccccctccattagaacgtacaggaggcataggcgactctcggcctccctccttccaccctaacgtggcatccagccgagacggtatggacaacgaaaccggcactgagtcaatggtatcccaccgtagagagagagcacgccgacggaacagagaggaagccgctagaactaacgggcaccctcggggtgacagacgcagggatgttggtctgccaccagactctgcatctaccgccctctctagcgagttggagtccagctctttcgtggactctgacgaggatggctctacatcacgcctatcttcgtccaccgagcagtccaccagctcacgtctgatccggaaacataagcgcaggcggcgtaaacaaaggctcaggcaagctgaccgagctagctcattttcatcaatcaccgatagtacaatgtcccttaacatcgtcactgttacacttaatatggagaggcatcattttttaggtattagtatcgtcggccaatctaatgatcgcggtgacggaggcatctacatcggaagcataatgaaaggaggggctgtggcagccgatgggaggatcgaaccaggtgatatgctgctacaggtgaatgacgtgaacttcgaaaacatgagtaacgacgacgctgtgcgcgtgcttcgagagatagtgtctcagacaggccctatcagcctcacagtcgccaagtgttgggatccaacccccaggagttatttcactgtgccgagagccgatcctgttcgcccaatcgaccccgctgcctggctgagtcatactgccgcactgaccggagcactgcctagatacgagctggaggaagccccacttaccgtgaaatctgatatgtctgcggtggtccgcgtcatgcagctgcccgactccggactcgagatccgggacaggatgtggctgaaaattacgattgctaatgcagttattggcgcagatgtcgtggactggctttacactcacgtggagggctttaaagagagacgggaagccaggaagtatgcctcttcactgctgaagcatgggttcctaagacacaccgttaacaagatcacattttctgaacaatgttactatgtcttcggcgatctgtgttcgaacttagctactctgaatctaaattcgggttcttctgggacctctgatcaggacacccttgcccctttaccacatcccgctgctccctggccactgggccagggctacccctatcagtaccccggaccacccccttgtttccctcccgcttatcaggaccccggattttcttacggttcaggttccaccgggagccaacaaagcgaaggttccaagtctagcggcagtacgcgttcttcaagacgagccccagggagggaaaaggaacgtagggcagccggagcagggggtagcggtagtgagagtgaccacacagccccatccggcgtggggtccagttggcgcgagcggcctgccggacagctgtcccgcggaagctcccctagatctcaagcctcagccaccgccccaggtctccctccacctcatcctaccacgaaggcctacaccgtggtgggcggtccacctggtgggccacctgtccgtgagctggctgctgtaccacccgagttgaccggctcgaggcaaagcttccaaaaagcaatgggaaacccctgtgagtttttcgttgatattatgtag

SEQ ID NO: 221003 - DNA, 2151 bp, synthetic construct
  misc_feature 1..2151: note = Description of Artificial Sequence: Synthetic coding sequence
  source 1..2151: mol_type = other DNA
atgggcgagacaaaaatcatttatcaccttgacggtcaggagacaccctatctcgtgaagttgcccttgcctgccgagcgggtgacattggccgactttaaaggggtgctgcaaagaccaagttataaattcttcttcaaaagcatggatgacgattttggcgtcgtgaaggaggaaattagcgatgacaacgcaaagcttccatgttttaatggtagggtagtatcttggctcgtatctgccgagggcagccaccccgaccccgcacctttttgcgccgacaaccccagcgagctaccccctcccatggagagaacaggaggcattggggattctcgacccccttcattccaccctcatgctggcggtggcagccaagagaacctggacaacgacacggagaccgactccctcgtgtccgcccaacgtgagaggccccgacgtcgggatggcccagaacacgccactcgcctcaacggcactgcaaaaggagagagacgcagggagccagggggttacgacagctctagcacactgatgtctagcgaactggagacaacatccttcttcgattccgatgaggacgattcaacctcccgcttttcatccagtacagagcagtctagcgccagtagacttatgcgacgccacaagagacggcgaaggaagcagaaggtgtcacggatcgagcgaagtagcagcttttcctctatcaccgactcgactatgtctttgaacatcatcacagttactctaaatatggagaagtataactttttgggcatctctatcgttggtcagagcaacgagaggggtgatggaggaatatacattggtagtataatgaaagggggtgccgtggccgcagatggaagaatagagcccggagacatgttgttacaggtaaacgagattaactttgagaatatgtccaacgatgacgcagtccgggtgctacgcgagattgtgcacaagccgggtccgatcaccctgacagtcgccaaatgttgggacccttccccaagaggctgttttacgcttccccgaagcgaaccgatacggcctatcgatcctgctgcttgggttagccatactgctgccatgacgggtacgttcccagcctatggaatgtctccgtcattgtctactatcaccagtacatcaagctcaattacgagtagcattccggataccgaacgactcgatgatttccacctttcaatccatagcgacatggcggctattgtgaaggccatggccagcccagagtccggtctggaggtcagggacaggatgtggctgaagattactattccaaacgctttcattggatccgacgtagtggattggctgtaccataacgtggagggtttcactgaccgacgcgaggccagaaaatacgcctctaacctactaaaggccggattcatcagacatacagtgaacaagatcaccttctcagagcaatgctactacattttcggcgatctgtgcggaaatatggcaaacctgtcattgcacgatcatgatggtagtagtggcgcaagcgatcaggataccctcgccccattgccgcaccccggtgctgcaccctggcccatggcttttccctatcagtacccacctccccctcacccatacaatccccacccaggctttcccgaactcggttactcctatggagggggttctgctagttctcagcatagcgagggctcacgctccagcggatctaaccgttccggaagcgatcggagaaaggagaaagatcccaaagcgggagatagtaagtccggaggcagcggatccgagtcagaccacaccactcggtcttcgcttcgcggaccaagagaaagagcaccaagtgaacgttcaggacccgctgcatccgaacactctcatcggtcccatcacagcctagcaagcagtttgcgtagtcatcacacccacccctcttacggtccaccaggagtgccacctctctatggcccaccgatgctgatgatgcccccacctcctgccgctatgggaccacctggagcccctcctgggagagacctggctagcgtaccaccagagctgaccgcaagtcgtcaatcttttaggatggcgatgggaaacccatcggagttctttgtggatgtgatgtag

SEQ ID NO: 221004 - DNA, 2172 bp, synthetic construct
  misc_feature 1..2172: note = Description of Artificial Sequence: Synthetic coding sequence
  source 1..2172: mol_type = other DNA
atgggtgaaacaaagatcatatatcacttggatggacaagagaccccgtacctcgtgaaattaccactgcccgcagagcgggtcactctggctgatttcaaaggggttcttcaacgaccatcttacaaatttttttttaagagtatggatgatgacttcggagtggtgaaggaagaaatcagtgatgacaatgccaagctcccctgttttaatgggagggtggtgagctggctggtatctgcagagggttcgcaccccgaccccgcaccgttttgtgcagataacccctccgagctgccaccccctatggaacgaaccggtggcatcggcgattcaagacctccctcatttcatccccacgccggaggaggtagtcaggagaacctagataacgataccgagacagattctttggtaagtgctcagcgggaacggccacgtcggagagatgggcctgagcatgccacgcggttgaatgggaccgccaagggggagcggagacgtgaaccaggcggatacgactcaagttccaccttgatgtcctcagagctggaaaccaccagcttttttgacagtgacgaggacgactccaccagtcgcttctcctccagcactgagcagtctagtgcaagtcgcctgatgcggagacataagcggaggcggagaaagcaaaaagtgagccgaattgaacgcagtagcagtttttcctccatcaccgactctaccatgagccttaatataattacagtaactttaaatatggagaagtacaattttttgggcatctctatcgtgggacagagcaacgagagaggggatggaggcatttatattggctctattatgaaaggcggagccgtcgctgccgatggcagaatagagcccggagacatgctactccaagttaacgagattaactttgagaatatgagcaacgatgatgccgtgagagttctaagagagattgtgcacaagccaggtcccataacccttactgtggctaagtgttgggaccctagccctcggggatgcttcacactgccgcgatcagagcccatacgaccaatcgatcctgcggcatgggtgtcccacaccgccgctatgactggtaccttcccagcctatgggatgagcccctccctgtcaaccattacatctacgtcatccagtattacaagctccattcccgatactgaacgccttgacgacttccacttatcaatccactccgatatggccgctatcgtgaaggccatggcgtctcccgagtctgggcttgaggtgagggatcgcatgtggctaaaaataaccattcccaacgcatttatcggctctgacgtggtcgactggctctatcataatgtggagggattcaccgacagaagagaggcgaggaagtatgcgtccaatctgctcaaagccggattcatcagacacaccgtgaataaaatcaccttctccgaacagtgctattacattttcggggacctgtgtggcaatatggccaatctgtctctacatgaccacgacggctcatcaggtgcctccgaccaggacactcttgcacccctcccacaccctggtgctgctccttggccaatggcttttccctatcagtatcctccccctccccatccttacaacccgcaccctggcttcccagaactggggtatagctacgggggtgggtccgccagcagccagcacagcgaaggctcccgctcgagcgggagcaaccggtccgggtcggaccgaaggaaggaaaaagatccgaaggccggagactcgaagagcggaggatctggttccgagtctgatcatacaacccgtagcagcttacgcggtcctagggaaagggccccttcagaacggtcggggccagcagcatccgagcattcgcatcggagccaccactcactggccagcagtcttcgctcccaccacactcatccatcatacggcccaccaggggtcccgccactctacggcccacctatgcttatgatgccccctcctcctgcagccatggggcctcctggagcgccaccaggacgggatctcgctagcgtcccccctgagctcacggcctcaaggcagtccttccgaatggccatggggaatccctcagagttttttgtcgatgtgatggtactcagagggtggggggcttag

SEQ ID NO: 221005 - DNA, 2100 bp, synthetic construct
  misc_feature 1..2100: note = Description of Artificial Sequence: Synthetic coding sequence
  source 1..2100: mol_type = other DNA
atgggagagactaagattatctatcatctggatggccaagagactccatacctggtgaaactgcccctgccagccgagagagtgacactggcagactttaagggggttctgcagcgcccttcctataaattctttttcaaaagtatggacgatgacttcggtgtggtgaaggaggaaattagcgacgataatgccaaacttccctgttttaatggcagagttgtaagctggttagtctcagctgaaggctctcaccccgacccagcgccattttgcgctgacaacccgtcagagctgcccccacctatggagagaacaggcggaatcggagactcccggccaccatccttccacccccatgctgggggaggcagccaggaaaatttggataatgacaccgagacagattctctcgtcagcgctcagcgggagagacctagaagaagagatgggccagagcatgctacaagactcaatggtacagcaaagggggagcggcgtagagagcccggtggatacgacagttcctcaacgctcatgagctcagaactcgagacaactagtttctttgattccgacgaggatgacagcacctcgagattttcctcctcaaccgagcagtccagcgccagtagactgatgagaaggcacaagcggagacggaggaagcaaaaggtgagccggattgagcgtagcagctcattcagctccatcaccgatagcacaatgtccctgaatatcattactgtgacccttaacatggagaagtataattttcttggcatctcaatcgtcggacagtctaacgagaggggcgatggagggatctatatcggctccataatgaagggaggagccgtcgccgcagatggccgaatcgaaccgggtgacatgctgctgcaagtaaatgaaatcaatttcgaaaatatgtctaacgacgacgccgtccgcgtgttacgagagattgtccacaagccaggccctattaccctcaccgtagctaagtgctgggacccctcccccagaggctgcttcactttgcctaggaccatgactggtaccttccccgcatatggaatgagtcccagtttgagtacgatcacatctacgtcatcatcgatcacatcctccatccccgacacggagagactcgatgattttcacctatctatccattcagacatggcagcaatcgtgaaggcgatggcctctcctgagagcgggctcgaggtgcgagatcgtatgtggctgaaaattacgatcccaaacgcctttatcggctctgatgtggtcgactggctgtaccacaatgtagagggcttcactgaccgtcgcgaggccagaaaatacgcaagcaacctacttaaagccggattcataagacataccgtcaataaaatcaccttctcagagcagtgttactacatattcggtgacctctgcggcaatatggccaatctgtctctacatgatcacgacggaagttcaggcgctagtgaccaagatacattagctccattgccacacccaggagctgccccttggcccatggcattcccataccagtacccgcctccccctcacccttacaacccacatcctgggtttccagagctaggctacagctacggcggaggcagcgcttctagccaacacagcgagggtagccggagctctggttcgaacaggtctggttctgatagaagaaaggagaaagacccaaaggccggtgattccaagtccgggggttccgggtctgagtctgaccataccacccgctcatccctgcgcggacccagagaacgggcacccagtgagcggagtggaccagcagcctccgaacactcccatcgctctcaccattcactggccagcagcctgagatctcatcacacccatccctcatacggcccaccaggagttcctccactgtatggccctcccatgctgatgatgccccctccacctgccgctatgggacctcccggtgcacctccaggcagagacctggcctccgtccctcctgagctgaccgctagtcggcagagtttccgcatggctatgggcaacccttccgagttctttgtagacgtaatgtag

SEQ ID NO: 221006 - DNA, 315 bp, synthetic construct
  misc_feature 1..315: note = Description of Artificial Sequence: Synthetic coding sequence
  source 1..315: mol_type = other DNA
atgcccgaggcccatatgcagcccgctaagctccagacatccctgccaaccactgatcacggaagcaagaagcccgtgagctgctatttgccccctctgtccaacgctcatcccatgtgcattgaggtgcagaatgctcagaactgttcctcagccgctgccacactggagcccagtatcatctctgatacctgcttctacaaacctattaccaaggaccagctgagttcacgctcagagctgaataccgtccgcctcaaatgcctgaattctcttcgcggttggaaaattctcaatcaactgtcccttacatag

SEQ ID NO: 221007 - DNA, 1437 bp, synthetic construct
  misc_feature 1..1437: note = Description of Artificial Sequence: Synthetic coding sequence
  source 1..1437: mol_type = other DNA
atgggatcgaggtggagttccgaggaggaacgacagccattgctgggccctggcctcggcccagggctcggagcttcatggaggtcaagagaggccgcagccgcagctttgcctgcggcagtgcctggacctggtcgcgtttatgggagacgctggctcgtcttgttgctgttctcgttgctggcctttgtccaagggctggtgtggaatacttggggccctatccagaatagcgcaagacaggcctacggcttttcttcttgggatattgcactgcttgtgctgtgggggccaatcggattcctcccatgctttgccttcatgtggctgctcgataagagagggctgcggattaccgtgctgctgacctcgtttctgatggttctgggaacaggtttgcgctgcattccgatttctgatctgatactgaagcgacgcctgatacatgggggacaaatgctaaatggattagcaggtccaactgtcatgaatgccgctccgttcttatcaactacatggttttctgccgatgaacgtgcgaccgccactgctatcgccagtatgctctcttatctgggaggggcttgtgcctttctcgtgggccctttggtagtccccgctcctaacggcacgtcccctcttctcgccgctgaatcatctagagcccacatcaaggacaggatagaagcagtactatacgctgagttcggcgttgtgtgtctgatcttttctgcaactttggcttactttccacccaggcctcctctgccaccgtcggtggctgcagcaagtcagcggctgtcttatcgtagatctgtgtgccggctgctgtctaacttccggttccttatgatagccctagcctatgccatccccttgggagtgttcgccggttggagcggtgttctggatctgatcttaacccctgcccacgtgagccaggtcgatgccggatggattggattttggagtatcgttgggggttgcgtcgtggggattgcaatggcaaggttcgcggatttcatcagaggcatgttaaagctgatcctccttcttctctttagcggtgccacgttgtcttcaacttggtttacccttacatgcttgaacagtattacccacctgccattgacaaccgtgacattgtacgcctcttgcattctgctgggcgtgttcctgaatagcagcgtccctattttctttgagttgttcgtggagaccgtgtaccctgtccctgagggaatcacatgcggcgtagttacattcttgagtaacatgttcatgggcgtgctccttttttttctgactttttaccacactgagctatcttggttcaactggtgcttgccaggctcttgccttcttagtctattacttatactgtgtttcagggaaagctatgaccgattgtatctcgacgtggtcgtatccgtctag

SEQ ID NO: 221008 - DNA, 1644 bp, synthetic construct
  misc_feature 1..1644: note = Description of Artificial Sequence: Synthetic coding sequence
  source 1..1644: mol_type = other DNA
atgcctggcggtggaccgcagggagcaccggcagccgcagggggagggggagttagccatagagcaggatcccgtgattgtctgcctcccgcagcatgttttaggaggagaaggcttgcaaggagaccaggctacatgaggagcagtacaggacccggtattggattcctcagtccagccgtaggcacactatttaggttccctgggggagtgtcgggagaggaaagccatcacagcgagtcgcgcgcaaggcagtgtggtctggacagcagagggctgctggtacgctctcccgtatccaagtccgctgcagcacctacagtgacctctgttcgcggtacatctgcccattttgggatccagctgcgtggaggaactagattacctgataggttatcttggccctgtggacccggaagcgctggatggcagcaggagtttgctgccatggatagtagcgagaccctggatgctagttgggaagcagcctgctccgatggagcacgcagggtgagagcagctggatccttgccatccgccgagctatcctcgaattcctgctcccccggatgtggaccggaggtacctccgaccccacctggctctcactccgccttcacctctagcttctctttcatccggctatccctcggatctgccggagagcgtggagaggcagagggttgccccccatcacgggaagcagaatcacactgccagagcccacaggaaatgggcgctaaggcagcctctctagacggaccccacgaggatcccaggtgtctgtcacggccattttcccttttagccacccgggtgagtgccgatctagcccaagcagccaggaacagtagccgcccagaacgcgacatgcactcattacccgatatggaccctggcagctcaagttctctcgatccaagtctggcagggtgcggtggggacggctcttcgggatccggcgatgcccactcctgggacactcttttgcgcaagtgggagcccgtgctcagggattgtctgctgaggaacaggaggcaaatggaagtcataagcctgagactgaaactgcaaaaattgcaggaagacgccgtggaaaacgacgactatgacaaagccgagaccttgcagcagagactggaggatctcgagcaggagaagatctctctgcattttcaactgccatctaggcagcctgctctttccagcttcctcggacaccttgccgcacaggtccaggccgctctcagacggggtgctactcaacaagcatcaggcgatgacacacacactcctttaaggatggaaccaaggttgctggagcccacagcacaggactccctgcacgtcagtatcactaggcgggattggctccttcaggagaagcaacagctccaaaaagagattgaggcactgcaggcaagaatgttcgtgctagaagccaaggatcagcagctccggagggagatcgaagaacaggagcagcaactccagtggcagggatgtgatctgacaccactagtcgggcaactctcactgggacaactgcaggaagtgtcaaaagccctgcaggataccttggcttccgctggacaaataccctttcacgctgaaccccctgaaacaatcaggaggtgcgtgtag

SEQ ID NO: 221009 - DNA, 1110 bp, synthetic construct
  misc_feature 1..1110: note = Description of Artificial Sequence: Synthetic coding sequence
  source 1..1110: mol_type = other DNA
atgccaggaggcggaccccagggcgcaccagccgctgcgggaggcggaggggtatcacacagagcaggtagtcgggactgcttgcccccagccgcttgtttcaggcggcgaaggctggctaggagaccagggtatatgcgatccagtactgggccagggattggtttcctgtctcctgccgttggcaccttgtttcggtttcctggtggagtgtccggcgaggagagtcaccactctgaatccagagcccgacagtgtggactggactcccgcggacttctggttcgaagtcctgtttctaagtccgctgctgcaccaacagtgacgtccgtccgcggaactagtgcccattttggaatccagcttcggggaggaactcgccttcccgataggctcagctggccctgcggtcccggttctgccggatggcagcaagagttcgccgcaatggacagcagtgagacactggatgcgtcctgggaagccgcatgcagcgacggtgcaagacgcgtacgggcagccggtagtctgccttcggcggaactgtcgtcaaactcatgctcaccaggatgtggccctgaagtgcccccaacgcctcccggtagccactcagcatttacgtcgagtttctccttcattcggctgagcttaggttccgctggcgagagaggggaagctgaaggatgtccacctagccgcgaagcggaaagccattgtcagtccccccaggagatgggggcaaaggcggcaagcctggacggaccccacgaggacccccgatgcttatctaggcctttttctttgttagcaacccgagtttcagcggacctcgctcaagccgctcgcaattcatccagacccgaaagagatatgcacagtttgcctgatatggaccctggctcaagctcgagtctggacccttcgctggctggctgcgggggagatggttcctcaggctctggggacgctcacagttgggacacgctgctgcggaagtgggaaccagtgctacgcgattgcctcctgagaaacagacgacagatggagctggagccaatcgccctcgatcccccttggaaacctagacaccccgaacctaatagctactag

SEQ ID NO: 221010 - DNA, 717 bp, synthetic construct
  misc_feature 1..717: note = Description of Artificial Sequence: Synthetic coding sequence
  source 1..717: mol_type = other DNA
atggatagctctgagactttagatgctagctgggaagccgcttgcagcgatggcgctcggagagtacgcgcagccggatcgctgccctcggccgaattgtcttccaattcctgcagccccggatgcggtcccgaagtgcctccaacgcctccaggaagtcatagcgctttcacaagctccttcagcttcatccgcctctctttaggttcggccggagagagaggcgaggctgaaggctgtccgccttccagagaagccgaatcgcattgccagtcacctcaggagatgggagcaaaagcagcatcccttgatggtccacatgaggatccaaggtgcttgtctcgaccgttctccctcctggccacccgggtatccgcagacctggctcaagcagcgaggaactcttccagaccagagagagacatgcacagcctgccagacatggacccgggatccagctccagcctggatcccagtctcgcaggttgcggaggcgacgggtcctcagggtctggggacgcgcacagttgggataccttactgagaaagtgggagcccgtgctgcgggactgccttctgcgcaacaggcggcagatggaagtaattagcctgagactgaaattgcaaaagcttcaggaggacgcggttgaaaacgacgattacgataaagcaggtactaactgtttcggatctaccatggaagcttcaacatcctag

SEQ ID NO: 221011 - DNA, 2268 bp, synthetic construct
  misc_feature 1..2268: note = Description of Artificial Sequence: Synthetic coding sequence
  source 1..2268: mol_type = other DNA
atgccaggcggaggccctcagggagctcccgcagcagccggaggcggaggagtaagtcaccgtgcagggtccagggattgtttgccaccagcggcatgcttccggaggaggcgcctggcgaggagaccaggctacatgcgatcaagcaccggtcccggaatcggtttcctgtcaccagccgtcggaaccttattcagattcccgggtggcgttagcggagaagagtcccaccactctgaatccagggctagacaatgcggactggactcccgtgggctgctggtccgctccccagtttcaaagagcgcagctgcccctacagtgacgagcgtacggggtacgtcagctcactttggtatccagttgcgaggcggtacaaggttacccgatcgcctcagttggccatgtggccctggatccgccggttggcagcaggagtttgccgcaatggactcctccgaaacactagatgctagctgggaggcggcttgctctgatggagcccgacgcgtgcgcgctgctggctctttaccatctgctgagcttagcagtaacagctgctcccctggatgtggcccagaggtcccacctacaccacccggatcccactcagcctttaccagctcattctccttcatcagactgtctctgggctctgctggggagcgaggcgaagcagaggggtgccccccaagcagagaggccgagagccactgtcaatcaccacaagagatgggagccaaggcagcgtccctagacgggccacatgaagatcccagatgcctgtcaaggcctttcagtctgctggctacgcgggtttccgcagatctggctcaggccgcacgaaactcttcacggccagagcgtgacatgcattcactgcccgatatggaccccggaagcagctccagtttagacccaagcctcgcaggctgcggcggagatgggagctccggatccggagatgcccacagctgggacaccctgttgcggaagtgggagcccgtgctccgggactgcctgttgaggaacagaaggcagatggaggtaatttctctacggctcaagctgcaaaagttacaggaggatgccgtggagaatgatgattatgataaggccgaaacgcttcagcagcgcctggaagacctggagcaggaaaaaataagcctccacttccagctgccgtcacggcagccggctctgtcaagttttctgggccatctggccgctcaggtgcaggctgccctgaggaggggcgcaacccagcaggcctctggagacgatactcacacaccgttaagaatggaaccgaggttgcttgaacccacagctcaggattctcttcacgtgtctatcacaaggcgcgattggttgctgcaggagaagcagcaattgcagaaagagatcgaggctcttcaggctcgcatgttcgtcctggaggcaaaggatcagcagttgcggagggagatcgaggagcaggagcagcagttgcagtggcagggatgcgatctcacaccactcgtgggacagttatctctgggtcaactgcaggaggtgagtaaggcacttcaggataccctcgccagtgcagggcagattccatttcacgccgagcctccagagactatcagatctttacaggaaagaattaaaagtcttaacctctcgctgaaggaaattacaaccaaagtgtgcatgagcgaaaagttttgctctactctgagaaagaaggtgaacgatatagagacacagctccctgccctcctggaggctaagatgcacgccatcagcgggaaccacttttggaccgccaaagacctgacggaggaaattcgttccctcaccagcgagagagaaggcctagaaggactgctgagtaagttgcttgtgctatcaagcaggaatgttaagaaattgggctcggtaaaggaggattataaccggctccggcgtgaagtggaacaccaggagacagcttatgatggagttagtctctgccgccctgtctggtctgcagtagtgagatcctgctctctgcagccactgccacctgagtttaagcaattctcctgtctctcactgcgttcctcctgggactatcgttgtcccccaccgtgccttgccaattttgtgtttttggttgagatgggattttatcacgtagatcagaccgggctgaagctcctgacatcatccgatccacccagctccgcaagtcagagcgctggaataaccgacatgagtcattgcgcttggcctctgcaatag

SEQ ID NO: 221012 - DNA, 2037 bp, synthetic construct
  misc_feature 1..2037: note = Description of Artificial Sequence: Synthetic coding sequence
  source 1..2037: mol_type = other DNA
atgccaggtgggggtccccagggcgcaccagccgcagcaggaggaggcggagtgtcccatagggctggctcacgagactgcctcccgcctgcggcttgtttccgcaggcggagactcgctcgcagacctgggtatatgagatcttctactggtccaggaataggcttcttgtcaccggcagtcgggacactattccggttcccaggcggagtatctggggaagagagtcatcactcagagagtagagctagacagtgtgggctcgatagcagaggcctgctggtcaggagtccagtatccaagtccgcagccgctcccacagtgactagcgtaaggggaacctccgctcactttgggatacagctgcgcggaggcacccgcttgccagaccgactcagctggccatgcggccctgggagtgcgggatggcagcaggagttcgccgcaatggattcctcagaaacactcgacgcaagttgggaggctgcatgcagtgacggggctcggcgagtgcgcgctgctggctccttaccttctgctgaactcagtagcaacagctgttccccagggtgtgggccagaggtgccaccaactcctcctggatcccacagtgcgtttacgtcctccttctctttcatccgactgtcgctaggatccgcaggtgaacgtggggaagctgaaggatgtcctccttcgagagaggcagaatctcactgtcaatccccacaagaaatgggtgctaaggcggcttccttggacgggccacatgaggatccccgatgtctctcccgcccattctcactgctcgcaacacgggtgtccgcagatctcgcccaggctgccagaaactcatccagacctgaaagagacatgcacagcctgcctgacatggatccagggtctagcagcagcctcgacccaagtctcgccggatgcgggggagacggcagcagcggatcaggcgatgcccattcctgggacactctgcttcggaaatgggaacctgtactgagagattgccttctgcggaacaggaggcagatggaggtcattagcttgcgcttaaaacttcagaaattgcaggaagatgcggtcgagaatgatgattacgataaagcggagacactacagcaacgactggaagatctggaacaagagaaaatctccctgcacttccagttgccttcacggcagcctgcattatcctcctttctggggcacctcgccgcacaggtgcaagcagctctcaggcgcggtgccacccagcaggctagcggggatgacacccatactcccttaagaatggagccaagactcctagaaccaactgctcaagattctctccacgttagtataacccgcagagattggttactccaagaaaagcagcagctacagaaggagatcgaggccctccaagctcggatgttcgttctggaggccaaggatcaacagttgaggcgcgaaattgaggaacaggagcaacagctccagtggcaagggtgtgacctgacccccctcgttggacagctgtcactagggcagctgcaggaggtgtctaaagcactacaggatacactggctagcgccggacagattccattccatgcagagccccctgaaacgattagaagcctacaagagcggattaaatccctgaatttatctcttaaagagataactacaaaagtgtgtatgtctgagaaattttgctccacactgcggaaaaaagtgaatgatatcgagacgcagctcccagccctgctcgaggctaagatgcacgccatttctggaaaccacttttggacagcaaaggacctaaccgaggagatccgttcactaactagtgaacgggagggactagaggggctcctttctaaactgctcgtgctgtcctcgcggaatgtgaagaagctcggatctgttaaagaggactacaaccggctgcgccgagaagtggagcaccaggaaaccgcatacggatacaagtactgcgatgctgaatcttggacacaacgctcccagcagttggcatag

SEQ ID NO: 221013 - DNA, 2499 bp, synthetic construct
  misc_feature 1..2499: note = Description of Artificial Sequence: Synthetic coding sequence
  source 1..2499: mol_type = other DNA
atgcctggcggaggcccacagggggcacctgctgctgctggcggaggtggcgtttcccaccgagcaggttctagagactgtctgcccccagccgcttgttttagacggcgaagactcgctcgacgtccaggctatatgcgttctagcaccggccctggtatcggctttctctcccccgcagtaggaacactgtttagattcccgggtggagtgtctggcgaagaaagccatcacagtgagtccagggcccgacaatgcggcttggactcaaggggcctgctggtaaggtctcctgtgtctaaatctgccgctgccccaaccgtgacttccgtgcgagggacgtcggcacactttggaatacagctccggggagggactcggctccccgaccggttgtcttggccatgcggccctggatccgcaggatggcaacaggaatttgccgcaatggattctagcgagacgctagacgcttcctgggaagctgcgtgttctgatggcgctaggagggttcgggctgccggatccctgcctagcgcagaactgagcagtaactcatgtagccccggatgcggaccggaggtcccaccgaccccacccggatcacacagcgctttcactagtagcttcagtttcataagattatctctcggatcagcaggcgagaggggtgaagcagaaggctgtccgcctagtagggaggcagagtcgcattgtcagagccctcaggaaatgggagcgaaggcagctagcctggacggaccacatgaggaccccagatgtctgtcacgccctttttcactcctggcaactcgcgtctcagcagacctggcccaggccgctcgcaattcttctcggcctgaacgagatatgcactctctaccggatatggacccaggaagtagctccagccttgacccctccctggcgggatgcgggggtgacgggtcctctggtagcggtgatgcccatagttgggatacattgctcagaaaatgggaacccgttctgagggattgtctgctgaggaatcggaggcagatggaagtcataagcctgcggctgaagctccaaaaattgcaggaggacgcggtagagaatgacgattacgacaaggctgaaactctgcagcaaaggttagaagacctagaacaggagaagatcagcctccacttccaactgccatcccgccagccagctctctcatcttttttaggacacctggcagcacaagtgcaagccgcacttcgacgtggagcaacgcaacaggcctctggtgacgacacacataccccactccgcatggagcctaggctgctcgaacccactgcccaagatagtctgcatgtgtctataacaaggcgggattggttattacaggagaagcaacagctccaaaaggaaattgaggcgctccaggctcggatgttcgtactcgaggcaaaggaccagcagctgaggagagagatcgaagaacaagaacaacagttacagtggcagggctgtgacctaactccccttgtgggacagctttccctgggtcagctgcaggaagtgtcaaaagccctgcaggatactcttgcatccgccggtcagatcccctttcacgcagagccacctgaaaccatccgatctctgcaggaacggattaaatccctgaacctgtctctgaaggagatcaccacgaaggtctgcatgtccgaaaagttctgttcaaccctgaggaaaaaggtaaatgatatagaaacacagctgccagccctgcttgaagccaaaatgcacgcaatctctggtaaccatttttggacagcaaaagaccttaccgaagagattcgcagcctgactagcgagcgcgaggggttggaaggtcttctgtctaagctgctggtcctgagctcccggaatgtgaagaagctggggtccgtgaaggaggattacaatcggcttcggagagaggtcgaacaccaggagacagcttatgagaccagcgttaaggagaacaccatgaaatacatggagactctgaagaataaactctgctcctgcaaatgccctctcctcggaaaggtgtgggaagctgacctggaggcgtgtcgcctgctaatccagtccctgcagctccaggaagcccgtggaagcctgtcagtggaagatgagcgtcagatggatgaccttgaaggcgctgcgcctccaatccccccaaggttacactcagaggataaacgcaagacaccactgaaggaatcatatatcctttccgctgaactaggcgaaaaatgcgaggatatcgggaagaagcttctgtatcttgaggaccaactgcacacagcaatacacagccatgacgaggacttgattcactcactgcgcagagagttacagatggtgaaggagacactgcaggcaatgatccttcaactgcagccagccaaagaagctggggagagggaggccgctgccagctgcatgaccgccggagtgcacgaagcgcaggcttag

SEQ ID NO: 221014 - DNA, 2661 bp, synthetic construct
  misc_feature 1..2661: note = Description of Artificial Sequence: Synthetic coding sequence
  source 1..2661: mol_type = other DNA
atgcctggaggcggacctcaaggcgctcccgctgccgctggcggaggaggggtgtctcatcgggctggctcacgcgactgtcttccacccgcagcctgcttcagaaggcgtcgacttgctcgacggcctgggtacatgagatccagcaccggacccggtatcggatttctctctcccgctgtgggcaccctctttcgatttccaggcggtgtttccggggaggaatcccatcacagcgaaagccgggctaggcaatgtggattagatagccggggactcctagtgaggtcacctgtgtccaagtcagcagctgcgcctacagtgacatcagttcgcggaaccagcgctcacttcggcatccagctcagggggggaactcgactccccgacagattgtcttggccttgcgggccaggcagtgccggatggcagcaagagttcgctgctatggacagttccgaaacacttgatgccagttgggaggcagcctgcagcgacggagcaaggagagtgagagcggcaggctcactgccaagtgccgagctgagtagcaacagctgtagcccgggatgtgggcctgaggtcccacccaccccccctgggtctcactctgctttcacaagcagcttcagctttatccggttgagcctgggcagtgcaggggagaggggagaggccgagggctgtcctcctagcagggaagcagaaagccattgccagagcccccaggagatgggcgcaaaagctgccagcttggatgggcctcatgaagatcctaggtgcttgtctcgcccatttagcctactagccacgcgcgtctctgccgatctcgctcaggcagctagaaattcttcccgtccagaacgcgatatgcactctcttcccgacatggacccagggtcctcaagtagcctcgatcctagcttagccggatgtggtggagacggaagcagcggatcaggggatgctcattcctgggatacgctgttgcgtaaatgggagcctgtgctccgcgactgcctgctaagaaatcgaaggcagatggaagtgattagcctgcgcctgaagcttcagaagctgcaggaagacgcagtcgagaacgacgactatgacaaggttgaaaccgggtttcactacgtgggacaagccggactggagctcttgacatcctctaatccacccgctagcgcctcccaaagcgctggtatcacagctgaaaccctgcagcagcgcctggaagaccttgagcaagagaaaatcagtctccacttccaactgccctctcgtcagcctgctctgagctcttttttgggccatctcgctgcccaggtgcaggctgccctgagacgcggtgctacacaacaagcgagcggtgacgatactcatactcctctgagaatggagcccagactgctcgagccaacagcccaggacagtttgcatgtaagtattacaaggcgggattggctgctccaagagaagcagcagttgcagaaggaaattgaggcgctgcaggctagaatgttcgtccttgaggccaaagaccagcaactacggcgagagatcgaagaacaagaacaacagctgcaatggcaaggctgtgatttgaccccgctcgtgggccagttatcccttggtcagctgcaggaagtctcaaaggcacttcaggatacactcgcttccgcgggacagattccctttcatgccgagccccctgaaaccatcagatctctccaagaacgcatcaagtcattaaaccttagcttaaaggagatcaccaccaaagtgtgcatgtccgagaaattctgcagcactctgagaaagaaggtaaatgatattgagacgcagcttccagcgcttcttgaggccaaaatgcacgcaatttcaggaaaccacttttggacagccaaagacctcactgaggaaattaggagtctgacctcagaaagagaaggattggagggtctcctatcaaagctactggtgctgtccagccggaatgtgaagaagcttggcagcgttaaagaggattacaacaggctacggcgtgaggtggaacaccaagaaaccgcttacgagacatccgtcaaagagaatacaatgaagtacatggaaacgctgaaaaacaagctctgtagttgcaaatgcccccttctcggtaaagtctgggaagccgacttggaggcctgccggctccttatacagtcacttcagctgcaggaagcaagaggatccctgagtgtggaagatgaaaggcaaatggacgatctcgagggagctgctccccctatccccccacggctgcattcagaagataaacgcaaaactccactgaaagtattagaggaatggaagacccaccttattccttctctgcattgcgctggcggtgagcagaaggaggaaagctacatattgagcgctgagctaggcgaaaaatgcgaggatataggtaagaagcttctgtatctggaggaccagctgcataccgctatccactcccatgacgaggacctgatacatagcctgcgtagggaacttcagatggtgaaggaaactctgcaagccatgatcttgcagctgcagccagctaaggaagctggtgaaagagaagccgcagcttcatgtatgacagccggagtgcacgaagcacaagcctag

SEQ ID NO: 221015 - DNA, 621 bp, synthetic construct
  misc_feature 1..621: note = Description of Artificial Sequence: Synthetic coding sequence
  source 1..621: mol_type = other DNA
tgaaaccatttttggactgccaaggatttgacggaggagatccgttccctaacttccgagagggagggtcttgagggactactctccaagctgctggtcctgagcagcaggaacgtgaagaaactgggctctgttaaggaggattataatcgactgcgccgagaggtggagcatcaggaaacagcctacgaaaccagtgtcaaggaaaatactatgaagtatatggagaccctaaagaataagctttgctcatgtaaatgtccattattgggcaaggtctgggaggcagatcttgaggcatgtaggctcctcatccagtcactgcagctccaggaggcacggggatctctgagtgtcgaagatgagagacagatggatgacctggaaggcgctgctccaccgatcccccctaggcttcactctgaagacaagaggaagacccccctgaaggtgttggaggagtggaagacgcatctgattccttcgctccactgtgccggaggcgagcagaaggaagtgtgcccattccatatggcctcacgtggcgacccctacagcaaagggtgctttggcaccatgctccagatgggaacaattaacatcgggaaagcaagccattag

SEQ ID NO: 221016 - DNA, 279 bp, synthetic construct
  misc_feature 1..279: note = Description of Artificial Sequence: Synthetic coding sequence
  source 1..279: mol_type = other DNA
atgaaatatatggaaacgctgaaaaataagctgtgtagctgtaagtgtcccttactggggaaagtttgggaggcagacctggaggcctgccggctgctgatccagtccctgcaactgcaggaggcccgtgggtctctcagtgtcgaagacgagcgacaaatggatgatctcgagggggctgctccacccattccaccacggctgcacagcgaggataaacgtaagacacccctcaaggtgctggaggaatggaagacacatcttatcccatccctgtag

SEQ ID NO: 221017 - DNA, 2565 bp, synthetic construct
  misc_feature 1..2565: note = Description of Artificial Sequence: Synthetic coding sequence
  source 1..2565: mol_type = other DNA
atgcctgggggtggccctcagggagctcccgctgccgcaggcggtggcggagttagccatcgggctggttctcgggattgcctcccgccagccgcatgtttcaggagaaggcgcttagctagaaggcctggctacatgcgctcaagtactggacctggcatcgggttcctgtcccccgctgttggcacactctttagatttcccggaggcgtgtccggggaagagagccaccactccgaatcgagggcaagacaatgtggcctggattctagggggctgctcgtccgtagcccagtcagtaaaagcgccgcagcccctactgtcacctccgtaagaggcacctccgcccatttcggtatccagttgcgtggcggaacaaggttgcctgaccgcctgagttggccatgtggcccaggaagtgctggatggcagcaggaattcgcagcaatggattctagcgaaacgttggatgcttcatgggaagcagcttgctctgacggagccagaagggtaagagcagctggatccctgccctcagcggaactgagttccaactcttgcagcccagggtgcgggcctgaagttccacctacgcctccagggtcccactcagcatttactagttcattttcttttatacgactttcactgggatctgccggagagagaggcgaagcggagggatgcccccctagcagggaagccgaatcacattgccaaagcccccaggaaatgggggcaaaagccgctagtttggacggtccccatgaggatcctcgttgtctctctcggccattctctctgctggccacacgtgtatccgccgaccttgcgcaagctgctaggaattctagcagacccgagcgagacatgcacagtctacctgacatggaccccggatcttcgagctcgttagacccttccctagctgggtgcggcggagacggctcttccgggagcggtgacgcacacagttgggataccctgctcagaaagtgggagccggtcttgcgcgactgcctgctgcggaaccgccgacagatggaggtgataagtctaaggctgaaactgcagaaattacaggaggatgccgtggagaatgacgattacgacaaagctgagacactgcagcagcggctcgaggatttagaacaagagaaaatttctctgcattttcagttgccgtctcgccagcctgccctctcaagttttctaggccacctggccgctcaggtacaagccgcactgcgcagaggggctacccagcaggcttctggagacgacactcatacccccttgagaatggagcccagactgctggaaccaactgcacaggattcacttcacgtgagcatcactaggcgggattggctccttcaggagaagcagcaactgcagaaagagatcgaagcactacaggccagaatgttcgtgttagaagcaaaggatcaacaattgcggagggagattgaagagcaggagcaacaacttcagtggcaagggtgcgacttaacccccctcgtgggtcaactgtctctgggacagctgcaggaggtgtccaaggctctgcaggacacccttgcatccgccggacagatacctttccacgccgaacctcctgagacaatcagaagcttacaggagagaatcaaaagcttgaatctgtcgctgaaagaaataaccacaaaagtttgtatgtctgaaaagttctgctccaccctgcgtaagaaggttaacgatatcgagacacaactgcctgcactcctcgaagcaaagatgcatgcgatttctgggaaccacttttggactgccaaagatcttactgaggagattcggtctctgacatccgagcgtgaggggcttgaggggttgctgtcaaagcttttggtcctgtcttctagaaatgtcaaaaagctgggctctgtcaaggaggactacaatcggctccgcagggaggtggagcaccaggagactgcatatgaaaccagcgttaaagagaatacaatgaagtacatggaaactcttaaaaacaagctatgtagctgtaaatgccccctcctcggaaaagtctgggaagctgacctcgaggcctgccggctgctgatacagtctttacagctgcaagaggcgcgaggctccctatcggtggaggacgaaaggcagatggatgacttggaaggcgcagcaccaccgattcctccaaggttacatagtgaagacaagcgaaaaactccgctgaaggtcttagaggaatggaagacacatttgattccaagtctccattgtgctggcggagagcaaaaagaagaatcatacatactgagcgcagaactcggtgagaaatgtgaagatatcggcaagaaactgttgtacctagaggatcaactgcacacggccattcactcccacgacgaggatctaattcacagtctccgtagagagctacagatggtgaaggagacacttcaggccatgatccttcagctacagccagccaaggaggcaggggagcgtgaggcagccgcttcttgtatgaccgccggagtacacgaggctcaagcatag

SEQ ID NO: 221018 - DNA, 2199 bp, synthetic construct
  misc_feature 1..2199: note = Description of Artificial Sequence: Synthetic coding sequence
  source 1..2199: mol_type = other DNA
atgcctggcggtggccctcagggcgcacctgccgcagctggcggtggcggagtgagccacagggccggaagccgggactgccttccccctgccgcatgctttagacgccgtcgcctggcacggcgtcctggatatatgcggtcctctaccggccctggaatcggctttttatctcctgctgtgggtactctctttcgtttcccaggcggagtcagtggcgaggagtcacatcattcagagtctcgggcacgccaatgcggacttgactcacgcggactgctcgttaggtctccagttagcaagtcagctgctgcccctactgtgacctcagttcgcggaacatcagcacacttcggaattcagctgcgcggtgggacacggctgccagatcgtctatcttggccttgtggtcctgggagtgccggatggcagcaggagtttgctgctatggactcctccgagaccctggatgcgagttgggaggctgcttgtagcgacggagctagacgtgtgcgtgctgctggtagtttgccatccgccgaactctcttctaattcgtgctcccctggttgtggacctgaagtgcctcctacacctccaggctcccactctgcatttacctcctccttctcctttatcagactgagcctggggtctgcaggggagaggggcgaagcggaagggtgtcctccctctcgcgaggcagagagccactgtcaatccccccaggaaatgggtgcaaaagccgcttctctggacggcccacatgaggacccgcgatgcctgagtcgtccattctctctgctcgccactcgtgtttcggcagaccttgcccaggccgctcgtaacagctcccggcctgagcgcgatatgcacagcctcccagacatggacccaggcagtagctcctccctcgatccctcccttgccggttgcggtggagacggctcctctggctctggcgatgcgcactcatgggatacgctccttagaaagtgggaaccggtcctgagggattgcttattgcgcaacaggcggcagatggaggtgatttccctgcgcctcaaactgcagaaactgcaggaagacgcagtggagaatgatgactacgataaagccgaaacactacagcagcggttagaggatctggaacaggaaaagatctctttgcattttcagttaccgtctaggcagccagctctttctagctttctgggccatctcgccgctcaggtccaggcagccctgagaagaggtgctactcagcacctccaggaaagaatcaagagcttaaacctgtctttgaaagaaataaccacaaaggtgtgcatgtctgagaaattttgttcaacactgcggaagaaggtgaacgatatagagactcaactgcccgcactgctggaagcaaaaatgcacgccatttcaggaaatcacttctggacagctaaagacttgacagaggaaatcagaagcctaacttcagagcgcgagggccttgagggactgctctccaaattactggttctctcttcaaggaacgttaagaaattaggatcggtgaaggaggattataaccggctgcggagagaagttgagcaccaggaaaccgcctacgagactagcgtgaaggaaaatactatgaagtacatggagaccctcaagaataaattatgttcttgtaaatgtcccctgctcggcaaagtgtgggaagccgacctagaagcctgccggcttttaattcaatccctgcagctccaggaagccagaggctcacttagcgtcgaagacgagaggcagatggacgaccttgaaggcgcagccccaccaatcccccctagacttcattccgaggacaagagaaagacaccccttaaagtgctcgaagaatggaagactcatcttatcccctcactgcattgtgccggaggcgaacagaaggaagagtcctacatcctgagtgcagaactcggcgagaaatgcgaagatatcggcaaaaagttactctacttggaggaccagttacacaccgccattcactcccacgatgaagatctcattcactctctccgacgagagctacaaatggtaaaagaaacattgcaggccatgatcttgcagttacagcctgcaaaggaggcgggagagagagaggcagctgcgagttgtatgacggccggagtgcatgaggcccaagcttag

SEQ ID NO: 221019 - DNA, 1830 bp, synthetic construct
  misc_feature 1..1830: note = Description of Artificial Sequence: Synthetic coding sequence
  source 1..1830: mol_type = other DNA
atgccaggcggaggtccgcaaggcgctcctgcagccgctggcggagggggtgtgtctcaccgcgctgggtcacgagactgcttaccccctgcggcatgtttccgccgacggcgtcttgcgcgtagaccgggatatatgagatcctcgacagggccagggataggcttcctgagccctgcagtaggtactctgttccgcttcccaggaggtgttagcggggaggaaagtcatcacagcgagagccgggctcgacaatgtggcctagatagcagaggactgcttgtcagatcaccggtctccaagtccgcagcagccccaaccgtaactagtgtgagaggcactagcgcccacttcgggatccagttgaggggcggaacccgcctgcccgatcgtttgagctggccatgtggccctggcagcgccggttggcagcaggagtttgccgctatggattcaagtgagaccctcgatgcttcttgggaagctgcctgttccgacggcgctcggcgagtgcgggctgctggcagtctccccagcgcggagctcagtagtaactcttgcagtccaggctgtggccctgaagtgccaccgacaccaccaggaagccattctgccttcaccagcagtttctccttcattcgcttatcattgggctcagctggtgagaggggtgaagcagaagggtgcccaccatcccgggaggccgagtctcattgtcaaagcccccaggaaatgggcgcaaaggctgcaagcctggatggtccgcacgaagacccccgttgcctcagccggccattcagtcttctcgcaaccagagtttcagctgatctggcccaggccgctcgaaattcttcgagacccgagcgggatatgcatagtctgccggatatggacccaggttctagttcaagcctagatccttcccttgcagggtgcgggggtgacggcagtagcggcagtggtgacgcccactcttgggacactttactgcggaaatgggagccagtgcttagggactgtctgctcaggaaccgacgtcagatggaagtcattagtctgcgcctgaaacttcagaagttgcaggaggatgcggtggagaacgacgattacgacaaagctgagacactccaacagagattggaggacctggaacaggaaaagattagcctacacttccagcttcccagtcggcagcccgctctgagctccttcctgggacacttggctgcccaggtccaggcggctttgcgtcgcggagcgactcagcaggcctccggcgatgatactcacacccccctgcggatggaacctcgcctcctcgagcctaccgcccaggactctctgcacgtgtccatcactcggagagactggctcctgcaagagaagcagcagctacagaaggaaatcgaagctctacaggccagaatgtttgtgctggaggcgaaagatcagcagctgcgcagggaaatagaagagcaggaacaacagttgcagtggcaggggtgtgatcttacccctctggtgggccaactctctctgggccaactgcaggaggtgagtaaggcactccaagacactctagcaagcgccggtcagattccgtttcacgccgagcctcccgaaactattcggagagaggtgcggcatcaaactgccccatgcagaaatcatcagctggagaagccagttataaatatatgggcctttcacctccggcgtaagatctgcctcttccaggcggatggactgcagcacggaagtgcggaggtgaagcatctgaaggagacatccgtcgagccagccggttccaccgccagtaggaaagaatag

SEQ ID NO: 221020 - DNA, 2088 bp, synthetic construct
  misc_feature 1..2088: note = Description of Artificial Sequence: Synthetic coding sequence
  source 1..2088: mol_type = other DNA
atgccgggaggtggacctcagggcgcacccgctgcagctggtgggggaggtgtctcacaccgggcagggtctcgggattgcttgcccccagcggcttgctttagaaggaggcgcttagcacggagacccggttacatgcgaagcagcacgggaccaggaataggattcctgtcaccggctgtgggtaccctgttcaggtttcccggaggcgtgagcggcgaagagtcacatcattctgaatctcgagcgagacagtgtgggctggacagccgcggactcctggtcagatcccctgtgagtaagtctgctgcagccccaaccgtcacttctgtgagaggtacttctgcgcactttggcatccagctgagggggggaactcgacttccagaccggttgtcctggccctgcggccctggatctgccggatggcagcaggaattcgcggctatggattctagcgaaacgctggacgcgtcatgggaggccgcttgttccgacggagcaagacgtgtgagagcagctggatccctgcctagcgcagagttgtcctccaactcttgcagcccaggctgcggacctgaagtcccacctacccctccaggttctcatagcgctttcacatcgtccttcagtttcatccggttgtcactaggctcagctggggaaagaggtgaagctgagggttgcccccctagccgcgaagctgagagccattgtcagtctccacaggagatgggtgcaaaagcggcttctcttgatggaccccacgaggacccacggtgtttgtctcggccattctcactgcttgcaacaagagtatccgcagacctcgcccaggccgctagaaacagcagccgaccagagcgagatatgcattctctcccagacatggatcctggctccagctctagtctggacccatccctggctgggtgtggcggagacggaagctctggaagcggtgatgcacatagctgggacaccctcctcagaaaatgggaaccagtgctcagagactgcctcctcagaaatagaaggcaaatggaagttatcagtctgagattgaaacttcagaagctgcaggaggacgcggtggagaatgacgattacgataaagctgagaccctccaacaaagactggaagatctggaacaggagaagatctccttgcactttcagctcccctctcgccagcctgcgctgagtagctttctgggccatttggccgcacaggtccaggcagctttgagaagaggagctacccagcaggcttcaggggacgacacacacacaccgctgagaatggaaccacggctgctggagcctactgcccaggattctcttcatgtgtccatcacacggagggattggcttcttcaggagaagcaacagctgcaaaaagagatcgaggctttacaggctcggatgtttgttttggaggctaaagaccagcagctcaggagggagatcgaagagcaggagcagcagctgcagtggcagggctgtgatttgacgcccctcgtagggcaactgagtcttggtcagctacaggaagtaagcaaggcactgcaagataccctggccagtgctggtcaaattccatttcatgcggaaccacctgagaccatccgaagcctccaggagcgtataaaaagcctgaacttatcactgaaggaaattaccactaaggtctgtatgtctgaaaaattttgcagtacactgcgcaaaaaggtgaacgatatagagacacagctgccagccctgcttgaggcaaagatgcacgcaatctccggaaaccatttttggacagccaaggatctcactgaagaaattcgctcactcacatcagaacgcgaggggttggagggcctgctgagtaagcttctagtgttatccagtcgaaacgtgaagaagctcggcagcgtgaaagaggattacaatagactgcgccgagaagtggaacatcaggagacggcatacgccgcatccgtgcactgtctcggcaagtgtgggaagttgacgtggaagctagtggactgtttgtcgcgggcttattcaagccgcaaacctggcgaagcctgtttgtag

SEQ ID NO: 221021 - DNA, 1680 bp, synthetic construct
  misc_feature 1..1680: note = Description of Artificial Sequence: Synthetic coding sequence
  source 1..1680: mol_type = other DNA
atgcccggaggcggtccacagggcgctcccgctgcggctggcggtgggggagtaagccacagggcgggaagcagggattgtctgcctccggctgcttgctttcggaggcgacgactggctagacgacccggttacatgcggtcgagcaccggtcccggtatcggctttttgtcaccagccgtggggactctctttcgctttcctggaggcgtgagcggcgaagagagccaccattcggagtcgagggcaagacagtgtggcctggattcacgaggcctcctggtccggagcccagtcagcaagtccgctgctgctcccacagtcacttcagtgcggggaacctccgcccacttcggtatccagctccgagggggaactagactgcctgaccgcctgagttggccttgcggtcccggatccgctgggtggcagcaagaattcgcagctatggactcctcagagactctagatgcgtcgtgggaggcagcttgttccgatggggctcggcgagtaagggccgcaggctccctcccatctgccgagctgtcctcaaacagctgctcccctggatgtggcccagaagtcccgcctacacccccaggctctcactccgcgttcaccagctctttcagttttataaggctctcattaggatccgccggagaaaggggtgaggccgaaggatgcccaccctcgcgcgaagcagagtcccactgtcagagcccccaggagatgggcgctaaggctgcctctcttgatggtccccacgaggatccaagatgcttgtcaagaccattctctctgctcgccacgagggtgtccgcagacctggcacaggccgctcgaaactctagcagaccggagcgcgacatgcactccctgcctgacatggaccccggtagttcctcctctctcgacccctccctggcaggctgcgggggagacgggtcgtccgggtccggtgacgctcactcctgggacactctgctcaggaaatgggaacctgtgctcagggactgcctgttgagaaatagacggcaaatggaggtgatcagtctgcgattaaagttacagaagctacaggaagacgccgtggaaaacgacgattacgataaggccgagacgcttcagcaaaggctggaagacctcgagcaagagaagatctcgctgcacttccagttgccaagcaggcagcccgcactctctagcttcctcggccacctcgctgcgcaggtacaggccgcactacgcaggggggctacgcagcaagcctccggagatgatacccacacaccactgaggatggaaccacgccttctggaacctactgcccaagactccttgcatgttagtatcacacgcagggactggttgctgcaagagaagcagcagcttcaaaaagagatcgaagccctgcaagccaggatgttcgtcctggaggccaaggatcagcaacttcgacgcgagatcgaggaacaggagcagcaactccagtggcaggggtgcgatttgaccccactggtcggccagctgagcctggggcaactgcaggaggtcagcaaagccctccaggataccctggccagcgccggacagatcccttttcatgccgagccacccgaaactataagaagaaataaatgtgagggtaagtactatgaggttcatggtaacacttag

SEQ ID NO: 221022 - DNA, 1740 bp, synthetic construct
  misc_feature 1..1740: note = Description of Artificial Sequence: Synthetic coding sequence
  source 1..1740: mol_type = other DNA
atgcctggaggcggtcctcagggggcacctgctgcagccggagggggaggtgtatcacatcgcgctggcagtagggactgtcttcctccagccgcttgcttcagaaggaggagactggccaggcgtcccggatacatgcggtcctccactggccctgggatagggtttctcagccccgcagtcggaaccctgttcagattcccgggaggagtgtcaggtgaggaatctcatcattctgagagcagggccagacagtgtggcctggattcacgaggtctcctggtcaggagccctgtctctaaatctgccgctgcccctacagtgacctcggttaggggaacgtcagcccactttggtatccagctcaggggtggcacccgcctgccagacagactgtcatggccatgtgggccagggtctgcaggatggcagcaggaattcgcagccatggacagttctgaaactctagacgcctcttgggaggcagcatgtagtgacggggcaagacgcgtgcgggctgcgggaagtctgcccagcgctgaactgtccagcaattcgtgtagccctggttgtggacctgaagtgccacccaccccacctgggagccactccgcctttaccagtagcttcagttttatccggttgtcactcggatccgccggtgagcggggagaagctgaagggtgcccacctagccgcgaagccgaaagccactgccagagcccacaggagatgggagccaaagcagcctccctagacggcccacatgaggatcctcgttgtcttagccgccctttctctcttctggctactagagtgtccgccgacttggctcaagccgctcggaacagttcgagaccagaacgggacatgcactccctccctgatatggaccctggtagcagttcatctcttgatccgtctctggcaggttgtggcggagatggttccagcgggagcggcgacgcccacagctgggacaccctcctgcggaaatgggagcccgtcctcagggattgtctgctgcgtaataggagacagatggaggtcatctcactgagacttaaattgcagaagcttcaagaggacgcagtcgaaaacgatgactacgataaagctgaaactcttcagcagagactcgaagaccttgaacaagagaaaatctccctgcattttcagcttccctcaagacagccagcattgagttcattcctcgggcatttggccgctcaggttcaagctgcgctccggagaggggctacccaacaagccagcggggatgatacccacactccactgcgcatggaacccaggttgctggagccaacagcacaggacagtctccacgtgtccatcacgaggagagattggttgctgcaggagaaacagcaattacagaaagaaattgaggctctccaagcacgtatgttcgtcctggaagcaaaggatcaacagttacgccgagaaatcgaagaacaggagcagcagctacagtggcaggggtgcgatctcactccactggtggggcagctttcactgggccaactgcaggaagtctcaaaggcactacaggacaccctcgcctctgcaggccagatcccatttcacgcagagcctcccgagacaattagatccctacaggagcgcattaaaagcctgaatttatctctaaaagaaatcaccactaaagaaacaatttcagggcgactcaaaacatcccctaggagacttgatcactag

SEQ ID NO: 221023 - DNA, 390 bp, synthetic construct
  misc_feature 1..390: note = Description of Artificial Sequence: Synthetic coding sequence
  source 1..390: mol_type = other DNA
atgaccatgacaaccatgcccgagtccctgaatagtcctgtttccggaaaagctgttttcatggaatttggaccacccaatcagcagatgtccccctctccaatgtcacacggacactattccatgcactgcctccacagcgccggacatagtcaaccagacggcgcatattctagcgccagctcatttagtagaccattaggctatccctatgtgaattctgtttcctcacacgcatcttcaccctacatctcctcggtgcaaagctatcctggcagtgcctctctcgcccagagccgactcgaggaccccggacaggacctggtgccgaagcaggcaatccaggtgcaggaagcggacgaggctggctggggaggcagtgggggatag

SEQ ID NO: 221024 - DNA, 516 bp, synthetic construct
  misc_feature 1..516: note = Description of Artificial Sequence: Synthetic coding sequence
  source 1..516: mol_type = other DNA
atgacaatgaccaccatgcccgaaagccttaacagtcctgtttccggcaaggcagtgtttatggagtttggccctccaaatcagcaaatgagcccatcgcccatgtctcatggacactattcgatgcactgcctgcacagtgctggacacagccaaccggatggggcatattcatcagctagttccttcagtcggccactgggctacccttacgtgaactccgtaagctctcacgcaagctctccctacatctctagcgtgcagtcatatccagggagcgcctcattggcacaatctcgcttggaagatcctggggctgatagcgagaagagtaccgttgtagaaggaggggaggtgcgatttaacggcaaaggcaaaaaaattcgcaaacctcgcacgatttacagtagtctccaactgcaggctctgaatcgccgttttcaacagacccagtatctggccttgccagaacgagcagaacttgctgcctctctgggtctgacacagacacagtag

SEQ ID NO: 221025 - DNA, 768 bp, synthetic construct
  misc_feature 1..768: note = Description of Artificial Sequence: Synthetic coding sequence
  source 1..768: mol_type = other DNA
atgacaatgaccacgatgcccgaaagtctaaatagccccgtgtctggcaaagccgtatttatggagttcggacctcctaaccagcaaatgtctccttccccaatgagccatgggcactacagtatgcactgtttgcactcagccggtcactcccagccagatggcgcatactcgagcgctagcagcttttctcgacccttgggatacccatatgtcaactccgtgtccagtcatgccagctcaccatacatttcctcagtgcagagttacccagggtctgcaagcctggcccaaagtagactcgaggacccgggagccgactcggagaagtcaacagttgtcgagggtggggaggttaggttcaatggcaagggcaagaagatccggaagcccaggacgatttactcttcactgcagctgcaggccttgaataggcgctttcagcagacacagtacctagcgctgcccgagcgggctgaactggctgcctcactgggcctgacccagacacaggtcaagatttggtttcagaacaagagaagtaagttcaagaagctgatgaaacagggcggagcagcgttggagggaagcgcactcgctaatggccgtgccctgtcagccggaagtcctcccgtgcccccaggctggaacccaaattcatccagtgggaaaggaagtgggggaaacgccggatcatatatcccatcatatacaagctggtacccaagcgcgcaccaggaggcaatgcagcagccccagcttatgtag

SEQ ID NO: 221026 - DNA, 564 bp, synthetic construct
  misc_feature 1..564: note = Description of Artificial Sequence: Synthetic coding sequence
  source 1..564: mol_type = other DNA
atgaccatgacgaccatgcctgagtcactgaacagtcctgtgtctggcaaggcagtgttcatggagttcgggccaccgaaccagcagatgtccccctcccctatgtcacacgggcattattctatgcattgcctgcattccgctggccattcccaacctgatggagcgtattcaagcgcatccagtttttcccgccctttgggatatccttacgtgaacagtgtttcgagtcatgcgagctctccctatatttcttcagttcagtcatacccagggagcgcctctctcgcccagagccggctcgaggatcccggagctgattctgagaagtctactgttgtcgagggaggggaggtgcgctttaacgggaagggtaagaagattcggaagccaagaacgatatacagctcacttcagcttcaagcattgaatcgaaggttccagcagacccagtaccttgcactgccagaacgggctgagctcgccgcaagcctgggcctcacccaaacgcaggttaagatttggttccagaataagcgctcaaaatttaaaaaactaatgtag

SEQ ID NO: 221027 - DNA, 1722 bp, synthetic construct
  misc_feature 1..1722: note = Description of Artificial Sequence: Synthetic coding sequence
  source 1..1722: mol_type = other DNA
atggggaaatgcttaagttgctgtaaagaagaccagagtttccagaggtgttccccagaagaccaggtgagcacggatgctcagcaccggggtgcgagtagcatcagccagccctctatcagtctgggacacaagactagttactcacctgttacccataaagtgaatgctgctaaggcttctagaagactattatctgtctcctcgccttccttttcagagagacgttattccctcttcgtaggcttccagaaaaggaatgcgtctccctactggcagcaatcccgcgcaaacttcgatagcgaagaagacaccggctttacagatataaaaagtagctccgaccactgtggctcctttataagccgccgaagaaggttcagctccagaaagcttagcatcgtttcttactacaagtctgccatattcttcgacccccaggcatctggccagaatgttttcaatttgaacgaaatcgagatttttagcaaaacttcttctaatacagatgcgaaaaagcatataactatcagtgctcccgagtataacacgaagaatttcaagaactttgagacgaacaccacatccccagcatttgggaacacgatcgacaccgctagttaccaacaatcaacaagctcattctttagcttagcctcggatatttcctctccagatcagcagaacggaattgcgaatgatatacaacagcgcggtcagctgtgtaaggaccttaaagacttccttcatccacgtcctgagagttatagtacaggccactcaccaattatgatcccgcagcaccctagccagagcggcacatttcctttcttgcataaagcagggttttcctcttcttacaagaactcaggttgttttattcccccacagtctgagctcacatccggcttgtttgaggatgaagacttcgccgttctgttccaagacgaagataggagttctccaatcgaaatccctaagatccggtacattaccgcaaatacagacaccgaagagcagtccttccctgtgcccaaggcatttaatactcgcgtcgaggaactcaatctggatgtgctcttgcagaaggtggatcatctgcggatgtccgagtcaggcaaatctgaatctttcgagcttctgagagaccataaagagaaattcagagacgaaattgagttcatgtggcgtttcgcaagagcctatggggatatgtatgaactgagtactaacacacaggaaaagaagcactatgctaacattggcaagacattgtctgaacgggcaatcaaccgcgctcccatgaacggacattgtcatctatggtatgcagtcttgtgcggctacgtctcagagtttgagggactccaaaacaagattaactacggccacctgtttaaagagcacttagatatcgctataaagttgctgcccgaggagccattcttatattacttaaaaggcagatactgttacactgtcagcaagctgagttggatcgagaagaagatggccgcaaccctctttgggaagatcccatcaagcacagttcaggaggccctccataatttcctcaaggcagaggaattgtgtcccggatatagcaatcccaattatatgtacctggctaaatgttatacagatctagaggagaatcagaacgctctaaaattctgcaacttagctctgctgctccctacagtcaccaaagaagagctttag

SEQ ID NO: 221028 - DNA, 654 bp, synthetic construct
  misc_feature 1..654: note = Description of Artificial Sequence: Synthetic coding sequence
  source 1..654: mol_type = other DNA
atgacaggcgtttttgattcattagtggccgatatgcactcaacgcagatcgctgcctcgagtacgtaccaccagcatcagcaaccccctagtggtggaggagctggacccggtggaaatagctccagctcatccagcctgcacaaaccccaggagagccccacgctccccgtgtccaccgcaaccgatagcagctattatacaaaccagcagcaccctgcgggaggtggcggaggaggtggctccccctatgcacacatggggtcctatcagtatcaagctagtggcctgaataacgtgccatactcggctaaatcatcctatgacttaggctatactgcagcatacacttcgtatgctccgtatggaactagtagtagccctgccaataatgaacctgagaaagaggacctcgaacccgagatccggatcgtgaacgggaagcctaagaaagtacgaaaacccaggactatctactcaagcttccaactggccgctttacagcgcagattccaaaaaacccagtatctcgcccttccagaacgggcagagctcgccgctagcttgggcctgactcagacccaggtgggcttggccccatgtagaggagaagagtcggctggccttcgctggcttggtagtaggagggtttag

SEQ ID NO: 221029 - DNA, 864 bp, synthetic construct
  misc_feature 1..864: note = Description of Artificial Sequence: Synthetic coding sequence
  source 1..864: mol_type = other DNA
atgtctggaagcttcgacagaaagttgtcatctatactcacagatatcagcagctcactgagctgccatgcaggctccaaagactcaccaacactgccagagagctctgttaccgaccttggctactacagcgctcctcagcacgactactatagcgggcagccttacgggcagacggtaaacccatacacataccaccatcagttcaatctgaatgggcttgctggcaccggtgcctacagccccaaaagcgaatatacttacggagcctcctaccggcagtatggcgcttatcgggagcagcctctccctgctcaggaccctgtcagcgttaaagaggagcctgaagcggaggttaggatggtgaatggaaagcccaaaaaagtccggaaacctagaacaatttacagttcttaccaactggccgctctgcagagacgattccagaaggctcagtacctggctctgccagaacgggcagaactggccgctcagttggggctcacccagacccaggtcaagatctggttccagaataggcggtccaaatttaaaaagttgtacaagaatggtgaggtgcctctggaacatagcccaaacaattccgatagtatggcttgtaactctccgccatcccccgcactctgggatacaagcagccactccactcctgcgcctgccaggtcgcagctgccccctccccttccctattcagcgtccccttcttatctggacgaccctacgaatagctggtatcatgcgcagaatctcagcggtccacaccttcagcaacaacccccacaaccagcaacactgcaccacgcaagcccaggccctccaccaaatcccggagcagtgtactag

SEQ ID NO: 221030 - DNA, 723 bp, synthetic construct
  misc_feature 1..723: note = Description of Artificial Sequence: Synthetic coding sequence
  source 1..723: mol_type = other DNA
atgactagtctgccatgcccccttcctgggcgagacgcctccaaggctgtcttccctgatctggcacctgtacctagcgtcgcagctgcctacccactaggtttatcacccaccactgcagcaagccccaacctgagttatagccgcccttacggccatctactgtcctacccctacaccgagcccgcaaatcctggggattcctatctgtcttgtcagcaaccagccgctctatcccagcccctgtgtggtcctgctgaacatccacaggagctggaagcagactctgagaagccacggttgtccccagagccttccgagcggcgaccccaggctcctgccaaaaagctgaggaagcctcggacgatttacagcagcctacagctccaacacttgaaccagcgttttcagcacacccagtacttggcactgcctgaaagggcgcagctcgccgctcagctgggcctgacccaaactcaagtcaagatctggtttcagaacaagcgcagtaagtataagaagttactgaaacagaatagcgggggtcaggagggggacttccctggcagaacattttctgttagtccttgttctccacccctgccctctctgtgggatctccccaaagcaggtactttaccaacgtctggctacggaaattcttttggtgcatggtatcaacaccactcaagcgatgtgctggcctctccacagatgatgtag

SEQ ID NO: 221031 - DNA, 507 bp, synthetic construct
  misc_feature 1..507: note = Description of Artificial Sequence: Synthetic coding sequence
  source 1..507: mol_type = other DNA
atgaagctttccgtcctcccccctcgcagtttgctggccccttacacagtgctgtgttgtccgcctgactctgaaaaacctcgcttgtcgcctgagccctcggagcgcaggcctcaggctccggctaagaagctgagaaaacctcggactatctactcttctttgcagctccagcaccttaatcagagatttcagcatactcagtatttggccctgccggagagggcacaacttgcggctcaactgggcctgacccagactcaagttaaaatctggttccagaacaaacggagcaaatacaagaagctgttaaagcagaactctggtggccaagaaggggacttcccaggcagaactttttctgtttccccttgcagccccccactcccaagtctctgggaccttccaaaggcaggtaccctacctacttcggggtatggaaacagctttggagcctggtatcaacaccactccagtgacgtgctggcatctccacagatgatgtag

SEQ ID NO: 221032 - DNA, 1473 bp, synthetic construct
  misc_feature 1..1473: note = Description of Artificial Sequence: Synthetic coding sequence
  source 1..1473: mol_type = other DNA
atggatcacacggacaacgagctgcaagggacaaattcaagcggctctttgggcggtctggacgtccggaggaggatacccattaagctaatttccaagcaggccaacaaagcaaagcctgctcccaggacacagcgcacgataaacaggatgcctgcaaaagctcctcctggagacgagggtttcgattacaacgaggaagagaggtacgactgcaaaggtggcgagttgtttgcaaaccaacgaagatttcccggtcacctattctgggactttcaaattaacatactgggtgagaaagacgacactccggtgcatttctgtgacaagtgcggactccctattaagatctatggtagaatgatcccatgcaagcacgtgttttgttatgattgcgccatcttgcacgaaaaaaaaggggataaaatgtgtcctggctgtagtgatcccgtccagaggatagagcaatgtaccagaggctcgctctttatgtgttccattgtgcaggggtgtaagcgtacttacctgtctcaacgcgaccttcaggcacatatcaatcacaggcatatgagagctggtaaacccgtgacaagagcctctctcgaaaacgtacaccctcctattgccccaccacccactgaaattccagagcgttttattatgccaccagataagcaccatatgtcacacattccacccaagcagcacatcatgatgccacctcccccactgcagcatgtccctcacgaacattacaatcagccccacgaggatattagagctcctcccgctgaactgagtatggcccctcctccaccacgtagtgtcagccaagaaacattccgtatttccacgaggaagcacagcaatcttattacggtccccattcaggatgactcaaactccggagcacgggagccaccacccccagccccagcccctgctcaccaccaccctgaataccaagggcagccagtggtgtctcatcctcatcatattatgcccccacaacagcattatgccccacccccaccacctcccccaccaatttcccatccaatgccccaccctccacaggccgcaggaactcctcatttagtgtatagccaagcccctccgcctccaatgacatcggcccctccaccaattacaccaccacccggacacatcatagctcagatgcccccttatatgaaccatcctcctcccggtcctccgcctccacagcatgggggacctcctgtcacagcgccacctccccaccattacaacccaaacagtctcccccagttcacagaagatcaaggtaccctgagcccccctttcacccagccgggaggaatgtcgcctggtatctggccagctcctagaggacccccacctcctcccagactccagggtcccccatctcagacccccttgcctgggccacatcatcccgatcagacacggtaccgcccatactatcagtag

SEQ ID NO: 221033 - DNA, 798 bp, synthetic construct
  misc_feature 1..798: note = Description of Artificial Sequence: Synthetic coding sequence
  source 1..798: mol_type = other DNA
atgatgacaatgaccaccatggcggacggcctggagggacaggattcctctaagtccgcttttatggagtttggacagcagcagcagcaacaacactccccagccatggctggggctcactatcctttgcactgtctgcactctgctgccgcagcagctgcagctggttcacaccaccaccaccaccaccagcatcatcaccacggctctccttatgccagcggcggaggcaactcttataatcataggtctcttgcagcttatccctatatgtcgcactcccagcacagcccatatctgcagtcataccataattcttccgcagctgcacagacgaggggggacgacactgatcagcagaagacaacggtgatcgaaaacggcgagatccgctttaatggcaaaggtaaaaagattcggaaaccgagaactatttattcctctctgcaactccaggcgttgaaccacagattccagcagacacaatacctcgctctgccagagcgggctgagttagctgcatcactcggcttaactcaaactcaggtaaagatctggttccagaacaaaaggtctaaatttaagaaactgttgaagcaggggagcaatccacatgagtccgacccactgcagggaagcgctgcactgtctcccaggtctcccgctttgcctccagtgtgggatgtttcagcatctgccaagggggtgagcatgccccctaacagctatatgccgggatactcacattggtattcctcaccccatcaggatacaatgcagcggcctcagatgatgtag

SEQ ID NO: 221034 - DNA, 882 bp, synthetic construct
  misc_feature 1..882: note = Description of Artificial Sequence: Synthetic coding sequence
  source 1..882: mol_type = other DNA
atgatgaccatgactaccatggctgacgggttggaaggccaggacagcagtaaatcagcgttcatggagtttggacagcagcagcaacagcagcaacagcagcagcagcagcaacagcagcagcaacaacagccaccacctcctccgcctcccccaccccagccgcattctcagcagagctccccggctatggcgggagctcactaccccctgcactgtctgcattctgccgcagccgcagccgctgcagggagccaccaccatcatcaccaccaacaccatcatcatggctccccatatgcctcaggtggagggaatagttacaaccatcgttcgctggcggcttatccgtatatgagccacagccaacattctccatatttgcagtcatatcacaatagtagcgctgcagcccaaaccagaggcgacgacaccgaccagcagaagaccacagttatcgagaatggcgaaataagattcaatggcaaaggaaaaaaaattaggaaaccaaggactatctattcctccctgcagttacaggcgctaaaccaccggtttcagcagacccagtacctcgcccttcctgagagagcggaactggcagcaagcctgggcctgactcagacgcaggtgaaaatatggtttcagaacaaaagaagcaagttcaagaagctattaaagcaggggtccaacccgcacgagagtgatcctctgcagggctccgcagcgttaagcccaaggagccccgcactgccgccagtgtgggatgtctcggcttctgctaaaggggtgtcaatgccaccgaattcttacatgcctggctatagtcactggtatagttccccccatcaggacaccatgcagagaccacagatgatgtag

SEQ ID NO: 221035 - DNA, 9084 bp, synthetic construct
  misc_feature 1..9084: note = Description of Artificial Sequence: Synthetic coding sequence
  source 1..9084: mol_type = other DNA
atgaatctacaccaggttctcacgggagccgtgaatccaggcgatcattgtttttcagtgggctccattggcgatcagaggtttactgcttacgcgtctggctgcgatatagtgatccttggtagtgatttcgagcgcctgcagatcatccctggagctaagcacgggaatatccaggttggatgcgtcgactgcagcatgcagcagggtaagatagccgcttcttatggcaacgtgatctctatttttgagccagtgaacctgccaaaacagaagaagaatctggaactgtacagtcagtggcagaagtcagggcagttttttctagagagtattgcccataatattacgtgggaccctactggaagtcgtctcctgactggctcctcgtatctgcagttgtggtctaataccaatcttgagaagcctaccgaagacgaaaacctaaacaaaaccgatttaaacttcggtgactggaaatgcatctggcactgcaagaccgcctcccaggttcatctgatgaaattcagccccgacggagaattttttgcaaccgccggaaaggatgactgcctgctgaaggtgtggtacaacgttgaaaattggcgaaccgcagtcacgtccccagacggaagttccgaaaagcaaagccagggcgagatcgactttagtttcgtctatctggctcaccccagggccgtgaacggtttcagttggaggaagactagcaagtatatgcctcgagcctccgtttgtaacgtcctgctgacttgctgcaaagacaacgtatgtagactatgggtggaaacctttctacctaatgattgcctcttatacggcggtgattgttctcactggacagaatccatcaacctgaccaacaatttcaagcgcaacgctagctccaaggagcgagtgcagaacgcccttgaggtgaatctacggcacttcagaagggggagacgccgatccttggctttagtcgcacatacaggctacttgccacatcagcaggaccctcaccatgtccatagaaacactccgctgcacgccaacgccctgtgtcacttccacattgcagcgagcatcaatcctgctacagatataccactcctgcccagcatcacttcactcagcctgaacgagaatgaagaaaagacgggcccatttgtagtgcattggctgaataacaaggaactacatttcacccttagcatggaggtgttcctgcagcagctacgtaaaagttttgaacagccgtcgagcgaggcctccgtcgaagactctaatcaggccgacgtgaaatcggatgaagagacagatgacggtgtggatgatttaaagatcaatcccgagaaaaaagagttgggctgtgacaagatggtgcccaattcaagcttcacgtctctgtcgagcgctgcaattgaccaccagattgaggtactcttgtctgagtggtcaaagaatgccgacatgctgtttagcatccatcctatggacggcagccttctggtatggcacgtggactggttagacgagtaccagcctgggatgtttcgccaggtgcaggtgtcctttgtgagccggattccggtggcttttcccaccggcgatgctaacagtctgtgcaaatcaattatgatgtacgcatgcacgaaaaacgtggaccttgcaattcaacagggcaaacagaaacctagcggcctaacacgctccacctccatgttaatctccagcggccataacaaaagtagcaatagcctcaaattgtctatcttcacacccaacgtcatgatgatcagcaaacatgctgacggtagcctgaatcaatggcttgtgtcttttgcggaggaatctgccttcagtacggtgctttcaattagccacaaatccaggtattgtggacaccgattccacctgaacgacctcgcctgccactcagtgctgccactactcttaacaacgagtcaccacaatgccctgcgaacacccgatgtggacaatccagaacaaccctttgacgcccttaatattgaagaatgctctttaacccagcagaataagagtacggtggacgtcgcctttcaagacccgtccgcagtgtattcagagctgattctctggcgggtagacccagtaggccctttaagcttctcgggtggagtttctgaactcgccaggatcaactctttacatgtctcagcattctcaaatgtcgcttggttgccaaccctgattccatcatattgcctgggggcttactgcaattcccctagtgcgtgctttgtcgccagtgatggacagtatttaaggctctatgaggcagtcattgacgctaaaaaactcctatcagagctgtcaaatcccgagatcagtaagtatgtgggagaggtgtttaacatcgtgtcccaacagtctactgcccgtccaggatgcatcatagccctggatcccattaccaagctgcacgggaggaaaacacagcttctgcatgtttttgaggaggactttatattgaataaccttgagaagaaatcactgggaaaagactctatcctctcgaacgcaggaagctcacctaacggcttttctgagaagttttatttgattgtgatcgagtgcacacaagataacagatcccttctgcacatgtggaaccttcacctcaaatcaattccagttagtctcgatgaaaaggtcgatacaaagctttccgaagctgtttggcaaccagaagagcactactccagctctcctgaaaagattctgtcgcccttcagtcagaagtaccaggcttgcagggccaatttgcaatctaccagcaggttgacattgtttagtgagatggtgtattcacaggaattgcatctcccagagggcgttgaaatcatttctatcaaaccctccgccggacacctgagctcctcgtccatttatcccgcttgttccgccccttacctgctggctacttcttgcagcgatgaaaaggtaagattctggcgatgtcgggtcacagatggcgaatctgcgacatccaaaaatggtaaaattgacctagcttacatctgggaggagtggcctctgctgatcgaagacgggctccagtcgaattcctctattaccgttccgggacggcctgtggaggtgtcctgcgcccatacgaacagactggctgttgcatacaagcagccagcaagtaactcgcggtcctcacaggatttcgtcatgcacgtatctatcttcgaatgtgaatcgaccggcggatcctgttgggtcctagagcagaccatacacctggatgagctatcaaccgtgctagattccggaattagcgtggactcgaatctagtcgcttacaataagcaggatatgtacttgtcgtctaaagaaaacattaccagtaataccaagcacctagtgcacctggactggatgtccagggaagatggttctcacatcctcacagttggcatcggcagcaagctgttcatgtatgggccactggctggtaaagtgcaagatcagactggaaaggaaacactagcctttccactgtgggaaagtacaaaagtcgtgcccttgtcaaagtttgtgctccttaggagcgtggacctcgtgtccagtgttgatggctcacccccttttccagtctccctgagctgggtcagggatgggatccttgtagttggcatggactgcgaaatgcacgtgtactgccagtggcaaccatcatctaaacaggagccggtcatcactgacagttatagtggctccacccccagcatcacctccctcataaagcagtcgaattcatcttcagggctgcatccaccaaagaaaactttgaccagatctatgacctccctggcgcaaaagatctgcgggaagaagacagcatttgaccccagtgtcgacatggaggacagcggattgtttgaggccgctcatgtgctgagtccaacactgcctcagtatcacccactgcagctgctcgaactaatggatttgggaaaggttcgacgcgcaaaggctatcttgagccacttggttaaatgtatagccggtgaagtggtagcactgaatgaggctgagtcgaatcatgagcgtcgactcaggagtctgactatctccgctagtggcagcacaaccagagaccctcaggcatttaacaaggcggagaacaccgattacaccgaaatcgattccgttccacccctgccattgtacgcgttactagccgcagatgacgactcatgctattcatcactggaaaagtcgtccaacgagtcaaccctgtccaaatcaaaccagctgtcgaaggagtcatatgacgagctgttccagacccagctgctgatgaccgacacacacatgctcgaaacagacgaggaaaacacaaagccacgtgtaattgatctcagccagtatagtcctacatacttcggccctgagcacgcgcaggtgttgagcggtcacctgctgcatagctcattacctggactcagccgcatggagcagatgagtctgatggctctggctgacaccatcgctacgacttccacagatatcggtgaatctcgcgacaggagtcaagggggagaaacactggatgagtgtggactgaagttcctcctcgctgtgaggttgcatacatttctcacaactagtctacctgcataccgagctcagctcctccaccaaggtctcagcaccagccatttcgcctgggcatttcactccgtggcagaggaggagctgcttaatatgctaccagcaatgcagaaagatgaccctacctggtctgagttgagagctatgggcgtaggctggtgggtgcgaaacaccaggattctgcgcaaatgtatcgaaaaagtagctaaagcggcattctacaggaaaaacgacccactcgatgcggcaatcttctacctggcaatgaaaaaaaaagccgtaatctggggactgtaccgtgcggagaaaaacaccaggatgacccaattttttggccataattttgaggatgaacgctggcgcaaagccgctttgaagaacgccttctctctcctcggtaagcagcgctttgaacattctgcagcttttttcctcctcgccggttgtcttagagatgcgattgaggtctgcctcgaaaagctcaacgacattcagctggccctggtgatcgccagactgtacgagtccgagttcgatacgtcagccgcttataagagcatcttgcggaaaaaggtacttgggattgactccccagtcagcgagctgtgttcccttaatattaatatgcaccacgacccatttttgaggtcaatggcttattggattctcgaagactatagcggcgctttggaaacactcatcaaacagccaatacgggagaatgacgaccaggtgttatcagcttctaacccaacagtgttcaacttttataattacttgcgcacccaccccctgctcctgaggcggcacttcggttcctcagacacatttagcactcatatgtctctgaccgggaagagcggactggccggaacaattaacctcagcgagcggcgtttattttttaccacagcttccgctcacctcaaggccggatgtcctatgctggcactggaggtcttgtccaagatgcccaaagtgataaagaagactaggccgttctaccgcgctagctccttcctggatacttcgaaagattgttcaccaagctctcccttaaagctcgatgcaagggaagacaaatcctccgctgtagactggagccagagcttaatcaacggcttcggttcctcttcagagggttccagtgaaaagcaaagtaatagcaccctttctttcgattggtcccagccatcagtagtctttcaagatgattcactggagttgaagtgggatagcgacaatgatgaggagaatgaggacgtgcctatttccatgaaggagctgaaaccactgcagaggaagactgacaaaaagttggatgacattagcagcaattatacagaatcgttcagcaccctggacgagaatgaccttctaaatccctctgaggatatcatcgctgtgcaattgaagtttagagcatgcctgaagatcctgacagttgaactgcgaaccctatctacaggatatgagatcgatggcggaaaattaagatatcaactctaccactggctggaaaaggaagtgatagctcttcagcgaacttgtgacttctgttcggatgcagaagagctgcagtcagcctttggcaggaacgaggatgaattcggtctgaacgaagacgccgaagatttgcctcatcaaaccaaggtgaagcagctacgcgagaactttcaggagaagaggcaatggctcctgaaataccagtccctgctacggatgtttctcagctactgcatcttacacggtagtcatggaggtggcctcgctagtgtgcggatggagctgattctcctactccaggagtcgcagcaggagaccagcgagcctctgttctcttctcccctgtccgagcagacctcagtgccattgctgttcgcgtgcacagcgaatgccaagactgtggtagctaatccactactacacttgtctaatctgactcatgacattctgcacgctattattaactttgactcaccaccccatccagatattcagagcaacaaagtctacgttatgcataccctggcagctagcctctcagcctgtatctatcagtgcctgtgtggcagccacaactattccagcttccaaaccaaccagtttaccggtatggtgtatcagactgtccttttgccccacagaccatccctgaaaactggaagcctcgatgaggccctgacaccaaatacaagtccggcacaatggccgggtatcacttgtctcatcagactcctgaactcctcaggcgaagaagctcagagtggtctcaccgttctgctgtgcgagatccttactgcggtgtacctttccttgtttatacatggcctggccacccattcaagcaacgagctatttcgcatcgttgcgcacccactgaatgagaagatgtggtcggccgtctttggtggaggagcccacgtccccagcaaggaacagacgcacagcaaaacactgccggtctccagtctggtggaagaaggcgagaagcagaacaagcgattccgaccctctaagatgtcatgtagagagagcgctcctctgactccttcctctgcccctgtgagccaggagtccctggcagtgaaagagaagttcatcccaccagaactgtctatctgggactatttcattgcgaagcccttcctcccatcctcccaatctagagccgagtatgactctgaagagtcgctgggaagtgatgatgacgataacgacgacgatgacgatgtccttgcaagcgactttcatctacaggagcactccaactccaattcttacagctggagcctgatgcggctggccatggttcagctagtcctcaataacctgaagacattctacccattcgctggtcacgacctggctgagctgccggtaagctcaccgctctgtcatgctgtcctgaagacactgcagtgctgggagcaggttctgcttcggcgattagagatacacggtggacctccccagaactacatagcctcgcacacagccgaggaatctctgtccgccggacccgcaatcctacggcataaggcccttctggagcccactaacactccctttaaatcgaagcaccatctcgccttgagcgtgaagcgactgtggcaatatctggtgaagcaggaggaaatccaagagactttcataaaaaatatttttactaaaaagcggtgccttaatgaaattgaggcggacctgggttatccagggggaaaagccaggatcatccataaagaaagcgacattataaccgcctttgccgtcaacaaagccaatagaaactgtatcgccatagcttcctctcacgacgtacaagagctagacgtcagcggcatcttggccacgcaggtgtatacctgggttgacgacgacatcgaggtcgagacaaagggctccgaggattttctggttatccatgcccgtgacgacctgaccgctgtacaggggacaaccccttacacacactcaaaccctggcacacctattaatatgccttggcttggaagcacacagaccgggagaggcgctagcgtgatgattaaaaaggctattaataatgttagaaggatgacctcacatccaacactcccatactatctaactggggctcaggacggatccgtcaggatgtttgaatggggtcatagccagcagattacttgcttccgctcaggaggcaacagccgagtcactaggatgagattcaattatcagggcaacaagttcggaattgttgatgcagacgggtatctgtctctgtaccagacaaactggaaatgttgcccagtcacaggatcaatgccaaagccttacctgacctggcagtgccacaataaaacggctaatgacttcgttttcgtcagctcctccagtttgatagccaccgccggactgtcgaccgataatagaaacgtgtgtctgtgggacaccctggtagccccagccaacagcttggtgcacgccttcacctgccacgatagcggcgcaacagtgctggcctacgctcccaaacaccagttgttaattagcgggggacggaagggtttcacttacgtcttcgacttatgccagcgccaacagcgtcaactgttccaatctcacgattcccccgtcaaggctgttgcggtagaccccactgaagagtattttgtgactggctctgccgagggaaacataaagatctggtcattatctacctttgggctcctgcacacattcgtctccgagcatgctcgccagtccatcttcagaaacatagggactggggtcatgcaaatcgaaaccggacctgccaatcatattttcagttgcggcgctgacggtacgatgaaaatgcggatcctccctgatcagttctcaccgctgaacgaagtcttgaagaatgacgttaagttcatgctgtat

SEQ ID NO: 221036 - DNA, 1770 bp, synthetic construct
  misc_feature 1..1770: note = Description of Artificial Sequence: Synthetic coding sequence
  source 1..1770: mol_type = other DNA
atgaatctgcaccaggtgctcactggggcagtaaaccctggcgatcattgcttctcagtgggctcaattggtgatcaaagattcacagcatatgcctctgggtgcgatatcgtcatccttggaagcgatttcgagcgcctccaaatcatccccggagctaagcatggtaatatccaagtgggctgtgttgattgttcaatgcagcagggaaagatcgcagccagctatgggaacgtgataagcatttttgagccagtgaacctgccaaaacagaagaaaaatctcgagctgtacagtcagtggcaaaagtccggacaattttttcttgagtccatcgcacacaatatcacctgggacccaacaggaagcaggctcttgaccggctcctcctaccttcaattatggtctaatactaatttggagaagcccacagaagatgaaaatctaaacaagaccgatctaaacttcggagactggaagtgtatctggcactgtaaaactgccagtcaagtccatctcatgaaattttcccccgacggggagtttttcgctaccgcgggaaaggatgattgtctcctgaaggtctggtataacgttgaaaactggaggacggcagtgacctctccagatggttcctcagaaaaacagtcacagggggagattgactttagcttcgtgtatctcgcccatcctcgggctgtgaatggcttcagctggaggaagacatctaaatacatgccccgtgccagcgtctgtaatgtgctcctgacatgctgcaaggataacgtgtgccgactgtgggtggaaacattcctgcctaacgactgtttgctgtacggaggggactgctctcactggactgaatcaatcaatctcactaacaatttcaaacgaaatgccagttcaaaagagcgggtgcagaatgcgctcgaagtgaatctccggcatttccggcgagggaggcgcaggagccttgccctggtcgctcacactggatatttgccacatcaacaggatccacatcatgtgcaccggaatactcctttacacgcaaacgccttgtgtcattttcacattgcagcaagtattaaccccgcaacagacattccgctgctgcccagcatcactagtctgagcttgaacgagaacgaagagaagactggaccattcgtggttcactggcttaacaacaaggaactccactttacgctctcaatggaagtgttcctccaacagctgaggaagtccttcgagcagccctcaagcgaggctagcgtcgaggacagcaatcaggccgatgtgaagagtgatgaggagactgatgacggcgtcgacgacctaaaaattaaccccgaaaaaaaggaactgggttgcgataagatggtgcctaacagctccttcaccagcctgtcttctgcggcaattgatcaccagatcgaagtcttactgtctgagtggtctaagaatgcagacatgttgttcagcattcacccaatggacgggtcactgttggtttggcatgttgactggctggacgagtatcaaccaggtatgttccggcaggtgcaggtgagtttcgtcagccggatccctgtcgccttcccaaccggcgatgccaatagtctgtgcaagagcattatgatgtatgcttgtaccaaaaacgtggaccttgccatccaacaggggaaacagaaaccttcgggattgacacgctcaaccagcatgctaataagctccggtcacaataagtcatctaactccctgaagtag

SEQ ID NO: 221037 - DNA, 9146 bp, synthetic construct
  misc_feature 1..9146: note = Description of Artificial Sequence: Synthetic coding sequence
  source 1..9146: mol_type = other DNA
atgaacctgcatcaggtccttaccggcgcagttaatcctggcgaccattgtttttcggtgggcagcattggcgatcagcgcttcactgcctacgcgagcggttgtgacattgtgatcttggggtcggacttcgaacgactgcagattatacccggagcgaagcatggaaatatccaggtgggctgcgtggactgctcgatgcagcagggcaagattgcagcctcttatggaaacgttatttccatcttcgaaccagtgaatctgccaaagcaaaaaaaaaacctggagctgtattcacagtggcaaaagagcggacaattttttctcgagagcatagcgcataatatcacgtgggatcccactggttcacgccttctgaccgggtcttcatatctgcagttgtggtccaacactaatttagaaaaaccgacagaagatgaaaacctgaacaaaacagatctgaattttggggattggaagtgcatttggcattgcaagactgcgagccaggtgcacctgatgaagttctcccccgatggggagttcttcgctaccgcgggaaaagatgattgtttattgaaagtgtggtacaatgtcgagaattggaggaccgccgtgacttcacctgacggaagcagcgagaagcagtcacagggggagatcgacttctcctttgtttatcttgcccatccgagggcagttaacggcttctcttggcggaagaccagcaagtatatgcccagagctagcgtatgcaacgtccttcttacatgctgtaaggacaatgtgtgccggctctgggtcgaaactttcctgccaaatgattgcctgctatacggaggagactgctcccattggaccgagtcaatcaacttaacgaacaattttaaaaggaatgcatcaagcaaagaacgcgtgcagaatgccttggaggtgaatctccgtcatttcagaagagggcgtagacggagcttggctctagtagcccacaccggttatctccctcaccaacaggatccgcaccacgtccatagaaacacccctctgcatgccaacgccctctgtcacttccacatagccgcttccatcaatcctgccacagatatcccactactgccttctatcaccagcctctccttaaatgagaatgaggagaagacaggaccctttgttgtacattggctcaataacaaagagttgcactttactctatcgatggaggtatttctgcagcagctgcggaagtcttttgaacaaccctcgtcagaggcatctgtagaggattccaatcaggcggacgtaaagtccgacgaagagacagatgatggcgttgacgacctgaagatcaaccctgagaagaaggagctggggtgcgataagatggttcccaatagctccttcacctctttatcgtcagccgctattgaccaccagatcgaggtgctgctgtcggaatggtcaaaaaatgctgatatgttgttctcaatccatcctatggacggttctctcctggtgtggcacgtagactggctcgatgagtaccagcctgggatgtttcgccaggtgcaggtgtcttttgtgagcaggattcctgtcgcgttccccaccggggacgctaattcgctttgtaagagcataatgatgtacgcctgcaccaagaacgtggatttagcaatccagcaggggaagcagaaaccttctggccttacaagatcgacctccatgctgatttcgtccggacacaataaatcaagcaactcccttaagctctctatattcacaccaaatgtaatgatgatatccaagcatgcagacggatcattgaatcagtggcttgtgagttttgcagaggaatcagcctttagcaccgtgctgagcatcagtcataaaagcagatactgtgggcatcggttccacctgaacgacttggcctgtcatagcgtgcttcccctgctgcttactacatctcatcacaacgccttgcggacacctgacgtagataatccggagcaaccctttgacgcgctcaatatcgaggaatgtagtctgactcagcagaataagtctacagttgatgtagcctttcaggacccctctgctgtttactctgaattgattctgtggcgggtggaccccgtgggccctctgagctttagcggcggtgtttctgagctggcacggatcaactccctccacgtgtctgctttcagcaacgtagcctggctgccaaccctgatcccatcctactgccttggcgcttattgcaacagcccaagcgcgtgctttgtagcctccgacggacagtaccttcgactatacgaagcagtgattgatgccaagaagttactgtcagagctttccaaccccgagatctctaaatatgtgggagaagtcttcaacatagtgtctcagcagtcaacggccagacctgggtgcataatcgcgctcgaccccatcactaaactgcacggcaggaagacacagttattgcacgttttcgaagaggacttcattctaaataacctggagaagaaaagtcttggcaaggattcgatcctctcaaacgccggatcctcccccaacggtttctccgagaagttctacttaatagtaatcgaatgcacccaggacaacaggagcctgctacatatgtggaacttgcacctgaagtctattcctgtgtctctggatgagaaggtggacaccaagttatctgaagcagtgtggcagccagaagagcactatagtagcagcccagagaagatcttgtctcccttctcacaaaaatatcaggcatgccgtgccaacctccagtcgactagcaggctgaccctcttttccgagatggtctattctcaggagctgcatctgcctgaaggggtcgagatcatatctattaagccttctgcgggtcacctgagtagcagctctatctatccagcttgctcagctccctatctgctcgcgacttcctgcagtgatgagaaggtgcggttctggcggtgccgcgtgacagacggtgagagcgccaccagtaaaaacggcaaaattgacctggcctacatatgggaggaatggcccctactaattgaagacgggcttcagagtaattcctctattactgtgccaggccgacctgttgaagtctcctgcgcccatacaaatcgtctggccgttgcatataagcagccagcttctaacagtcgcagttcacaggattttgtgatgcacgtttccatctttgagtgtgagtccaccggaggatcttgctgggtgctcgaacagaccatccacttggacgagttgagcacagtactagattctggtatttcagtggactcaaatctggttgcctacaacaaacaggacatgtacctgtcatcaaaagaaaacatcaccagtaacacaaagcatctggtgcatctggattggatgtcccgcgaagatggttctcatatcttgacggtcggaattggaagtaagttgtttatgtacgggcctcttgccggaaaggtgcaagaccagacaggtaaggagacactggccttcccactttgggagagcactaaagtggtgccactcagcaagtttgtgttactgaggtctgtggacttggttagcagcgtggacggaagccccccattccccgttagcctgtcctgggtgagagacgggattctcgtggtgggtatggactgtgagatgcatgtttactgtcagtggcagcccagtagcaagcaggagccagtgattacagactcttacagtggatccaccccctctattacttcgctgatcaagcagtccaattccagtagtgggctccacccgcctaagaaaacactgactcgatccatgactagtctggcacaaaaaatctgcgggaagaagactgcctttgatcccagtgtcgacatggaagactccggcctgtttgaggctgcacatgtattgtctcctaccctgcctcagtaccatccgctacagctgctggagctgatggatttaggtaaggttaggagagccaaggccattctgtcacacctagtgaaatgcatagcaggggaagtcgtagcactgaatgaagctgaatctaaccacgagcgccgtctgcggtccctgaccatttctgcaagtggctctacaacccgcgacccccaagccttcaataaggcagagaatacagactacacagagatcgatagcgtacctcctctgcccctatacgccctgctggcagccgacgatgattcctgttacagctccttggagaaaagctctaacgagtcaacattatcgaagtccaaccagctgtccaaagaaagctacgatgagctgtttcagactcagctgctaatgacagacactcatatgctggagacagatgaagaaaacactaagccaagagtcatcgacctgtcacagtatagtcccacttatttcggacctgaacatgcacaggtcttatcggggcacctcctgcatagtagcctgccaggtctgtcccggatggagcagatgagtctaatggccctggccgatacaatagccaccacaagcacagatattggagaatccagagatagatcccaggggggagagacacttgacgaatgtggactgaaatttctcctggctgtccgcctgcatacttttttaacaacttctttacctgcatatcgggctcagctgctgcaccaaggtctgagcaccagtcacttcgcttgggccttccatagtgtagccgaggaggagctcttaaatatgttgcccgctatgcagaaggacgatccaacttggtctgaattgagggcaatgggggtggggtggtgggtgcgaaatacaaggattctccggaaatgcattgagaaagtggcgaaggcagccttctatagaaagaacgaccccctggacgctgcaatcttttacctagcgatgaagaagaaggcagtgatatgggggctgtaccgcgctgagaagaacacgaggatgactcaattttttggtcacaatttcgaagacgaaaggtggaggaaggcagccttaaaaaacgcatttagtctgctgggcaagcaacgtttcgaacattcagccgcatttttcctcctggccggatgtttaagggatgctatcgaagtttgtcttgagaagctgaatgatatccaactggctctcgtaattgcgaggttgtacgagtccgagtttgacactagcgcggcttacaagagcatcttgcgaaaaaaggtcctagggattgacagccctgtgtctgaactatgttctctcaatatcaacatgcatcatgaccctttcctgcgtagtatggcctattggatcctagaagactactctggggcactggagacactgataaaacagcctattcgagagaatgatgaccaagtgctgtccgcttctaatccaacagtgttcaacttctataattacctgaggacacatcccttattgctgagaaggcactttggcagctctgataccttctccacacacatgagtcttacgggaaaatcaggcctcgctggcactatcaacctgtcagaacgaagactgttctttacgaccgctagtgcgcacctaaaagctggctgcccaatgctggcactggaagtcctgtccaagatgcccaaggtgataaagaagaccaggccattctaccgcgcaagcagcttcctcgatacttctaaggactgctcaccctctagcccccttaaactggacgcacgggaggacaaaagcagtgcagttgactggtcccagtccctgatcaatggcttcggcagttcctctgagggatcaagcgagaagcagtcaaactcaaccttgagcttcgactggagccagccttccgtggtgttccaggacgactctcttgaactgaagtgggatagtgacaacgacgaagagaacgaagacgtgccgattagcatgaaagagctaaagccacttcagaggaagacagataaaaaactggatgacattagttcgaattatacggaatcattcagtaccctggacgaaaacgacctgttgaacccgtccgaagatattatcgccgtccagctgaaatttcgcgcatgtttaaagatcctgactgttgagctcagaactcttagtaccgggtacgaaattgacgggggtaagctgcgctaccagctttaccactggctggagaaggaggtcattgctctgcaacggacctgcgatttttgttccgacgccgaggaactgcagagtgcgttcggaagaaatgaagatgaatttgggctaaacgaagacgcggaggatctcccccatcagaccaaagtcaagcagctgagagaaaattttcaggagaagaggcaatggctgctgaagtatcagagtctgctaaggatgttcctgagctattgtatcctgcacggaagccacggcggaggcctagccagcgtccgcatggaactcatcctgctgctgcaggagtcccagcaggagaccagcgagcctctcttttctagcccgttgagcgagcaaacgtcagttcccctcctgttcgcctgcactgccaatgccaagaccgtggttgctaaccctctcttgcacctcagtaaccttacacatgacatcctgcacgctataatcaactttgattccccaccccaccctgacatccagtcgaataaggtctacgttatgcatactctggcagcttccttgagtgcttgcatataccagtgcctgtgtggcagccataactattccagctttcagacaaaccagtttacaggtatggtttaccaaaccgtcctattgccacaccgtccatccctgaaaacaggatctctggacgaagccctcacccctaatacctctcctgcacagtggccaggcattacatgcctgattcgactgctgaacagctcaggtgaagaagctcagtccggattaaccgtgctgctttgtgaaattttaacagccgtttatctgagccttttcattcacggactggctacccacagttccaacgaactattccggattgttgcccatccacttaacgaaaagatgtggtctgcagtgtttggaggtggtgcccatgtcccatctaaggagcagactcattctaagaccctaccggtgagttctctggtcgaggagggcgagaagcagaataagcggttcagaccaagcaaaatgtcttgcagggagtccgcaccccttaccccatcaagcgctcctgtgtctcaagaatctcttgccgtgaaagagaagttcataccccctgagctgtccatctgggactacttcatcgccaaaccatttcttccttccagtcagtctagagccgagtacgacagtgaggaatccctggggagcgatgacgacgataacgatgacgacgacgacgtgctggcatccgacttccacctccaggagcattcaaacagcaacagctattcttggtctctgatgcgcttagctatggtgcagttggtccttaataatctgaagactttctacccattcgccggtcatgacctggcagagcttcccgtcagcagtcccctatgtcatgctgtgctgaagaccctgcagtgctgggaacaagtattgctgaggagactcgaaatccatggcggacccccacaaaactatatcgcctctcacactgcagaggagtccctgtccgccggtcccgcaatcctgcggcacaaggcccttctcgagcccaccaatactccatttaaatccaagcaccacttagccttgtcagtgaagagattgtggcaatatctggtcaagcaggaagaaatccaggaaacatttattaaaaacatcttcactaagaaaaggtgtctgaacgagtcacttgaagataactccgaaacgattaagaattccatgatggaagagcccaatattaataagatcgaagccgacctagggtatcctgggggtaaggcacgcatcattcacaaagagagtgacatcataactgcttttgcagtgaacaaagcaaataggaactgcatagctatcgcctctagtcatgatgtgcaggaattagacgtgtctggaatactggctacgcaagtttacacctgggtggatgatgacattgaggtggagactaaaggatctgaagatttcctggtcattcatgctagggacgatctcacagccgtgcaggggactaccccatacactcatagtaatcctggaacacccatcaatatgccctggctcgggtcaacgcagacgggcagaggggcttctgtcatgatcaaaaaggccattaacaacgtccgaagaatgacctcccaccctactttaccatactacctcaccggcgcacaggacgggagcgtccgcatgtttgaatggggacatagtcaacagataacttgctttagaagtggtggtaactcaagagtaacacggatgcgctttaattatcagggaaacaaattcggcatcgtggatgcagacggttatttgtcactctatcaaacaaattggaaatgctgtccagtgacaggctctatgccgaagccatatttaacctggcagtgtcacaacaagacagccaatgatttcgtgtttgtgagttcctcctccctgattgcaacagctggactttccacagataaccgcaacgtctgtctttgggacacattggtcgctcctgcgaatagcctggtccatgcctttacctgtcacgactcaggtgcaaccgtcctggcttatgcacctaagcaccagctgctgatatccggaggcaggaaagggttcacctatgttttcgacctatgccagcggcagcagcgacagctcttccagagtcatgattctccagttaaagccgtcgcggtagatcctaccgaggagtacttcgtaacaggctcagccgaaggtaacattaaaatctggtctctttccacttttggcctcctgcacacatttgtcagcgaacacgctcgtcagagcatctttaggaacatcggcacaggcgttatgcaaatcgaaactggacctgctaatcatatcttctcgtgtggtgcagacggaaccatgaagatgaggatcctgcccgaccagtttagtcccctgaatgaggttctgaaaaacgatgttaagtttatgctgta

SEQ ID NO: 221038 - DNA, 9111 bp, synthetic construct
  misc_feature 1..9111: note = Description of Artificial Sequence: Synthetic coding sequence
  source 1..9111: mol_type = other DNA
atgcatctccatcaggtcctgacaggtgccgtaaacccaggggataactgctactctgttggatccgtgggcgatgtccctttcacagcctatggatccgggtgcgatatagtcattctcgcgaacgattttgagtgtgtacagattattcctggcgctaaacatgggaacatccaagtttcatgcgtggaatgtagcaaccagcagggacgcattgccgctagttatggcaatgccgtgtgcatcttcgagcccctgggcattaatagccataagcgcaattgccagctgaaatgtcagtggctgaagacaggacagttttttctcagttcagtgacctacaatttggcctgggacccgcaagataacaggttactgaccgccactgactcaatccagctttgggcacctcctggggatgacatccttgaggaggaagaggaaatcgataacaccgtcccacccgtgcttaatgactggaagtgtgtttggcaatgcaaaacctccgtgtctgtccatcttatggaatggagcccagacggggaatactttgcaacagccggtaaggatgattgcctacttaaggtgtggtaccccatgaccggctggaaaagtagcattatcccccaagaccaccacgaggtaaagaggcgacagtcctcgacccaattctccttcgtgtatctcgctcaccccagggcagtgactgggttttcatggaggaaaacctctaagtatatgcctagggggtctgtttgtaacgtattactgacaagctgccatgacggagtttgcaggctttgggccgagactctcttgcccgaagattgcctcttgggtgagcagatctgcgaaactactaccagttctattgcatcctccctcagccatgctgggaggcacaaagaccggatacagcacgcgctcgagacaattcaccacctgaagaacctgcggaagggtcaaaggaggagctcggtattggtaacgcacgccgagctcatgcccgaccagacggcaatgcatgaggtacagaggcacatatcacatcatgcaaacgcactctgccatttccacatcgctgccagtatcaatcctgccactgatataccgaatgttttggttggcaccgcatttaacgtggacgatgggaacgggggtttcgtggtgcactggttgaataacaaggagttccactttaccagctcgaccgaagtctttatgcatcagttaaggaagctctccgacaaacaggttgatcatgaaaatgacgacgcggatagggaagacgaggaacatagccaggaggacagagaaagggggctgcacatgaagctcgaccacgatctatctctggatcgtgaatcggaagccggtacaggctccagcgaacacgaagatggagagcgtgagggtagccctcgcacttactctcgtctgagcgtaccaatgccgctgcccaccgtcttgttggatcgaaaaattgagaccctgctgacagaatggaataaaaacccagatatgctcttcactatccaccctgtcgacggcacattcctggtgtggcacgtcaagtatctggacgaatacaaccctgggatttttcgccaagtacaggtgagtttctccagcagaatacctgtagcattcccatctggcgatgcctccagtcttagcaaaaacattatgatgtacgcatgcatcaatgcgaccaaagattcacaccatacacttctgcatcaggagggcatgagcgtgggaagcccacacggttcccagccccattcaaggtcccactcaacacacatgaatatccttgcaccaacggtgatgatgatatctaaacacatcgacggaagcctgaaccagtgggctgtcaccttcgctgacaagtcagcatttactacggtactcacagttagccacaagttcaggtactgcggtcataggttccatctcaatgatttggcctgccactcggtgctcccattgctgctgacaagcagccatcacaatgccctattaacgccagagctggattgccagtgggattcagataataagcttagccggctgatggaccctgttaagcacatcaaaggatcttccaaacagccgctacgcaacgctgcaacccgtacttttcatgaccctaacgcaatttatagtgaacttatcctgtggcgtgtggatcccataggacctctgagctacactggcggagtttccgaacttgcccgtatcaactctctgcatacgagtgccttctcgaacgttgcttggctgccaaccctgatcccaagctactgcctgggcacctactgcaattctgcatccgcctgttttgtggcaagcgacggaaagaatctccggctgtaccaggcagtggtggatgcacgcaagctgctggatgagttatcagatcccgaatccagcaaattgatcggagaggtgttcaatattgtgtcccagcagtctaccgctagacccggatgtattatcgaactcgatgccattactaaccagtgcgggtctaacactcagctgctgcacgtgtttcaggaggatttcattataggatacaagccccataaagaagacatggagaagaaggagaccgagatctttttccagccatctcagggttataggccgccacctttcagtgagaaattcttcttagttgtcatcgagaaagacagtaataacaatagcatactacatatgtggcacttgcatctaaagtctgtgcaggcatgcttagctaaggccagtgagggagcttcttccgaaagcctgttgtccgtccctggacagaagaacgttgactcaagtcccgaaacctccccttccgtttctccaatgccacactcatctagcatcgctaatctacaaaccgcatctaaactgattttgtcctccaggcttgtatattcccagcctcttgacctgcctgagtccgttgaagtaatacgggctactcccagtgcgggacatctgagtagtagtagtatatacccggtctgtttagcgccttatcttgtggtgacgacttgtagcgacaacaaggtaaggttctggaaatgttgcatggaagcgaatcctgaatgtaataagagtgacgagaaagagatctatcattggaagagatggccgctgatgaatgatgagggagaggacaatagcagcactgtaagcatcgtcgggagacctgtggcagtctcatgttcctacacgggtaggttagcagtggcatacaagcaaccaatccaccataatggcttcgtgtccaaagagttttcaatgcacgtgtgcatctttgagtgcgagtccacggggggaagcgagtgggttttggaacaaaccatccacctcgacgacctggtgaaggtgggatctgtgttagattcacgtgtgtcagtagactctaatctgtttgtttattccaaaagtgacgccttattgtcaaaagacagatatcttatccccaatattaagcacctcgtgcaccttgactgggtgagtaaggaagacggctctcacatcttgaccgtgggcgtcggcgcaaatatctttatgtatggccgtttgagtgggattgtgacagaacagacaaactctaaagacggtgtggccgtgattacactgcctttggggggatctatcaaacagggagtcaagtctcgctgggttctgctacgcagcatagacctcgtcagtagcgtggatggaactcccagcctgcctgtaagtctttcatgggtgcgggacggtatactcgtcgtggggatggactgtgagatgcatgtgtacgcacagtggaagcatgccgttaaattcggggatactgaggcggacagcagcaacgcagaagaagccgctatgcaggaccattcaacttttaagtcaaacatgctggccaggaagagtgtcgttgagggcacagccatctccgatgatgtgttttgtagccctacagttatccaggacgggggactctttgaggccgcacatgtgctgtctccaacgctgccacagtatcatcccacccaactcctggagctgatggatctgggcaaagttaggcgggcaaaggctattctgtctcacctcgtcaagtgtatagccggagaagtggccatagtgcgagaccctgatgccggtgagggcaccaagcgtcatctctcccggacaattagcgtttcagggtctactgccaaagaaaccgtgacagtggggaaggacggtacgcgcgactacaccgagattgattccatcccacccttgcctttatacgcgctgctggccgctgatcaggacacctcctatcggattagcgaagaatcaaccaagatcccccaatcatacgaagaccaaacagtctcacagccggaggaccagtacagtgaactctttcagatccaggatatccctacggatgacatcgaccttgaacccgagaaaagagaaaataagtcgaaggtaatcaacctcagtcagtacggcccagcatactttggccaagagcatgcaagagttctctcaagccatctgatgcatagctcattgcctggtctgacccggctggaacagatgttcctggtcgccctcgccgacactgtggctacaacaagtacagaactggacgagtcacgggacaaaagctgctccggccgagacacccttgacgagtgtgggttgcggtatcttctcgcgatgagactgcacacctgcctcctcacgtccctgcccccactgtatcgagtgcagctacttcatcagggtgtatccacctgccacttcgcgtgggcctttcacagtgaggcggaagaggaactgattaatatgatccccgcaatccagagaggagacccacagtggagcgaactccgggcaatgggaattggctggtgggtgaggaatatcaacactctgcggcgatgtatagagaaggttgcaaaagcaagtttccagagaaacaacgatgcgctggacgctgctcttttttatttgtccatgaaaaaaaaggctgtggtgtggggcctgttccggagtcagcacgatgaaaagatgacgaccttttttagccacaattttaacgaagaccgctggcggaaggccgcactgaagaacgcttttagtctcctgggcaagcagagatttgagcagagtgcggcattctttctgcttgcagggagcttgaaggacgccattgaagtgtgcctcgaaaagatggaggacattcaactagcaatggtcatagccaggctttacgaatcagagtttgaaacgtcctccacctatattagcatcctgaaccagaagattctgggttgccagaaggacggttcaggatttagctgtaagaggttgcacccagaccctttcctccgcagccttgcctactgggtgatgaaggattacacacgggctctggatacgctattagagcagacccctaaggaagatgacgagcatcaagtgatcatcaagtcatgtaatcccgttgcgttctcattttataattatctgaggacccatcctctattaattcgacgtaatctggctagccctgaagggaccctggcgaccttaggccttaagacggaaaagaatttcgtggacaagattaatctgatcgagaggaaactgttctttaccacagccaacgcccatttcaaggtgggttgtccagttttagcactggaggtcctgtccaagatacccaaggtgaccaaaacctcggccttatctgccaagaaggaccaaccggattttattagccatcggatggatgacgtgccttcccactccaaggccctgtccgatgggaatggatccagcggtattgagtggtcgaacgttacatcctctcagtatgattggtcgcaaccgatcgttaaagtggacgaggagccactcaacctggattggggtgaggatcatgacagcgcccttgacgaggaggaagatgacgccgtgggcttggttatgaaatcaaccgacgccagggagaaagacaagcagtccgatcagaaagcctccgatcctaacatgctcctgacgcctcaggaagaagacgatccagagggagatactgaggtggacgtgatagcagaacagttaaaatttcgcgcttgcttgaaaatattgatgacggaactaaggacactggccactggatacgaagtcgatggaggaaaactccgcttccagctgtacaactggctggagaaggagatcgcagccctgcatgagatctgcaatcatgagtctgtgatcaaagagtactccagcaaaacttactccaaggtggaatcagatttgttagatcaggaagagatggtggacaagcccgatattggttcctacgaacgtcatcagatcgaaagaagaaggctgcaagctaagcgggaacatgccgagcgtaggaagtcatggctgcagaagaatcaagatctgttgcgtgtttttctaagttactgttccctgcacggcgcacagggaggcggtctggcctccgttagaatggagctgaaatttctcctccaggaaagtcaacaagagacgacagtgaaacagctgcagagccccctccctctgccaactaccttgcccctcctgtcagcaagcatcgcttccacaaagacagtgatagccaaccctgtgctctacctcaataatcacattcacgacatcctgtacacgatagtgcagatgaaaacgccaccgcatccttctattgaggacgttaaggtgcacactctccactctctggcagccagtctgtccgcctctatctaccaggccctttgtgactctcattcatattctcagaccgagggaaatcagttcaccggcatggcctatcaggggctcctgctgtctgatcggagacggctgaggaccgaatctattgaggaacacgcaacacctaatagcagccctgcccaatggcccggtgtgagttccctaatcaatctgctgagctcagcacaagacgaagatcagccaaagctcaatatcctgctgtgcgaggcagtggtcgccgtgtatctgtcactgcttattcacgccttggcaacaaattcttcttcggaacttttcaggcttgcggctcacccactcaacaatagaatgtgggccgctgtcttcgggggtggcgtgaagctcgtcgttaaaccaaggagacaaagtgagaatatctctgcacctccggtgctttcagaggacattgacaagcaccggaggagattcaatatgcggatgctggttccaggtaggcccgtcaaagacgccactccaccaccagtacccgctgagaggccttcctacaaggagaaatttattccaccagagctcagtatgtgggactactttgtggctaaaccctttctgcccttgagtgactcaggcgtgatctatgatagcgacgagtcaatccactccgatgaggaggacgacgctttcttctctgatacccaaattcaggagcatcaggaccccaattcatatagctgggcacttctccacctgactatggtgaaactcgcgctccacaatgtaaagaattttttcccaatagccggactagagttctctgagctccctgttacctccccactgggtatcgccgtaatcaaaaatctagagaactgggaacagattctccaagagaaaatggatcagtttgagggccctccaccaaactacatcaacacatacccaactgatctgtcggtcggcgctggccctgcgatcctccgcaataaggctatgctggaacctgagaacaccccatttaagagtcgggattccagcgcttttccagtgaagcggctatggcatttcctcgtcaagcaagaagtgcttcaagagacattcattagatatatatttactaagaaacgcaagcagtcagaagtggaggctgatctcggctacccgggtgggaaggctaaggtcattcacaaggagtccgatatgattatggcgtttagtgttaataaagccaactgtaatgagatcgtcctcgccagcactcacgatgttcaagagctagacgtgacgagcttgctggcgtgccagagttacatttggattggcgaagagtacgatcgcgaaagtaagtcttccgacgacgtggattaccgaggaagtactacgacgctttatcaacctagtgccaccagttactcagcctcccaggtccatcctccttctagtcttccctggcttggcacagggcagactagcaccggagcgtcagttctgatgaaacgtaacctacataacgtgaaacggatgacttcacatcctgttcaccaatactatctgaccggagcacaggacgggtcagttcgcatgtttgaatggacccggcctcagcagctggtctgttttaggcaggcaggtaatgctcgagttacacgactatatttcaactctcagggaaataagtgcggcgtagctgatggtgagggctttctcagcatttggcaggtgaatcagacagcttcaaacccaaaaccttatatgagctggcaatgtcactcaaaagccacctccgatttcgccttcatcacaagttcttccttggtggctacttccgggcatagcaatgacaaccgcaacgtctgtctgtgggatacacttatctcaccaggaaattccctcattcacggtttcacttgccatgaccacggtgctacagttctgcagtacgccccaaaacagcagctcctcatctccggaggcagaaaggggcacgtctgtattttcgacattcgtcagcgtcagctcatccataccttccaggcacacgactctgcaatcaaggctctggccctggacccatacgaggaatatttcaccaccggttcagcggaggggaacatcaaagtgtggaggctgacaggacacgggcttatccactcattcaaaagcgaacatgcgaaacaatccatctttagaaacataggagcaggcgtcatgcagatcgatatcattcaggggaacaggttattcagttgtggcgcagacggtaccctgaaaacccgggtcctgcctaacgcctttaacattccaaatcgcatccttgacatcctgtac

SEQ ID NO: 221039 - DNA, 1809 bp, synthetic construct
  misc_feature 1..1809: note = Description of Artificial Sequence: Synthetic coding sequence
  source 1..1809: mol_type = other DNA
atgtgggattacttcgtcgccaaaccgtttctacccctctccgattccggcgtgatctacgacagcgacgaatctattcactcggatgaggaagatgatgcattcttcagcgacacccagatccaggaacaccaggaccccaattcatattcctgggctctgctacacctgacgatggtgaagctggccctgcataatgtcaagaatttctttcccattgcagggcttgagtttagcgagcttcccgtaacctccccactcggcatagctgtcataaagaacctcgagaactgggaacaaatcctgcaggaaaaaatggaccagtttgaagggccaccacccaattacattaatacgtatcccaccgacctgtcagtcggggctggtccggctatcttaaggaataaggccatgctggagcccgaaaatactccctttaaatctcgtgactcttccgcctttcccgtgaaacgactttggcacttcctcgtgaagcaggaagtcctccaggaaacattcatccggtacatcttcactaaaaagagaaagcagtccgaatcgatcgaggagcatgtggagcaggtcaatcagaattgtatcgcagaggactgccatattaaagtggaggccgacctcggctaccccggaggaaaggccaaagtcatacacaaggagagtgatatgattatggctttctccgtgaacaaagctaactgcaatgagatcgtgctagcaagcacacacgacgtacaagaactggacgtgaccagcctgctggcgtgccaatcctatatctggatcggtgaagaatacgaccgggagtccaaatcaagtgacgacgtagattaccggggatccacaaccacactctatcagccctcggctacatcgtatagtgccagtcaggttcaccctccatccagcctgccctggctgggcactggtcagacttccactggtgcaagcgttttaatgaaacggaatctgcacaacgtgaaacggatgacctcacaccctgtgcatcagtactatctgacgggagcacaggatggctccgtccggatgtttgaatggacccgaccccaacagctcgtctgctttcggcaggcagggaacgcacgagttacaagactctactttaactcgcagggtaacaagtgtggcgtggccgacggggagggatttctgtccatttggcaggtcaatcagacagcaagcaacccaaaaccctacatgtcatggcaatgccattccaaggccaccagtgacttcgcatttattacctcctcatctctggtcgcaacctccggacatagcaacgataatcgcaatgtgtgcctgtgggataccctgatttcccctgggaattctctcatacacgggttcacatgtcatgatcacggcgcaaccgttcttcaatacgctccaaaacagcagcttttgataagcgggggtcgtaaggggcatgtctgcatcttcgacataagacagcgacagctgatccacacattccaggcccatgatagtgcaatcaaggccctcgctctggacccatacgaagagtacttcaccacaggctcagcggagggtaatatcaaagtctggcgactaaccggccatgggctgattcactcattcaaatccgagcacgccaagcagtccatcttcagaaatattggagcaggagtgatgcagatcgacatcatccagggaaacagactgttcagttgcggcgctgatggtacgttgaaaacccgggtgctgcctaacgcctttaatatcccgaaccggattctggacattctgtag

SEQ ID NO: 221040 - DNA, 7202 bp, synthetic construct
  misc_feature 1..7202: note = Description of Artificial Sequence: Synthetic coding sequence
  source 1..7202: mol_type = other DNA
atgcatttgcaccaggtgctcaccggagcagtgaaccccggtgacaactgttacagtgtgggatctgtgggggatgtgcccttcactgcatacgggtcagggtgtgatattgttatcttagcaaacgacttcgaatgcgtacaaatcattcccggagctaagcacggaaatatccaggtgagttgcgtggaatgcagtaaccagcaaggtcgaattgccgcttcctacggcaacgccgtctgcatttttgagcccctgggcataaattcgcataagcggaattgccagctgaaatgtcaatggctaaagactgggcagttcttcttgtctagcgtgacatacaatctcgcctgggacccacaggataacaggctgctaaccgcgaccgactcaattcagctctgggcccctcccggagacgacatcctggaggaggaggaggagatagataataccgtccctcccgtgctgaacgattggaaatgcgtttggcagtgcaagaccagcgtgtctgtccatttgatggaatggagccccgatggcgagtactttgctacagcagggaaggatgattgtttattgaaggtgtggtaccccatgacaggttggaagtcctcaattatcccccaggatcatcacgaggtgaaaagacggcagtcctcaacgcagtttagctttgtgtacctggctcaccctcgagcagtgaccggcttctcctggagaaagacatcgaagtacatgcctagaggttctgtttgcaatgtgctgcttacgagctgtcatgatggagtctgccgcctttgggccgaaaccctgctccctgaggactgtctgttgggagagcagatttgcgaaacaaccacctcatctatcgccagtagtctgagtcacgccggtcggcacaaggaccggatacagcacgccttggaaaccatccaccacctgaagaatctccgcaagggacagagaaggtctagcgtgctcgtgacgcacgctgaactgatgcctgatcagaccgccatgcatgaagtccaacgacatataagccatcatgctaatgctctgtgccacttccacattgcagcatcaattaaccccgcaacggatattcccaacgttctggtagggaccgcatttaatgtcgacgatggcaacggaggctttgtggtgcactggttgaacaacaaggaattccatttcacctcatctacagaagtatttatgcaccagcttcgaaagctttccgataaacaggttgatcatgagaatgatgacgcggacagagaggatgaggagcatagccaagaagacagggagcgcggactccacatgaaactcgatcacgaccttagcctggacagggagagtgaggctggaacgggcagttcagagcatgaagatggagaacgtgaagggtccccacgtacttactctcgcctctccgtacctatgcctctcccaaccgtgcttctagatcgaaagatcgagaccctgctcaccgagtggaacaaaaatccggacatgctgtttacaatccatcctgttgacggcacttttcttgtttggcatgtcaaatatctggatgaatataatcctggaatttttagacaggttcaggtgtctttttccagtaggatcccagtggcatttccgagtggtgacgcatctagcctgtcaaaaaacatcatgatgtatgcctgcatcaacgctaccaaggactctcaccatactttactccaccaggagggcatgtctgtcggtagccctcatggaagtcagccccacagcagatcccactctactcacatgaacattttggcgcctaccgttatgatgatatccaagcacatcgatggcagcttgaatcaatgggccgtaaccttcgctgacaagtctgccttcacaaccgtgttgactgtgtcacacaagtttcggtactgcggccaccggttccacctcaatgatttggcttgtcacagcgttctgccacttttgcttacctcttcgcaccataacgcgttgttgacaccagagctggactgtcaatgggacagtgacaacaaactttctcgcctaatggacccagtgaaacacataaaaggctccagtaagcagcctctgcgaaatgctgccactcgaacattccatgatcccaatgcgatatactcggagctgattctatggcgggtggacccgatcggccctttatcatatactggaggagtgtcagaactcgcgagaatcaattctctacacactagcgctttctcaaatgtggcgtggctcccaactttaatcccaagctactgtctgggaacatattgtaactccgcctctgcttgcttcgtcgcttccgacggcaagaacctgcggctgtatcaggcagttgtggatgctcgaaaattgcttgacgaactgtctgaccccgagagctcaaagctaatcggggaggtgtttaacatcgtgtctcagcagtctacagccaggccaggctgtatcatcgaactcgacgctatcaccaatcaatgtgggtcaaatacccagctgctccatgtgttccaagaagacttcataatcggctacaagccccacaaggaggacatggaaaaaaaagagaccgagattttctttcaaccctcgcagggatacagaccccctcctttttctgagaagttttttctggttgtgattgagaaggatagtaacaacaattcgattctgcacatgtggcatctgcatctgaagtctgtccaggcttgtctggggagagacaccctcgatgaatgcggactcaggtacctcttagcaatgaggctgcacacatgtctcttaacatccttgccgcctctgtatagggtgcagctgttgcatcaaggcgtgtcaacttgccatttcgcttgggcgttccattcggaggctgaggaagaactcatcaacatgatacctgctattcaacggggagacccccagtggtccgagttgcgggcaatgggaattgggtggtgggtacgtaacattaacactcttagacgctgtattgagaaagtcgccaaggcctccttccaacggaataacgacgccctagatgctgcgctgttttatctaagcatgaaaaaaaaggccgtggtgtggggtttgttccggtcgcaacacgatgagaagatgacgacattcttttcccacaacttcaatgaggatagatggagaaaagcagccctcaagaatgcattctctctgctgggaaaacagcgttttgaacaaagcgccgctttttttctccttgctggctccctgaaggacgctatcgaggtgtgcctggagaaaatggaggacattcagctagcaatggtgattgcgagactgtacgaaagcgagtttgagactagctccacgtacattagcattctcaaccaaaagattctgggatgccagaaggacggatccgggttttcctgcaaacgccttcaccctgatccctttctgagaagcctggcctactgggtgatgaaggactatactcgggctctggatacactcctggaacagacccccaaagaggacgacgagcaccaggtgataatcaaatcctgcaaccctgtcgccttctcattctataactatttgcgcacacaccctctgttgattcgaagaaatctggcgtcgcctgagggcaccttggcgactctcggtttgaagaccgagaaaaattttgttgacaaaatcaacctcatcgagagaaaattgttctttacaaccgctaacgctcacttcaaagtggggtgtcccgtgctggccctggaggtgctttctaaaatcccaaaggtcactaagacctctgctctgagtgccaaaaaggaccaacctgactttatttcccaccgtatggacgatgtcccgagccactcaaaagctctgtctgatggcaatggatcatcaggcattgaatggagcaacgtcactagctctcaatacgactggtcccagcccattgttaaggttgatgaggagccattgaacttggactggggcgaggatcacgattctgcattggacgaggaggaagacgacgccgtggggctagtaatgaagagcacggatgcgagggagaaggataaacaatccgaccagaaggcatctgatcccaacatgctgctgaccccacaggaggaggatgacccagagggggacacggaggtcgatgtgatagctgagcagctcaagttccgggcatgtctgaagatcctgatgaccgagctgagaacgctcgctacaggctacgaggttgacgggggtaagctccgctttcagttatacaactggctggagaaagagatcgccgcacttcacgagatctgtaaccatgagagtgtaattaaggaatattccagtaaaacttactctaaggtagaatctgacttgctggatcaggaagaaatggttgataaacctgatattggcagctatgaaagacatcagatcgaacgccgtcgactacaagcaaaacgagagcatgctgaaaggcgaaaaagttggctgcagaagaaccaggatctgcttcgcgtgttcttgtcttattgtagccttcatggggctcaaggtggcggtttagcttcggtcagaatggaactcaaattcttgctgcaggaaagccaacaagagaccacggtgaagcagcttcaatctcctcttcccctcccaaccacacttcctcttctgtctgcttcaattgcttcaacaaagacagtgattgcaaatccagtgctatacctgaataatcacatccacgacatcctctacacaattgttcaaatgaagacaccaccacacccatcaatagaggatgtcaaagtgcatacactccactcacttgccgcaagcctgagtgcatctatttaccaggctctctgtgatagtcactcctactcccaaacagagggaaaccagttcaccggcatggcttaccagggccttcttctgagcgatcggaggcgcctacgcacagaaagcatcgaggaacacgccactcctaattcaagccccgctcaatggcctggagtgtcttcattaatcaacttgctttcgagtgcgcaagatgaggatcagcccaagcttaacatcctgctgtgtgaggctgttgtggctgtgtatctgagtcttctaatccatgcccttgctacgaactcctcctctgaattatttagacttgccgcacatccactgaacaaccgtatgtgggccgctgtgtttggcggtggcgtgaaattagtggtgaagccacggcgtcagagtgaaaacatctcagccccaccggttctatccgaagatatcgacaaacaccgacggcgattcaatatgagaatgttggtcccgggacgcccagtaaaggatgctaccccccctcctgttccagccgaacgtccatcctataaggagaagtttatacctcctgagttgagcatgtgggattattttgtggccaaacccttcttgcccttgtcggactctggcgtgatatatgattctgacgaaagcatccacagcgatgaggaggacgacgcctttttctcagacacccaaatccaggagcaccaagatcccaattcgtacagttgggctcttctgcacttgactatggtcaagttggcccttcacaacgtaaagaacttcttcccaattgcaggcctggagttctctgaactacctgttacgagcccactggggatagcggtcataaagaacctcgaaaactgggagcagatcctgcaagagaagatggatcagtttgaaggccctccaccaaattacattaatacctatcctactgatctatccgtgggcgctggccctgccattctgaggaacaaagctatgctggagcctgagaatacaccatttaagtccagggactcttccgcctttcctgtgaaaagactgtggcactttctcgtgaaacaagaggtgttgcaggagaccttcatccgctatatctttactaaaaaacgcaagcagtccgaggtcgaggctgatctgggctacccaggtgggaaagccaaggtgattcacaaggagagtgacatgatcatggcattttccgttaataaagctaactgtaacgaaattgttctcgcctccacacacgacgtacaggagctagacgtgacctctctgcttgcatgtcaatcctacatttggatcggagaggagtacgatcgcgaatctaagtctagcgatgatgtcgactatcggggttccaccacaaccctctatcagccctcagcaacaagctacagtgcatctcaggttcacccaccgagctcccttccttggctcggtacgggacagacttctactggggcatccgtgctgatgaaaagaaatctccataatgtcaaaaggatgacttctcaccccgttcatcagtactatctgactggtgctcaagacggctcagtgcgaatgttcgagtggactcgtccccaacagctggtttgttttcgccaggcaggaaacgccagagtgacccgcctgtactttaatagtcagggaaacaaatgtggggtggcagatggcgaaggctttttatccatctggcaggttaaccagaccgctagtaaccctaagccatacatgtcatggcagtgtcatagcaaggcaaccagcgatttcgcctttatcacttccagctccctggtggctacatccgggcacagtaacgataaccgaaatgtgtgtttgtgggacacccttatttcccccggaaattctttaatacacggctttacctgtcacgaccatggggctacggtcctgcagtacgccccaaagcagcagctactgatctccgggggacgaaaagggcacgtttgtatattcgatatccgtcaacggcagttaatccacactttccaggctcatgattctgccattaaggccctagcgttggacccttacgaggaatacttcaccaccggttccgcagaggggaatattaaggtgtggcgcctaaccggccacggtctaattcatagtttcaagtctgagcatgcgaaacaatctatttttaggaatattggtgccggagtgatgcagatcgatattatccaaggcaatcgcctgttctcatgtggtgcagatggcaccctgaagacccgcgttctgcctaatgcattcaacatacccaacaggattctcgacatcctgta

SEQ ID NO: 221041 - DNA, 9113 bp, synthetic construct
  misc_feature 1..9113: note = Description of Artificial Sequence: Synthetic coding sequence
  source 1..9113: mol_type = other DNA
atgcacctgcaccaagttcttaccggcgctgtcaacccaggggataattgttatagcgttggttccgtgggggacgtgcccttcacggcctacggcagcgggtgtgacatagtgatactggccaacgattttgagtgcgtgcagataatccccggtgcaaaacacggaaatatccaggtctcctgcgtggagtgtagcaatcagcaggggaggattgctgcttcctatggcaatgctgtgtgtattttcgagccactaggcatcaacagtcacaagcgtaattgccagcttaagtgtcagtggctcaaaaccggccagttctttttgtcgagcgtaacctataacctggcctgggatccacaggacaacagactcctgactgccaccgacagcatccaactctgggccccacccggagacgatatcctggaagaggaagaggagatcgacaataccgtgcccccagttctaaatgattggaagtgtgtgtggcagtgcaaaacctcagtgtctgtacatctgatggaatggtctcctgatggcgaatatttcgccacagccggaaaggacgattgcctgcttaaggtgtggtacccaatgacagggtggaaaagctctataattccccaggaccatcatgaggtgaagcgcagacagagttccacgcagttttctttcgtttacctggctcaccctagagcagttaccgggttttcatggagaaaaacgtccaagtatatgccgcgtggatctgtctgtaacgtgctgctgacgtcttgtcacgacggagtttgcagactgtgggccgagaccctgctaccagaggattgtctcctcggcgaacagatatgcgaaacgaccacatcatctatcgcctcctctttgtctcatgcgggaaggcacaaggaccgcattcaacacgctttagagacaattcaccatctgaagaatcttcgcaaggggcagcgcagatcctctgtgctggtgactcacgctgaactgatgcctgatcagactgccatgcatgaggtgcagagacacatatctcaccacgccaatgctctttgccactttcatattgccgcatcaattaaccctgccacagatattccgaatgtgttggtcggtacagctttcaacgtcgatgacggcaacggaggcttcgtcgtacattggctgaataataaagaatttcacttcacctcctctaccgaggttttcatgcaccagctgagaaagctatctgacaaacaggtggaccatgaaaatgatgacgcagaccgcgaggatgaagagcattctcaggaagacagagagcgcggactccatatgaagctggaccatgacttgagcctggaccgggagtcagaagcaggcaccggctcctcagaacatgaggatggcgagcgtgagggctcaccgagaacctactcccgcctgagtgtgcctatgcctctccctaccgtactgctcgacaggaaaatagagaccctgcttacagagtggaacaagaatcctgacatgttgttcacaattcacccggtggatggcacttttctagtgtggcacgtaaagtatcttgatgaatacaaccctggaattttcaggcaagttcaagtgtccttctcctcacgaatacctgtcgcattccctagtggtgatgcgtctagcctctcgaaaaacatcatgatgtacgcatgtattaatgcgacgaaggactctcatcacactttgctccatcaggagggcatgagcgtcggtagcccccacgggtcccaacctcattcaaggtcccactcgactcatatgaatattttagcccctactgttatgatgatttctaagcatatagatggatccttgaatcagtgggctgttacctttgctgacaagtctgcttttacaacagtgttgacagtttcccacaagtttcgttactgcggccacaggttccacttgaacgatcttgcttgtcactccgtgctgccactgctcctgacctccagccaccacaacgccttgttgacccccgagttggactgccaatgggacagtgacaataagctctctcggctgatggacccagtcaagcacattaagggtagttccaaacagcccctgagaaatgcagcgaccaggacattccatgaccccaatgccatttactctgaactgattttgtggagggtagatccgatcggcccactgagctacaccggaggagtctccgagctcgctagaattaactcactgcacaccagtgccttcagcaacgtggcttggcttcctacactgatacctagctactgcctgggaacctattgcaactcagctagtgcatgtttcgtggccagcgacggcaagaacctgcgcctttatcaggcagtggtcgacgccagaaagctcctggacgagctcagtgacccggagtcatctaaattaattggggaggtgtttaacatcgttagccagcagtccacagcgagacccggatgcatcatcgagctggacgctatcacaaatcagtgcgggtccaacactcagttgctccacgtattccaagaggactttataattggctataaaccccataaagaggacatggagaaaaaagagaccgagatctttttccagccctcgcagggctaccgaccaccgcctttctccgaaaagttcttcttggtcgtcatcgagaaggactctaacaacaacagcatactgcacatgtggcaccttcatttaaaatctgtccaggcctgtctggctaaggctagcgaaggcgcttcatcagagagcctgctgtccgtcccgggacagaagaatgtagactcatctccggagacaagcccatctgtgagccctatgccacactcaagtagtatcgcaaatttgcagactgccagcaagttgattttatcctcccggctggtgtactctcaacctctcgacctacctgagagcgttgaggttatcagagcaaccccttccgctggccatttgtcgtcaagtagcatctaccctgtgtgcctcgctccataccttgtggtgacaacttgctcggacaacaaagtgcgattttggaagtgttgcatggaggccaatcctgaatgcaataagtctgacgaaaaagaaatctatcactggaaacgctggcctctcatgaacgacgaaggtgaggacaactcttccaccgtgtcaattgttggtcgcccagttgctgtgtcctgttcatacactggccgtttagctgtggcttacaagcagcctattcaccacaatggttttgtttccaaagagttttccatgcatgtttgcatttttgagtgtgagtccaccggcggtagtgagtgggttttggagcagaccatccacctagacgatcttgtgaaggtcggctctgtgctcgatagcagagtttctgtggactcaaatcttttcgtttatagcaaaagcgacgcactgctgtccaaagatcgctatctgattccgaacataaaacatcttgtgcaccttgattgggtgagcaaggaggatggatctcacatccttactgtgggcgtgggagccaatatcttcatgtatggcaggctctccgggatagtgaccgaacagacaaacagcaaagacggagtcgccgtgattactctgcctctggggggaagtattaagcaaggcgtgaaaagccgctgggtcctgctgcgtagtattgatctagtcagttctgtggacggcacacctagtctgcccgtttcgctctcttgggtccgcgatggtattttggtggtggggatggattgcgagatgcatgtgtacgctcagtggaagcatgccgtcaagttcggagacaccgaagccgatagcagcaacgctgaggaagccgctatgcaagaccactcgaccttcaaaagtaacatgctggcaaggaaaagcgtcgtggaaggtaccgccatctctgatgatgtcttttgcagtcctaccgtcatccaggacggcggactgttcgaggcagcccacgtgctgagcccaacgctgccccaataccaccctacccagctgcttgagctgatggatctgggtaaagtaaggcgagctaaggcaatccttagccatctagtgaagtgcatcgcgggtgaagtggcgattgtgagggaccctgacgcgggagaggggaccaaacgccaccttagcaggaccattagcgtatcaggctccacagcgaaggagaccgtgactgtgggtaaagatggtacgcgcgactacacagaaattgactccatccctccccttccactgtacgcgctgttagccgcagaccaggacacctcataccgcatcagcgaggagtccacaaaaatcccacagagttacgaggatcagaccgtttcgcagcctgaggaccagtactcggagctcttccaaattcaggacatccccaccgatgatattgatctcgaaccagagaagcgggagaacaagtcgaaagtgatcaacctgtcgcaatatggaccggcatatttcggacaggagcatgctagggtgcttagttcccatctcatgcattcctccttgccaggcctcacacgtctcgagcagatgtttctcgtggccctggctgacaccgtagcaactacatccaccgaactggacgagtctagggacaaaagttgcagcggaagggatactcttgacgaatgcgggttgagataccttttagcaatgcggctccacacctgcttgctgacctccctccccccactctacagggttcagctgcttcaccaaggggttagcacatgtcactttgcttgggcatttcactccgaggcggaggaagagctgatcaatatgattccggctatccagcggggagatccccagtggtcagagttacgggcaatgggcataggctggtgggtgagaaatatcaatacacttagacggtgcattgaaaaagtcgccaaggctagttttcaacggaacaatgacgccctcgacgctgccttgttctatctaagtatgaaaaaaaaagccgtcgtatggggactcttccgatcccagcatgatgaaaagatgacaaccttcttttctcacaactttaacgaggacaggtggcgcaaggctgccctgaagaatgccttctcgcttctggggaaacagcgcttcgaacagtccgccgcattttttctcctggcgggttcactcaaggacgccatcgaggtgtgcctcgaaaaaatggaggatatccaactggcaatggtgatcgcccgactgtatgaaagtgagtttgagacaagttcaacctatatctcaatactgaatcaaaaaatcttaggatgtcaaaaggatggcagcgggttcagctgtaagagactccatccagatcccttcctgcggtccctggcatattgggtcatgaaggactacactcgtgctctggataccttgctggaacagacaccaaaggaagacgacgaacaccaggtgatcattaaatcgtgcaacccagtggcctttagcttctataattacctccgtactcaccctctgctaatccgcagaaatctggccagcccagaagggacattagccaccctcggcctcaaaacagagaaaaattttgttgacaagataaatctgattgagcgtaagctgttcttcaccacagccaatgcacacttcaaagttgggtgtcctgtcctggcactagaggtccttagtaagatccctaaggtcacgaagacctccgctctgagcgcaaagaaggaccaacccgacttcattagccacagaatggacgatgtgccctcgcacagcaaggcactcagcgatggcaacgggagttctggaattgagtggtccaatgtcacttcatcccagtatgattggagccagccaatcgtgaaagtggacgaggagcctctgaacctggattggggcgaagaccacgattccgctttagacgaagaagaggatgatgcggtcgggctggtcatgaagagtacggatgctcgtgagaaggacaagcagagtgatcagaaggccagcgatcccaacatgcttctgacaccccaggaagaagacgatcctgagggcgatactgaggtagacgtgatcgctgaacaattaaaatttcgggcttgcctgaaaatacttatgacagagctgcgaaccctggccaccgggtacgaagtggatggcggaaaactgagattccaactctacaattggctggagaaagaaatcgctgccctccatgagatttgcaatcacgagtcagtaatcaaggaatactccagtaaaacctattccaaggtcgagtctgacctacttgatcaagaagaaatggtagataaacctgatattgggagttatgagaggcatcagatcgagagacggaggctgcaagctaaaagagaacatgccgaaaggagaaagtcttggctccagaaaaatcaggacttgctgagggtatttctgagttactgctctctgcacggggcacagggcggtggacttgcgagcgtgagaatggagctgaagtttctgctgcaagaaagccagcaggagacaaccgtgaagcaactgcagtcccccttacctcttccaacgacccttccattgttgtctgcaagcatcgctagtacaaagaccgtcatcgccaatcctgtgctgtacctaaataaccacattcacgatatcttgtataccatcgtgcagatgaagacgcccccacacccatcgatcgaggacgtgaaagtgcacacactacacagcctggctgccagtctatcagcatctatttatcaggccctgtgtgattctcactcatactctagccagacagaggggaaccagttcactgggatggcatatcagggccttctgctttcggaccggcgtcggttaaggaccgagtcaatcgaggagcacgctacacccaacagcagtccggctcagtggcccggagttagctccctgattaacctactgagctccgctcaggatgaagaccagccaaagctgaacatccttctgtgtgaagccgtcgtggcagtctacttgtccctgttaatccatgccctcgccacaaatagttcttctgagctctttaggttggctgcacacccactgaataacaggatgtgggcagcagtcttcgggggtggcgtgaaactggtggtgaagcccaggcggcagtctgagaacatcagtgcccctccggtgctctctgaagacattgataaacatcgcagacgcttcaacatgcggatgctggtgcccggtcgacctgtcaaagacgcgacgcctcctccagtgcccgctgagaggccctcgtacaaggagaagttcataccgccagagctgtcaatgtgggactacttcgtagctaagcctttcctacccctttctgactcaggcgtcatatacgactccgatgagtctatccactcagacgaggaagatgacgcttttttctctgatactcagattcaggagcaccaggaccccaacagctattcctgggctctgttgcacttaaccatggtcaaattggccttgcacaacgtgaagaatttcttccctatagctgggctcgagttcagcgaactgccggtaaccagccctctggggatcgccgtgatcaagaatctagagaattgggagcagatccttcaagaaaagatggatcagtttgaggggcctcctcctaattacattaacacttaccctacagatctctcggtcggggcaggacccgctattctccggaacaaggcaatgcttgaacccgagaatactccattcaaaagccgggattcttctgctttccctgtcaagagactgtggcatttcctggtcaaacaggaagtgctgcaagagacattcatcaggtatatttttaccaagaaaaggaagcaaagcgaagtggaggcagatttggggtatcccggtgggaaagctaaggtaatccataaggaaagcgacatgattatggcttttagcgtcaacaaagccaattgtaatgaaattgtgctggcaagcacacatgatgtgcaggaactggatgtcactagcctgctagcctgtcagagctacatttggatcggcgaggaatacgatcgggaaagtaaaagttcagacgacgtggattaccgagggagtacaactacgctgtatcaaccaagcgcaacatcttactccgcctcacaggtgcatccgcctagctctttaccttggttgggaaccggccaaacttcgaccggcgcaagtgtgctgatgaagcgtaacctgcacaatgtcaaacgcatgacctcccatcccgttcaccagtactacctcaccggcgcacaggatggtagtgtgcgaatgttcgagtggacgagaccacaacagcttgtgtgctttaggcaggccggtaatgctcgggttacgcgcctgtattttaactcccaagggaacaagtgcggagtggcggatggcgaggggttcctcagtatttggcaggtgaaccagaccgcctcgaaccccaaaccatacatgagctggcagtgccacagcaaagcaacatccgattttgcattcatcacgtcaagcagtctggtcgccaccagtggacatagtaacgataaccggaatgtttgcctctgggacactctgatctcgccgggaaattccctaatccacggattcacttgtcacgaccacggagccaccgtcctgcagtatgcccctaaacagcagctgctgataagcggtgggcgtaagggacatgtgtgcatcttcgatattcgtcaacgtcagctgattcacacattccaggcacacgactcagcgattaaagcactggccttggatccttatgaagaatactttacaacagggagcgctgaaggtaacatcaaggtatggaggttgactgggcacgggctgattcattccttcaaatctgagcatgcgaagcagagtattttccggaacatcggggcaggagttatgcagatcgatatcattcaggggaaccggttgttctcctgtggagccgatggcacactgaaaacacgcgttttgcccaacgccttcaatatacctaataggatcctggacatcctgta

SEQ ID NO: 221042 - DNA, 4851 bp, synthetic construct
  misc_feature 1..4851: note = Description of Artificial Sequence: Synthetic coding sequence
  source 1..4851: mol_type = other DNA
atgccagcacgaacagcaccagcaagggtgccaacactcgcggttcctgcaatttcactgccagatgacgtgcgcagacgtctgaaagatcttgaacgcgacagtctcactgagaaagaatgcgtgaaggaaaaactgaacctactgcatgagtttctccaaactgagattaaaaaccagctgtgcgatctagagacgaaacttcgaaaggaggagctcagtgaggaaggatatttggcaaaggttaagtccttgctgaacaaggacctgagcctcgaaaacggagcacacgcatataaccgtgaggtcaatggacggttggagaacggaaaccaggctcgtagcgaagctcgcagggtgggaatggccgatgccaactctcccccaaagcccttgtcaaagcccagaaccccgagaaggtccaaatctgacggggaagccaagcctgagccaagccccagtccaagaatcacacggaagagcaccaggcagactacaatcacctcccacttcgctaagggaccggctaagcgtaagccccaggaagagagcgagcgggcaaaatccgatgaaagtatcaaggaggaggataaggatcaggacgaaaagcgcaggagggtgacgtcccgggagcgggtcgcaagacctctgcccgctgaggagcctgaacgcgcaaaatccggcacaaggacagagaaagaagaggagagggacgaaaaggaagagaaacgactcagatcccagaccaaagagcctacgccaaaacagaagctcaaggaggaacccgacagggaggcaagggccggagtgcaggctgacgaagacgaggacggggatgagaaggatgaaaaaaagcaccgcagccagcctaaggatctggcagccaaacgaaggcctgaggagaaagagcccgagaaggtgaatccccaaataagcgatgaaaaggatgaagacgaaaaagaagaaaaaagacgcaaaaccacaccaaaggagcctaccgagaagaagatggctcgggcaaagaccgtcatgaatagtaagacccatcctcccaagtgcatacaatgcgggcaatatctcgatgatcccgacctgaagtacggacagcacccccctgacgccgtggatgagccacagatgctgaccaatgagaaactgtctatatttgacgcaaatgagtccggtttcgagtcctatgaagcccttccgcagcacaaactgacttgcttctctgtgtactgtaaacacggtcatctgtgccctattgatactgggctgatcgagaaaaatatcgaattgttcttttccggtagcgccaaacctatttatgacgatgacccttctttggaaggcggagtcaatggcaagaacctcgggcctatcaatgaatggtggatcacaggctttgatggtggcgagaaagctttgataggtttctctacctcctttgccgaatacatcctgatggacccaagcccggaatatgctccgatcttcggattgatgcaggagaagatctacataagcaagatagtggtggagtttttgcaaagcaattctgatagtacctatgaagatctgatcaacaaaatcgagactactgtccccccatctggtctgaacctcaaccggttcaccgaggattccttgctgaggcacgctcagttcgtggtcgagcaagtggagagctatgacgaggcgggtgatagcgacgagcagcctatttttctgactccttgcatgcgagacctgattaaactggcaggtgtaactttgggccaacggcgtgcccaggcccgacgtcagaccattcggcatagtacaagggaaaaagatcggggtcctacgaaagctacgactaccaagttggtgtatcagatcttcgacaccttttttgccgagcaaattgagaaagatgatcgggaagataaggagaatgccttcaaacgccgtaggtgtggagtgtgcgaggtctgccagcaacctgagtgtggtaagtgcaaggcctgcaaagacatggtgaagttcgggggaagtgggcgatctaaacaggcctgccaagagaggcgctgtcctaacatggcaatgaaggaagcggacgatgatgaagaggtggacgacaacatcccagagatgccaagccccaagaagatgcaccaaggcaaaaaaaagaaacagaataaaaaccgcatttcatgggtcggagaggcggtgaaaacagacgggaagaagtcatactacaagaaggtgtgcatcgatgccgagaccctggaggtaggagactgcgtgtcagtgattccggatgacagtagcaaaccgctgtatctggccagggtcacggcactgtgggaggacagcagtaacgggcagatgttccacgcccattggttttgtgcgggtacagacaccgttctcggcgcaacatccgatcccctggaactgttcctagtggatgagtgcgaagatatgcaactcagttatattcacagtaaggtgaaagttatttataaagcaccttcagagaactgggccatggaaggaggaatggaccccgaatccctgctggaaggggacgacgggaaaacgtacttctaccagctctggtatgatcaggactacgccagattcgaatcccccccaaaaacccagccaacagaagataataagtttaagttctgtgtgtcatgcgcccgactcgcggagatgcggcaaaaagagataccaagagtcctcgagcagctggaagacttggatagcagggtgctatattactctgccacgaaaaatgggatactgtaccgtgttggggatggcgtgtatctccccccagaggccttcacttttaatatcaagctatcctcccccgtaaagcggccaagaaaggaacctgtagacgaggacttatatcccgaacactacagaaaatactccgattacatcaagggatcaaacctggatgctccagagccatatcgcattggacgaattaaggagatattctgcccaaaaaaaagcaacggaagacctaacgaaacagacatcaagattcgggtcaacaagttctatagacccgaaaacacccataagagcacccctgcttcttaccacgctgacattaacttactgtactggtcagacgaggaggcagtggtcgatttcaaagcggtgcaggggaggtgcaccgtggagtacggggaagatctgcctgagtgtgtccaggtgtacagtatgggtggcccaaaccgcttttattttctcgaggcttataatgctaaaagtaagagcttcgaggaccccccaaatcacgccagatcgccgggaaacaagggtaagggcaagggaaaaggcaaagggaagccgaaaagtcaagcctgtgagcccagcgaaccagagatcgagatcaaactgccaaaattaaggacactggatgtcttcagcggctgtgggggactgtctgagggatttcaccaggcaggcatttctgacaccctatgggcaatcgaaatgtgggaccctgccgctcaggcatttcgactcaacaacccaggctccactgtttttactgaggattgtaacatcttgctgaagttggtgatggccggagaaaccacgaactcacggggtcaacggctcccacagaagggggatgtcgagatgctgtgcgggggacccccatgtcaaggattttcgggaatgaaccggttcaacagcagaacctacagcaagtttaaaaatagtcttgtggtgtcatttctctcctactgcgattactataggccacgattcttcttgttagaaaatgtgaggaattttgtatcttttaagaggtctatggtcttgaagctgaccctgcgctgcctagtgcgtatggggtaccaatgtacctttggcgtgctgcaggctgggcagtatggcgtagcacagacgcgcaggagggcgatcatattggcagcggctcccggagagaaactgcctttgttcccagagcccttgcacgtgttcgcgccaagggcgtgtcagctctcagtcgtagtggacgataaaaaatttgtgtcaaacatcactagactgtcttctggacctttcagaacgatcaccgttagagacaccatgagtgatttgccggaagtgagaaacggggcaagcgcattagaaatttcgtataatggggagcctcaatcctggtttcagcgtcagctgagaggcgcacagtaccagcccattctccgagatcatatctgtaaggatatgagcgctctggtggccgcaagaatgcgacacataccactcgcacccggtagtgattggagggaccttcctaacatcgaggtgcgcttaagtgatggaacaatggctcgcaagttaaggtacacgcaccacgataggaagaacggtcgaagtagctctggagctttgcgaggagtgtgctcatgcgtcgaggccggaaaggcctgcgatcctgcagcccgacagtttaatacgctgatcccttggtgtctgccccacaccggcaataggcataaccactgggccggattgtacgggaggctcgagtgggacggttttttttcgactacggtcacaaatcctgagcccatgggaaagcaagggcgtgtgctccaccctgagcaacatagagtggtgagtgttcgcgagtgcgcacgatcacagggctttcctgatacctacaggctcttcggcaacatcttggataagcacaggcaggtagggaacgcggttcctccaccactggccaaggctattggcctggaaatcaagctatgcatgctggctaaagccagggagtctgcatccgcaaagatcaaagaagaggaagcagccaaggattag

SEQ ID NO: 221043 - DNA, 4899 bp, synthetic construct
  misc_feature 1..4899: note = Description of Artificial Sequence: Synthetic coding sequence
  source 1..4899: mol_type = other DNA
atgcctgcaagaaccgcgcctgccagagtccccacgctggccgttcctgctatctccttacctgacgatgtgaggcggagactgaaagatttggaaagagattccctaacagagaaggagtgcgtgaaagagaagctgaatctgctgcacgaatttctgcagaccgagatcaaaaatcaattatgcgatctcgaaaccaaactgagaaaggaagaactctctgaggagggttatctggccaaggtcaagagtttactgaataaagaccttagccttgaaaatggagcacacgcctataacagagaagtcaacggtcgcctggagaacgggaatcaggcccgtagcgaggctaggcgtgtcggaatggctgatgcgaactcgccacccaaaccactttctaaaccccgaacccccagacggtcaaaatcggacggagaggcaaagcgttctagggatccgccagctagtgcttcccaggtgaccggaatcagagccgagcccagtccaagcccacgcattacccgaaagtctaccagacaaacaactatcacttcccactttgccaagggcccagctaaacggaaaccacaggaggagagcgaaagagctaagtctgatgaatcgatcaaggaagaggataaagaccaggatgagaagcgacgcagagtgacatcacgcgaacgcgtggctaggcctctccccgctgaagaacctgagcgagcaaagtccgggaccagaacagaaaaggaagaagaacgggacgagaaggaggagaagagactgcgatctcagacgaaagaacccactccaaaacagaagctgaaggaggaacctgatcgagaggcaagggccggagtgcaggccgatgaagacgaagatggcgatgagaaggatgaaaaaaaacatcggagtcagcctaaggacctggccgctaagcgcaggccggaagagaaggaaccagaaaaggtaaacccccagatctccgatgaaaaggacgaagatgaaaaggaggaaaagcggaggaaaaccactcctaaggagcccaccgagaaaaaaatggctcgtgctaaaacagtcatgaattccaaaactcacccaccgaagtgtattcaatgcggtcagtatctggacgaccccgacctcaagtacggacagcatccaccagacgctgtggacgaaccacagatgctgaccaatgagaaactttccatcttcgacgcaaacgagagcggctttgagtcatatgaggccctgccacagcacaagcttacctgcttttccgtttactgcaagcacgggcatttatgcccaattgatactggtctaatcgagaaaaacatcgagctgttttttagtggctccgcaaagcccatctacgacgatgaccctagtctagagggtggcgtaaacgggaaaaacctcggaccgattaatgaatggtggattacaggctttgacggaggcgagaaggcactgattggattttccacgtcatttgctgaatacatcctgatggatccttcccccgagtatgcgccaatttttggcctgatgcaggagaaaatttacatcagcaagatagttgtggaatttctacagtcgaattctgacagtacctatgaggatctcataaataagattgagactaccgtgccaccttctggtctgaacctcaatcgctttacagaggactctctgctcaggcatgctcagttcgtggtcgaacaggtagagtcgtatgatgaggccggagattcagacgagcaaccaatctttctgacgccctgcatgcgcgacctcatcaaactggcaggcgttacgttaggccagcgcagagcccaggctagacggcaaaccatccggcactctacccgagagaaggaccggggacccactaaagccaccacaacaaaactggtttaccaaatcttcgacacattcttcgccgagcagatcgaaaaggacgaccgagaggacaaggaaaacgccttcaaaaggaggcgctgcggcgtttgtgaagtatgccagcagcctgaatgtggcaaatgcaaggcctgtaaggatatggtaaaattcgggggaagcggtcggtcaaaacaagcctgccaggaaagacgttgccctaacatggcaatgaaagaggccgacgatgacgaggaggtggatgataatattcccgagatgccctcccccaaaaagatgcaccagggaaaaaagaaaaaacagaataaaaaccggatttcatgggtgggagaagctgttaaaaccgatggaaagaagtcttactacaagaaggtgtgcatcgacgccgagactttagaggtgggagattgcgtgagcgtcattccagacgattcttcaaagcccctgtaccttgctagagttaccgcactgtgggaagattctagcaatggccagatgttccatgcccactggttctgcgcgggaacagacaccgtgttaggtgccacctccgatcccctggaactgttcctggtggacgagtgcgaagacatgcagttgtcttacatccacagtaaggttaaggttatctataaagctccatcagagaattgggcgatggagggcggtatggacccagaaagcctgcttgaaggcgatgatgggaagacctacttctaccagctgtggtatgaccaagactacgcacggtttgagtccccaccgaagacacagcctaccgaggacaataagttcaagttttgcgtgtcctgcgctaggctggccgagatgaggcagaaggagattccgagggttcttgaacaactggaggatctggacagtagagttctctattactctgccacaaaaaatggaatcctatatcgggtgggggacggtgtttaccttccgcctgaagcttttacctttaacattaagttgtcttcccctgtgaagcgacctaggaaagagccagtggacgaagatctgtatcccgagcactatagaaagtattccgattacatcaaaggctcaaatctggacgcaccggagccataccggattggacgcattaaggaaatcttttgtccgaagaagtctaacgggaggcccaacgaaaccgatattaaaatcagggtgaacaagttctacaggccagagaacactcacaaatcgaccccagccagctatcacgctgatatcaacctcttatattggagtgacgaagaggccgtagtggatttcaaagccgtccagggtcggtgtactgtggagtatggcgaggacctccccgaatgtgtccaggtgtactcaatggggggtcctaacaggttttattttttggaagcctacaatgcaaagtctaagagcttcgaggacccgcctaatcacgctcgctcacccggaaacaagggtaaaggcaagggaaaaggcaaaggcaagcccaagtcacaggcctgcgaacctagtgaacctgagatcgagatcaagctgccgaagctgcggactctggatgtcttcagtggttgcggcggtctgtccgagggcttccatcaggcagggatcagcgacacgctgtgggctattgaaatgtgggatccggctgctcaggcctttcgcctgaataatccaggttcaaccgtgttcaccgaggattgcaacatcctgctaaagctggtcatggcaggtgagactaccaacagtcgtggacagcggctgcctcagaagggtgatgtagaaatgctatgcggaggccctccatgccaaggcttcagcgggatgaatagatttaacagtcggacctatagtaagttcaaaaatagtttagtcgtgtcatttctgtcatattgtgattattatagacccaggttctttctgctagagaatgttcggaattttgtgtcctttaagcggtcaatggtgttaaagctgaccttacgctgtctggtccggatgggttaccagtgtacgtttggcgtgctccaggccggacaatatggcgtcgcgcagactaggcggcgagcaattatccttgctgctgcgccaggagagaagttgcctttatttccagagcccctgcatgtcttcgcgcctcgagcctgccagctgtcagtcgtggtggatgacaagaagtttgtttctaacatcacgaggctgtctagcgggcctttcaggacgatcacagtcagggacaccatgtctgacctgccggaggtcaggaatggggcttctgctttggagatctcctacaacggcgagccccagagctggtttcagcgccagctcaggggcgcacaatatcagccaatccttagagaccacatctgtaaagacatgtccgcccttgtggccgcacgcatgaggcacatccctcttgcgcctggcagcgactggcgggacctgcccaacattgaagtgcgattaagcgatgggacgatggccagaaagcttcggtatactcaccacgaccgcaagaacgggagatcaagttccggagcgctgaggggcgtgtgctcatgtgtggaggctgggaaggcatgcgaccccgctgccagacaatttaatacactgattccttggtgcttgccccatacaggcaacagacataaccattgggccggactttacggtcgcctcgagtgggacggattttttagcacaaccgtcacgaacccagagcctatgggcaagcagggtagagttctgcaccccgaacaacaccgtgtggtgagcgtgcgggaatgtgctcgctcccaagggttcccagatacttatcggcttttcggcaatatcttggacaaacacaggcaagtgggcaacgcggtgcccccaccacttgccaaggccatcggactggagatcaagctctgtatgctggccaaagctagggaaagcgccagcgccaagattaaagaggaagaggctgcgaaggactag

SEQ ID NO: 221044 - DNA, 4860 bp, synthetic construct
  misc_feature 1..4860: note = Description of Artificial Sequence: Synthetic coding sequence
  source 1..4860: mol_type = other DNA
atgcccgctcgcaccgcccctgctagggtgcccacccttgctgtgcccgctattagcctgcctgacgatgtgaggcgcaggctgaaagacctcgaacgcgactctctaaccgaaaaagaatgcgtgaaggaaaaacttaatctgctccacgagtttctgcaaactgagatcaagaaccaactttgcgacttagagacaaagctgcggaaggaagaactctcagaagagggatacctcgctaaggtgaagagtctgctcaataaagacctctcactggagaacggcgcacatgcttataatcgagaggttaatggcagactggagaatggcaatcaagcccgttccgaggccagaagggtcggaatggctgatgccaatagcccacctaaaccgctgagcaaacctagaactcctaggaggtctaagtcagatggcgaggccaagcctgagccaagcccctccccgaggatcacacggaaaagcaccagacagactactattacgtcccactttgcaaagggacccgcaaaaagaaagccccaagaagagtccgaacgcgctaagtcagatgagtctattaaggaagaagacaaagatcaagatgaaaaacgcaggagagtcaccagccgcgaacgggtggccagacccctgcctgccgaggaaccagaaagggctaagagcggtacaagaactgagaaggaggaggaacgtgatgaaaaggaagaaaaacgcctgcggtcacaaaccaaggagcccaccccgaagcaaaaactcaaggaggagcctgacagagaggcacgggctggtgttcaggccgatgaagacgaggacggtgacgagaaagatgagaagaagcatagaagccaacctaaggatctcgcagcaaaacgaagacccgaagaaaaggaacccgaaaaagtcaacccacagatcagcgatgaaaaagacgaggatgaaaaggaagagaaaagacgaaagacaactccgaaggagcccacagagaaaaaaatggccagggcaaagaccgttatgaactccaaaactcatccaccaaaatgcatccagtgtggacagtacctggacgaccctgacctcaagtacggccagcatccacccgacgccgttgacgaaccgcagatgctgaccaatgagaaactctcaatttttgacgcaaacgagagcggatttgagtcatacgaagccttgccgcagcataagcttacctgtttcagcgtctattgtaaacacggacacctttgtcctattgataccggactgattgagaagaatattgaactgttcttttcgggtagcgcgaagcctatctatgacgatgaccctagcctcgaaggcggtgtgaacgggaagaatttgggcccaatcaatgaatggtggattactggattcgatggcggagagaaagcactaataggcttctctacgagcttcgccgagtacatcctcatggaccccagtcctgagtatgccccaatcttcggactcatgcaagaaaaaatttacatctccaaaatcgtagtggagtttctgcagtcaaattccgacagcacatacgaagacttgattaacaaaattgaaactacggtgcccccttccgggctgaatttgaatcgcttcacggaagattcgctgctgcgccacgcacagtttgttgtggagcaggtggaatcgtatgatgaagcaggcgatagcgacgagcagcctatctttctcactccgtgcatgcgagatctcatcaaactcgctggcgtgaccctcgggcaacgcagagcgcaggcacggcgtcagaccatcagacacagcacacgggagaaggatcgtggccctacgaaggctacaacaactaagctagtgtaccagatcttcgatacattcttcgcagaacaaatagagaaggatgaccgcgaggacaaggaaaatgcgttcaagaggcggcgttgcggggtctgcgaggtgtgtcaacagcctgaatgtggtaagtgtaaagcatgcaaggacatggtcaaattcggtggatcaggtcgttctaagcaagcctgccaggagcgaagatgtcctaatatggcgatgaaggaggccgacgatgatgaggaggtggacgataatatccccgagatgccgagcccaaaaaaaatgcaccagggtaagaaaaagaaacagaacaaaaatcggattagttgggtgggtgaggcagtgaagaccgacggaaaaaaatcatattacaagaaagtatgcatagatgcggagaccctggaggtgggcgattgtgtgtctgttatccccgatgattcctctaagcctctctatttggccagagttacagccctgtgggaggattcatcaaatggccagatgttccacgcacactggttttgcgccggtaccgacacggtcttgggagcaaccagcgaccccttagagctttttctggtcgatgagtgcgaggacatgcagctgagctatatccacagcaaagtaaaggttatttataaggcaccatcagaaaattgggccatggaaggaggaatggaccctgagagtctgctggaaggggacgacggcaagacctacttctaccagttatggtacgatcaggactacgctcggttcgagtctcctccaaagacgcaaccaacagaggacaacaagtttaagttttgcgtgagctgcgctcgactggctgaaatgcgacagaaagagatccctcgtgtcctagagcaactcgaggatctcgacagtagagtgctctactattccgctacaaagaatggcattctttatagagttggcgacggagtgtatctgccacccgaggctttcaccttcaatatcaaactctcttcccctgtcaaacgaccgagaaaggaacctgtcgacgaggatctgtacccagagcattacaggaagtattctgattatatcaaaggcagtaatttagacgctcccgaaccctaccggatcggccgtataaaagaaattttctgtccgaaaaagagcaatggcaggcctaacgagacggacatcaaaatcagagtgaacaaattctatcgccctgagaatacacacaaatctacccccgcaagctatcacgccgatatcaacctcttatattggagcgacgaagaggccgtggtggactttaaggcggtccagggccgatgtaccgtagagtacggcgaggacctaccagagtgcgtgcaggtctactctatgggagggcctaacagattctatttccttgaggcgtacaatgcaaagtccaaatcattcgaagacccacctaaccacgctcggtcccccggaaacaagggaaagggcaaagggaaaggcaagggcaaaccaaaaagccaggcctgcgaaccttctgagcccgagatcgagattaaactgccaaagttgagaacactcgatgtattctccggttgtggcggtttaagtgaaggatttcaccaggccggtatctccgataccctctgggccattgagatgtgggaccccgcagctcaggcctttaggctgaacaatccaggcagtacagtgttcacagaagactgcaacattctgcttaaactagtcatggccggtgagaccaccaacagcagaggccagagactgcctcaaaagggcgatgtggaaatgctctgtggcggaccgccatgccagggattcagcggcatgaatcgattcaatagccggacatactctaagtttaagaattcactcgtggtgtccttcctctcatattgcgactactatcgaccaaggttcttcctgctagaaaacgtgaggaactttgtctcttttaagcggtcaatggtgttgaagctgacgctgaggtgtctcgtgaggatggggtaccaatgtacatttggcgtcctgcaggctgggcaatatggagtcgcgcagacccggaggcgggctatcatcctggcagccgcacccggagagaaactgcctctcttccctgagccactgcatgtatttgcaccgcgagcttgccagctctctgtcgtagtcgacgacaagaagttcgtgtctaacataactagattaagtagcgggccattcagaacgatcactgtacgggacaccatgagcgatcttcccgaagtccgcaatggcgcaagtgcccttgagatttcctacaatggcgagccccaaagctggttccagaggcaactgcggggagctcaataccagcctatcttgagagaccacatttgcaaagatatgagtgccttggtggcagctcgcatgagacatatacctctggcccctgggagtgattggagagacctgcctaacatcgaagtcagactatcagacggaaccatggcccgaaaactgcgctatacccatcatgaccgaaagaatggacgcagcagttcaggagctctccgtggggtatgttcctgtgtcgagggcggttcttccgggaaagcctgcgatccagccgctagacagttcaatacactcatcccctggtgcctcccgcatacgggaaacaggcacaatcactgggccggattatatggtaggcttgagtgggacggcttttttagcactactgtgaccaaccctgaaccaatgggcaagcagggacgcgtcctgcatcccgagcagcacagagtggtttcagttcgggagtgtgctcgatcccagggtttccccgatacttatcggctttttggaaacatcttggataagcatcgtcaggtgggcaacgccgtccccccaccattggctaaggccattggcctggagatcaaattgtgcatgctggccaaggctcgagaatccgcgagtgccaagatcaaggaagaagaggctgcaaaggattag

SEQ ID NO: 221045 - DNA, 4455 bp, synthetic construct
  misc_feature 1..4455: note = Description of Artificial Sequence: Synthetic coding sequence
  source 1..4455: mol_type = other DNA
ggaagttgtcactcaccggcaagcgcctctcaggttgctggtaccacagctgagcctagtccttcccccaggataaccaggaagagcactcgacagaccactattacttcacacttcgcgaaagggccagcaaaaaggaaacctcaggaggagagcgaacgggcaaaatcggatgagtctatcaaggaggaagacaaagatcaggacgaaaagcgccgaagagtgacatcacgtgaacgcgtcgcaaggcctctgccagcagaggagcctgaaagagcaaagtctggcacaagaaccgagaaagaggaggagcgagacgagaaggaagaaaagcgactgcgcagccagacaaaggaacccacccccaagcaaaagctcaaggaagaaccagaccgagaggccagggccggagtccaggccgatgaagatgaggatggtgacgagaaggatgagaaaaaacaccggtctcagccaaaagacttggcggcaaaaagacggcctgaagaaaaagagcctgagaaagtgaatccccagattagtgatgaaaaagatgaggacgagaaagaggagaaacgtcggaagaccaccccaaaggagccaaccgaaaagaagatggctcgcgctaagacagtcatgaacagcaagacccatcctccaaagtgcatacagtgtggtcagtacttggatgaccccgacctaaaatatggacaacacccccctgatgccgtcgacgagccccagatgctgaccaacgagaagctctcgatctttgatgccaatgagtccggattcgaatcatacgaggctttgccccagcacaaactgacgtgtttcagcgtatactgtaagcacgggcatttatgtccgattgacacgggccttatcgagaagaacatcgaattattcttctcagggagcgcaaaacctatctacgacgacgatcccagcttagaggggggtgtgaatgggaagaaccttggacccatcaatgagtggtggatcacaggatttgatggcggagaaaaggcgctgattggcttctcaaccagcttcgctgaatacatactcatggatccctccccggagtacgctcccatctttgggttgatgcaggagaagatttatatctccaagattgtggtggaattcctccagagcaacagcgatagtacctacgaggacctgataaataaaatcgaaacaactgttccaccatccggactgaacttgaaccgcttcacagaggattccttgctgcggcatgctcagttcgtagtcgaacaggttgagtcttacgatgaagccggagatagtgatgaacagcccatattcctgaccccctgcatgcgtgatctcatcaagctcgcgggagtgaccttaggccagcgacgcgcacaggcgagacggcagaccatccggcactctacgcgcgaaaaggaccggggacccaccaaggccacaaccacaaagctggtttatcagattttcgacactttttttgctgagcagatcgagaaagatgatcgtgaggacaaggaaaatgctttcaagcggcgtagatgtggtgtttgcgaggtatgccagcaacccgagtgcggaaaatgtaaagcatgcaaggacatggtaaaattcggaggtagtggtcggtctaaacaagcctgtcaggagaggcggtgtcccaatatggccatgaaggaggcggatgacgatgaggaagtcgacgacaacatacccgagatgcctagccccaagaagatgcaccagggcaagaagaaaaaacagaataaaaacaggataagctgggtcggcgaagctgtgaagactgatggcaaaaaaagctattacaagaaagtttgcatcgacgctgaaacactcgaggtgggcgattgcgtaagcgttattcccgatgatagcagcaagcccctgtacctcgcaagagtcaccgccctgtgggaagattcaagtaacggccagatgttccatgcccattggttttgtgctggaacggatacggttttgggtgcaacaagcgaccccctcgaactttttctggtcgatgagtgcgaagatatgcaactttcttacatacactccaaggtgaaggtcatttataaagcgccttccgaaaactgggccatggaaggcggaatggatcccgagagcctgcttgaaggagacgatggaaaaacctatttttaccaactttggtatgatcaggattacgccagattcgaatcaccaccaaagacacagcctacagaggacaacaaatttaaattctgcgtgagctgcgctcgcttggcagagatgcgccaaaaagaaattcctcgagtgttggaacagctggaagacctagactcccgagttctctactactccgctaccaaaaatggcattttgtaccgggtaggggatggtgtctacctacctcctgaggcctttacgttcaatatcaagctgagctcacccgttaaaaggccacggaaggagccggtagacgaggacttatatcctgagcactatcgaaagtattccgactatattaaaggctctaatttggacgcacccgagccatacaggattgggcgtatcaaggagatcttctgtcccaagaagtcaaacggaaggccgaatgagacagatatcaaaatccgggtgaacaaattctatagaccagagaatacacacaagagtacacctgccagttaccacgccgacatcaatctcctctactggtccgacgaggaggctgtagtggatttcaaggctgtccagggaaggtgtactgtggaatacggagaagaccttcctgaatgtgtgcaggtgtacagtatggggggacctaaccgattctatttcctggaggcctacaatgcgaaatctaaatcctttgaggacccacccaatcacgcacgctctcctggcaacaaggggaagggcaaaggaaagggaaagggtaagccaaaatctcaggcctgtgagccgtctgagcccgagatagagatcaagctccccaagctcagaactctggacgtgttttctggctgtggaggactgtctgagggcttccaccaagccggtatcagcgataccctgtgggcaattgaaatgtgggacccagctgctcaggccttcaggctaaataaccctggcagcactgtgtttactgaagattgcaacatcctgttgaaactggtcatggctggcgagaccacgaactctcgagggcagcgcctgccccagaagggagacgtggagatgctctgcgggggacccccttgccaaggtttttcaggcatgaaccgtttcaattctaggacgtactctaagttcaagaattcacttgtagtgtctttcctgtcatattgcgactactatcgcccacggttcttcctcctggagaacgtacgtaattttgtgtccttcaagaggagcatggttctcaaactgaccttacgctgtttggtgcgcatgggatatcaatgcacatttggagtgctgcaggcaggacagtacggagtcgctcagactcgaaggagggcgatcatcctggccgcagccccaggggagaagctacctctgttccctgaacctctgcatgttttcgctcctagggcctgtcagcttagtgtcgtggtggatgataagaagtttgtctcaaatatcaccagactgtcttcgggtccgtttagaactatcacagtgcgggataccatgtcggatctcccagaggtgcgaaacggggcatctgcgcttgagataagctacaatggcgaaccccagagttggttccagcgtcagctgagaggcgcacaatatcaacccattctgcgcgatcatatctgcaaagacatgtcagccttagtcgccgcaaggatgcgacacattccgctcgcccctggcagtgactggagggatctgccaaatattgaggttcggttgagtgatggtacaatggcccgaaagctccggtacactcatcatgacaggaagaatggaagaagcagttcaggtgccttgcgcggtgtgtgctcatgtgttgaagccggaaaagcttgcgatcctgcagctaggcagttcaatacgctgattccatggtgccttccccataccggaaatagacataatcactgggctggactttacgggcgtcttgaatgggacggtttcttttcaactacagtgacaaatccagagccaatggggaaacaggggcgagttctgcaccctgaacagcaccgggtggtgagcgtgcgtgaatgtgcgagatcacagggatttccagacacctaccgactgtttggcaatatcctggataaacaccggcaggtcgggaatgcggtgcccccacccttggccaaagcgatcgggttggaaatcaaactttgtatgctggctaaggcacgagagagtgcctccgccaaaatcaaggaagaagaggcggctaaggattag

SEQ ID NO: 221046 - DNA, 2739 bp, synthetic construct
  misc_feature 1..2739: note = Description of Artificial Sequence: Synthetic coding sequence
  source 1..2739: mol_type = other DNA
atgcccgctatgccaagctcaggccctggagacactagtagctccgctgctgaaagagaggaagatcgcaaggacggagaggagcaagaagaaccgagagggaaagaggaacgccaggagccatcgaccaccgccagaaaggtgggaagacccggacggaaaagaaagcatccccctgtcgaatccggcgacactcccaaagatcctgctgtgattagcaagtcccctagcatggcccaggatagcggggcttccgagttgttgccaaacggcgatttggagaagcggagtgagccccagccagaagagggatccccagccggaggacagaagggcggtgccccagccgagggggaaggagcagctgagactttacctgaagcctctagggctgtggagaatggatgctgcacgccaaaggagggccgaggggcacctgcagaggctgggaaggaacagaaggagacaaacattgagtctatgaagatggaggggtctaggggtaggctgagaggagggctgggctgggagtcctcactgcgacagagaccgatgccgagactgacttttcaagctggtgatccatactacatctcaaagaggaaaagggatgagtggttagctcggtggaaacgagaggccgaaaagaaagctaaagtcattgcgggtatgaacgccgtggaagagaaccagggccctggtgagtcccagaaagttgaagaggcatctccacccgcagtgcaacagccaaccgatcctgcatccccaacagtggcgacaactcccgaaccggtgggaagcgacgccggagataagaacgccactaaggctggggacgacgagcctgaatacgaggatggtcgaggtttcggaataggcgaactggtgtggggcaagctgagaggcttcagctggtggccagggcgtatcgttagttggtggatgaccgggaggtcaagggcggctgaggggactcgctgggtcatgtggttcggtgacggaaagttctccgtggtgtgtgtcgagaaactgatgcccctgtcttccttttgtagcgctttccaccaagcaacctacaacaagcaaccaatgtaccgaaaggccatttatgaagtgctacaggtggccagcagtcgggcaggcaaactgtttcccgtctgtcatgactctgatgagagcgatacagcaaaggctgtggaagtgcaaaacaaacctatgattgaatgggccctggggggatttcagccgtctggtccaaaagggctcgagccacccgaagaagaaaagaatccctacaaggaagtctacacagacatgtgggtcgaacccgaggctgctgcttacgcccctccgccacccgctaaaaagccgagaaaaagcaccgcagaaaagccaaaggtgaaggaaattattgacgagcggacccgcgaaaggttggtgtacgaggtacgtcagaaatgcaggaacattgaggatatatgtatcagttgtgggtccctgaatgtcacattagagcatcccctatttgtcgggggtatgtgtcagaactgcaagaattgctttctggagtgcgcataccagtacgatgatgacgggtaccagtcttactgtacgatatgttgtggcggacgcgaagtgctgatgtgcgggaacaacaattgctgccggtgcttctgcgtagaatgtgtggacctgctcgtcggcccaggagctgcccaggccgcaatcaaagaagatccatggaactgctacatgtgcggacacaaaggcacctatgggctgctgcggaggagggaagactggccttctcgactgcagatgtttttcgccaataaccatgatcaagaatttgacccacccaaggtgtatccgccagttccagccgagaagcgcaaacccattcgagttctgtccttgtttgatggaattgcaacgggcttgcttgtgctcaaggaccttggtatccaggtggaccggtacatcgctagcgaagtgtgtgaggatagcataacggtgggaatggtcagacaccaggggaaaataatgtatgtaggcgatgttaggagtgtgacacagaagcatatacaagagtggggaccgttcgatctggtgattgggggatcaccctgtaacgatttgtccattgtgaatcctgcccgtaaaggcctgtatgaaggcacaggacggcttttttttgagttctatcggctgctccacgatgccagacccaaggagggtgacgaccggcctttcttctggctgtttgagaatgtagtggccatgggtgtaagcgacaaacgcgacattagtagatttttggagagcaatccagtaatgattgacgctaaggaagtgagtgccgctcacagggcccgatacttctggggaaatctgccaggtatgaaccgtcccctcgcgtccaccgtgaatgacaagttagagctgcaagaatgtcttgaacacggtcgcatagcaaagttcagtaaagtcagaacaattacaacaaggagtaactccatcaagcaaggaaaggaccagcacttcccggtctttatgaacgagaaagaagatatactgtggtgcaccgagatggagagggtcttcggtttccccgtccactatacagacgtgagtaatatgtctcggctagccagacagaggttgcttggccgttcttggagcgtgcccgtcatcagacacctattcgccccactcaaagagtattttgcatgcgtttag

SEQ ID NO: 221047 - DNA, 2739 bp, synthetic construct
  misc_feature 1..2739: note = Description of Artificial Sequence: Synthetic coding sequence
  source 1..2739: mol_type = other DNA
atgccagcgatgccctcttccggccctggggacacatcctcatccgcagccgagcgcgaggaagatagaaaggatggggaagagcaggaggaaccccgagggaaagaggaaaggcaggagccctcgactacggcccgaaaggtgggcagaccaggccgaaagagaaaacacccaccagttgagtccggagatactcccaaagatcctgcagtgatctctaagtcccccagcatggcgcaggactcaggcgctagtgagctactgccaaatggtgatctggagaagagatctgagccacagccggaagagggatctcccgctggaggccaaaagggaggagccccagcagagggtgagggagccgctgaaacattgcccgaggcctcacgggcagtggaaaacgggtgttgcacaccaaaggaggggagaggcgctccggcagaggccggaaaggagcaaaaggaaaccaacatcgaatccatgaagatggagggctcacggggacgcttaaggggcggactgggctgggagtctagtctgagacagcgtcctatgccacgcctgacctttcaagccggagacccctattacatatcaaagcgcaagcgcgacgaatggttggccagatggaaaagggaggctgaaaaaaaagccaaagttatagcaggaatgaatgctgtcgaggagaatcagggcccaggtgaaagtcaaaaggtcgaggaagctagtcctcctgccgttcagcagcccaccgacccggcaagtccaaccgtcgctaccaccccagagcccgtggggtctgacgccggtgataagaacgctacaaaggccggagacgacgagcccgaatacgaggacggcagggggtttggtattggggaactggtatggggtaaattgcggggatttagctggtggcctggccgaatcgtcagttggtggatgactggtagatcgagagcagccgaaggaaccagatgggtgatgtggtttggagacgggaagttttctgttgtctgcgttgagaaacttatgccgctgagctcattctgcagtgcattccatcaagctacctacaacaagcaaccaatgtaccgcaaagctatttacgaagtgctccaggtcgcgtcatctcgcgcaggaaaattatttccagtgtgtcatgacagcgacgagtctgacaccgccaaagcagtggaggtccagaataaacccatgatcgagtgggctctgggcggatttcagccaagtggcccaaaaggtctcgagcctcccgaagaagagaagaatccctacaaagaggtgtataccgatatgtgggtggagcccgaggccgctgcctatgcaccgcctcctcctgctaaaaaacctaggaagtcaacagcggagaaaccaaaggttaaggaaattattgatgagcgcacgagggaaaggcttgtgtacgaagtgcgccaaaagtgtcggaacattgaagacatctgcatctcctgtgggagcctcaatgtgactttagagcaccctctttttgtgggagggatgtgccagaactgcaagaattgcttccttgagtgtgcgtaccagtacgacgacgacgggtatcaaagctactgcaccatctgttgcggtgggagggaagtgctcatgtgcggcaacaacaattgctgtagatgtttttgcgtcgagtgtgtggaccttctagtaggacccggtgccgctcaggccgctattaaagaagacccatggaattgctacatgtgcggccataaggggacttatgggctgctccgaaggcgggaggactggccgagtcgactccagatgtttttcgccaataatcatgaccaggagttcgaccctccaaaagtctaccccccagtcccagctgaaaagcgcaagcctatccgtgttctttcattatttgacggcatcgcaacaggtctgctggttctcaaagatttaggaattcaagtcgacaggtacattgctagcgaggtgtgtgaggatagtattactgtgggtatggtcagacaccagggaaagattatgtatgtgggggatgtaagaagcgtaacacaaaaacacatccaggagtggggcccttttgatctggtcatagggggatcaccttgcaatgacttgtcaatcgttaatcctgcccgaaagggactctacgagggcaccgggaggctgtttttcgaattttaccggctcctgcacgacgcgaggcccaaggaaggcgacgatagacctttcttttggttgtttgagaacgtggttgctatgggcgtcagcgacaagcgcgatatatcaaggttcctggagagtaaccctgtaatgattgatgcaaaggaagtgtctgccgcacaccgagcccgatacttttggggcaacctgccaggaatgaatcgacccctcgcctcaacagtcaacgataaactggaattacaggaatgtctggaacatggccgaattgccaagttttctaaggtgcgaacaattaccacacgcagtaacagtatcaaacagggtaaggaccagcactttcctgtgttcatgaacgagaaggaggacatactgtggtgtacagagatggaacgcgtcttcgggtttcctgtgcattacaccgatgtgagcaatatgagtcggctagcaagacagcggttactcggacgtagctggagcgtaccggtgattcgccacctgtttgcccctctcaaagaatacttcgcttgcgtgtag

SEQ ID NO: 221048 - DNA, 2172 bp, synthetic construct
  misc_feature 1..2172: note = Description of Artificial Sequence: Synthetic coding sequence
  source 1..2172: mol_type = other DNA
atgggtattttggagcgtgtggtccggcgaaatggtagagtcgatcgctcactcaaggatgaatgtgatacagcagaaaagaaagccaaagtgattgccggaatgaacgccgtcgaagagaaccaggggcctggagaatctcaaaaagtggaggaggcttcacccccagcagtgcagcagccgacagaccctgcctcccccactgtggcaaccacgcctgagcctgtggggtccgatgccggagataagaatgctacgaaggccggagatgacgaaccagagtacgaggacggcagaggatttggtatcggtgagctggtgtggggaaaactgagggggtttagttggtggcccggacggattgtgtcttggtggatgactggcagaagtcgggcagctgagggcacaaggtgggtcatgtggtttggcgacgggaaattttccgtggtgtgcgtggagaagcttatgccccttagctctttttgctccgcctttcaccaggcaacctacaataagcagcctatgtatcggaaagccatatacgaagtgctccaagtggcgtccagtagagccggaaaactgtttcccgtgtgccatgacagtgacgagagtgataccgccaaggccgtggaggtccagaataaaccgatgattgaatgggcactggggggtttccagcccagcggtccaaaaggcctggagcccccagaggaggaaaagaacccgtacaaagaggtttacacagacatgtgggtcgaacctgaggcggcagcctatgccccaccgccaccagccaaaaagcccaggaaatccactgccgagaagccaaaggtaaaggagattattgacgaacgaactcgggaaaggctcgtgtatgaggtacgtcaaaagtgccggaacatcgaggatatctgtatttcttgcggctcgttgaatgtaaccctggagcacccattattcgttgggggaatgtgtcagaactgtaaaaactgcttccttgaatgcgcttatcagtatgacgacgacgggtaccagtcttattgcactatctgttgtgggggtagggaggtactcatgtgtggtaacaataattgttgtagatgcttctgtgttgaatgcgtggatttactggtcggaccaggagccgctcaggccgctataaaggaggacccttggaattgttacatgtgtgggcacaaaggaacatacggtctactgcggagacgggaggactggccttcacgattacaaatgttttttgctaataatcacgaccaggagtttgaccctccaaaagtgtatcctccagtccccgctgaaaaacggaaaccaataagagtgctcagcttatttgacgggatcgcgacaggtctgctggtcctgaaagacctcggaatccaggtggatagatatattgccagcgaggtatgtgaggatagcataacagttggaatggtgcgacatcagggtaagatcatgtatgtcggcgatgtgcgcagtgtcactcagaaacatatccaggagtggggaccattcgacctcgttatcggtggctctccatgcaacgacctcagcatcgtcaatccagcgagaaaagggctctatgagggcacgggacgcttattcttcgagttttacaggctgctccatgacgcaagaccaaaagagggagatgaccgcccattcttttggttgttcgagaatgtggtggcaatgggcgtatccgacaagcgggacatctcccgctttcttgaatcaaacccggttatgatcgatgccaaggaggtgtccgctgcgcaccgagctcggtatttttggggtaaccttccaggtatgaacagacctctcgccagtaccgtgaacgataagcttgaactccaggagtgtctcgaacacggacgaattgctaaattcagtaaggtcaggaccattacaacccgcagcaactcaataaagcagggaaaagaccagcattttccagtgttcatgaatgagaaggaggatatcctctggtgcaccgagatggaacgggtctttggctttccagtacattataccgatgtgagcaatatgtcccgcctcgccaggcaacgtcttttagggcgatcatggtcggtgcccgtgattcgccacctattcgccccactaaaagagtatttcgcttgcgtttag

SEQ ID NO: 221049 - DNA, 2070 bp, synthetic construct
  misc_feature 1..2070: note = Description of Artificial Sequence: Synthetic coding sequence
  source 1..2070: mol_type = other DNA
atgaatgcggtggaagagaaccaggggccaggcgaaagccaaaaggtcgaagaggcatccccgcctgctgtgcaacagccaaccgaccctgcatctcctacagtagcaacgactcccgaaccagtgggctctgatgccggagacaaaaacgcgacgaaagccggtgacgacgagcctgaatatgaagacggcaggggctttggtataggcgagctcgtatgggggaaactccggggattttcctggtggccgggacgcattgtcagttggtggatgactggtagatcaagggccgcagaaggtaccaggtgggtcatgtggttcggtgatggtaagttctccgttgtttgcgtcgagaagctgatgccactttcgtcattctgttcagccttccatcaggcaacctataataaacaaccaatgtatcggaaagccatttacgaggtgctgcaggtggcttcttcccgggcaggtaaactcttccccgtctgccacgatagtgacgagagcgatacagcgaaagccgtggaagtccagaacaagccaatgatcgagtgggctcttgggggattccagccttccggacctaagggcctggagcctcccgaggaggagaaaaacccgtacaaagaagtctacactgacatgtgggttgagccagaggctgccgcttatgcccctccacccccagctaagaaaccaagaaagtctaccgccgagaagcccaaggtcaaagagataatagacgaaagaacaagggagcgactcgtgtacgaggtacgccagaaatgccggaacatcgaagacatctgtatttcgtgcgggagcctgaacgtgactctggagcaccccctttttgtggggggaatgtgtcagaattgcaagaactgtttcttggaatgcgcataccagtatgacgatgatgggtatcagtcgtactgcaccatctgctgtgggggtcgagaggttctcatgtgtggcaacaacaattgttgtcgctgcttttgcgtggagtgtgtggatttactggtggggccaggcgcagcccaagcagctataaaggaggacccctggaactgctatatgtgtggccacaagggcacctatggtctcctcaggaggagagaagattggccttccaggctgcaaatgtttttcgcaaataaccacgatcaggaattcgatccacctaaggtgtatccccctgtgcccgcagagaaaaggaaaccaataagagtcctcagtctctttgacggcattgctactggcttgctggtactaaaggatctgggaattcaagtcgaccggtatattgcctctgaagtttgtgaagattccatcacagtcggcatggtgcgccaccagggaaaaataatgtatgtgggggacgttagatctgtgacccaaaaacacattcaggagtggggtcctttcgatctcgtcatcggagggtcaccctgtaacgacctgagcatagtaaaccccgctaggaagggactctatgagggcacgggacgcttattttttgagttctacagactgttgcacgatgcacggccaaaggagggagacgatcgcccattcttttggcttttcgaaaatgtcgttgcgatgggagtgtcagacaaacgcgatatatctcggtttttggaaagcaacccagtaatgattgatgctaaggaggtatcagctgctcatcgagccagatatttctggggaaatctgcctggaatgaaccggccacttgcctccacagtgaatgacaaactcgaactgcaagagtgcttggaacacggacggattgccaaattttcgaaagtacggactattacaactcgttctaactcaatcaaacagggcaaagatcagcatttcccagtgttcatgaatgagaaagaagacatactctggtgtactgagatggagagggtgttcggttttccagtgcactacactgatgtgtccaatatgtccagactagcacgccagcgcttattgggaaggagttggtccgtcccagtgattaggcatctgttcgcacctctgaaggagtatttcgcatgcgtgtag

SEQ ID NO: 221050 - DNA, 501 bp, synthetic construct
  misc_feature 1..501: note = Description of Artificial Sequence: Synthetic coding sequence
  source 1..501: mol_type = other DNA
atgcctgccatgccttctagtggaccaggggatacaagctcttcggcagccgagcgcgaggaagacagaaaagacggcgaagagcaagaagaaccaagaggcaaggaggaacggcaggagccatccaccaccgccagaaaggttggtagaccaggccgtaaacgtaagcacccacccgtggaatccggcgatacacccaaagatcccgctgtgattagtaagtccccctccatggcacaggactccggagcgagcgagctgttgcccaatggcgacttggaaaagaggtctgagccccaacctgaagaaggatcccctgctggcggacagaagggaggagccccagccgagggggagggagcagccgaaactctgccggaggcctccagggcggtggagaatgggtgctgcacacctaaggagggcaggggcgctcccgctgaagcaggggagtcaagcgctccaggcgcagcttcatcaggccctacatccatcccatag

SEQ ID NO: 221051 - DNA, 2538 bp, synthetic construct
  misc_feature 1..2538: note = Description of Artificial Sequence: Synthetic coding sequence
  source 1..2538: mol_type = other DNA
atggagccaagtccagagccaccttccttggagtctatgaaaggagacacgcggcacctgaatggcgaggaggacgctggtgggagagaggattccatcttggtgaatggcgcttgttcggaccagagctctgacagtcccccaatactggaggccattcgaactcctgagatacgaggaaggaggagttcttcccggctatctaagcgcgaagtctccagcttgctgtcgtacactcaagatctgactggcgatggcgacggagaggatggggatggaagtgatacaccggtcatgccaaagctattccgtgagacccggacccggagcgaatctccggctgttcgcactcgcaacaataactctgtatccagtcgggaacggcacagaccctcccctcggtccacccggggtcggcagggcagaaaccacgtcgacgaaagcccagtcgagtttccagccacacggagcctgagaagaagagcaactgcttccgccggtacaccctggcctagccctccaagctcatacctaacgatagatctaaccgacgacactgaagacacacacggaactccacagtccagttccaccccctacgccagactggctcaggactctcaacaagggggtatggaatccccacaagtcgaagctgattccggcgacggggatagcagtgagtatcaggatgggaaggagtttggcatcggcgatttggtgtggggcaaaattaagggctttagttggtggccagccatggtggtgagttggaaagctaccagcaagcggcaggccatgtccggcatgcgatgggtccagtggtttggcgacggcaaattctccgaggtctccgctgacaaattagtggctcttggcctgtttagccagcacttcaatcttgcgacattcaataaactcgtgtcatacaggaaagcaatgtatcatgcactcgagaaagctcgagtacgtgccggtaagacctttccctcttctcccggtgactcccttgaggaccagcttaagcctatgctggaatgggctcacggcggatttaagccaacggggatcgagggacttaaaccaaataacacacagccagaaaataagacacgcagacgcacagcagatgactcagccacttctgactactgtcctgcaccaaagcgcctcaaaactaattgttacaataacggcaaagatcgcggagacgaggatcagagtcgtgagcagatggcctctgacgtggctaataacaaatccagcctcgaggatgggtgcctcagctgcggacggaagaatcccgtgtcctttcacccactgttcgagggagggctgtgccagacatgccgggacagatttctggagctattttacatgtatgatgacgacggttatcagtcatactgtacggtttgctgtgaaggcagagaactccttctgtgttcaaacacaagttgctgtcgctgtttttgtgtggagtgcctggaggtcctagtggggacagggaccgcagccgaagccaagctccaagagccatggtcttgttatatgtgtctgcctcagcggtgtcatggagtgctccgaaggagaaaggattggaatgtgcggctccaagcgtttttcacatctgacaccggcctggaatatgaggcacctaagctctaccccgcaatacccgcagcaaggcggagacctattcgggttttgagtctttttgacggcatagcaactgggtatttggtccttaaagaactgggcataaaggtcggtaaatacgtagcatccgaggtgtgcgaggaatctattgctgtggggaccgtgaaacacgaggggaatattaagtatgttaacgatgtgaggaacattaccaaaaagaacatcgaagagtggggaccatttgatctcgtaattgggggtagcccttgcaatgatctgtccaacgtgaaccctgcgaggaagggactgtacgaggggactggtaggctatttttcgagttctaccacctgttaaactactcaaggcctaaggagggtgacgacaggccctttttctggatgttcgaaaacgtggtggcaatgaaagttggcgacaagagagacattagccggttcctggagtgcaaccctgttatgatcgatgcgataaaagtctccgcggcacacagggcccgttacttttggggcaacctccctggaatgaatcgccctgttatagcctccaagaacgacaagctcgagctgcaggactgcctggaatataacagaattgcaaagctgaaaaaggtccagacaattactacaaagtcaaactctatcaagcagggcaaaaaccagctgtttccggtggtgatgaatgggaaagaagatgtactctggtgtacagaactggagcggatctttggctttccagtgcactacacagatgtgtcaaacatgggacgcggtgctcgtcaaaaactgctgggcagatcttggtcagttcccgtgatccggcacctgttcgcacccctcaaggattactttgcatgtgagtag

SEQ ID NO: 221052 - DNA, 2562 bp, synthetic construct
  misc_feature 1..2562: note = Description of Artificial Sequence: Synthetic coding sequence
  source 1..2562: mol_type = other DNA
atgaaaggtgatacccgtcatctgaatggcgaagaagacgccggaggacgtgaggattcaatactcgtcaatggggcttgctcagatcagagctccgattctccacccatcctagaggcgatacgcacacccgaaattcgcggacgcaggagctccagtcggttaagcaagcgcgaggttagtagcctgttatcttatacccaggatttgacgggcgacggcgacggtgaagacggtgatggaagcgatactcccgtcatgcctaagctgtttcgggaaacaaggaccagatcagaatcccctgcggtgcgaactcgtaataataacagcgtttctagccgagaacggcaccggcctagcccacgaagtacccgcggaaggcagggccgaaaccatgtggatgagtccccggtcgaattccctgctactcgatcactcagacgtagagcaaccgccagcgccggtaccccatggccgtcaccgccttcatcttacctgactatcgatctgaccgacgacacggaggacacacacggtaccccgcagtcaagcagcaccccctacgctcgactcgcccaggacagccagcagggtgggatggaatccccccaagtcgaagcagatagcggagacggtgatagcagcgaataccaagacggaaaggaattcggcatcggtgacctagtgtggggcaaaatcaaaggtttttcgtggtggcctgctatggtagtctcttggaaggcaacctcgaagcgtcaggcgatgagtggaatgagatgggtgcagtggttcggcgacggcaagttttccgaggtgtctgccgataagttagtcgctctgggacttttttcccaacattttaatctcgccacattcaacaaattggtgagttatcgtaaagcaatgtatcatgctctcgagaaggccagagttcgggcaggcaaaacatttccgagttctcccggagatagtcttgaagatcagttaaagcctatgcttgagtgggcccacggcggtttcaagcctaccggtatcgaaggcctgaaaccaaacaacacccagccagttgtgaataaatccaaggtccgaagagccggatcgcggaagttggagtccagaaaatacgagaataagacaagaagacggactgccgacgactctgctacaagcgactattgtcccgctcccaagcggttgaagactaattgctataacaatggaaaggacaggggcgacgaagaccagagtagagaacagatggccagcgacgtggcaaacaataagagttcgctcgaggatggctgcctcagctgtggtaggaagaaccccgtctcctttcatcccttgtttgagggaggtctatgtcagacatgcagggacaggttcctagagctcttttatatgtacgacgatgacggctatcagagctactgtacagtgtgctgcgaggggagagaactactgctgtgtagtaatacctcatgttgtcgctgcttctgtgtggaatgcctggaagtactggtgggtacaggcaccgcggcagaggctaagctccaggaaccatggtcttgctacatgtgcctgccacagcggtgtcacggagtgctacgtcggaggaaggactggaatgtcaggctgcaggcatttttcacctctgacacggggcttgagtacgaggcgcctaaattgtacccagccattcctgccgcaagaagacgtcccataagggtcttatccttgtttgacgggatcgcaactggatatttagtcttgaaggagctgggaattaaagttggcaagtatgtggcctcggaggtgtgtgaggaaagcattgccgtgggtaccgttaaacacgagggcaatatcaaatatgtcaatgatgtgaggaacattactaaaaaaaatatcgaagaatgggggccattcgatttggtgattggcggatctccttgtaatgacctgagtaacgtaaacccagcgaggaagggactgtacgaaggcacagggagactcttttttgaattttaccatttgttaaactacagtcgtccaaaggagggggatgatcgccctttcttctggatgttcgaaaatgtggttgcgatgaaggtgggagataaacgcgacattagccgtttcttggagtgtaatccagttatgattgacgcgatcaaagtctctgccgctcacagagccagatatttctggggtaacctcccagggatgaatcgccctgttattgcctccaaaaacgataagttggaactacaagattgtctcgagtataaccgaattgcgaagttaaagaaggtccaaaccattaccaccaaatctaactcgattaaacaaggtaaaaaccaactgttcccggtggttatgaacggcaaagaagacgtcctgtggtgtacagagttagaacgtatttttggcttcccagtccactatacggacgtttcaaacatgggccgtggcgcaaggcaaaaactgttgggccgaagttggtctgtcccagtgataaggcacctttttgccccactcaaggactacttcgcatgcgagtag

SEQ ID NO: 221053 - DNA, 2379 bp, synthetic construct
  misc_feature 1..2379: note = Description of Artificial Sequence: Synthetic coding sequence
  source 1..2379: mol_type = other DNA
atgaagggggacactagacacctgaacggcgaagaggatgccggaggcagagaggacagcatcctggtaaatggtgcctgctccgaccagagctccgacagccccccaatactcgaggccatcagaacccccgagattcgaggaaggaggtcgagctctcgcctgtcaaagagggaggtttccagcttactatcttacacacaggaccttacaggagacggggacggcgaggacggggatggatctgacacacctgttatgcctaaactcttcagggagacaagaacgcgctctgaaagcccggcagttagaaccagaaacaacaactctgtgtcttccagggaacgccatcgccctagtcccaggtccacacggggaagacagggcaggaaccacgtagacgagtcacccgtggagtttccagccactcgaagtctccggagaagagccactgcctccgcaggtaccccttggcctagtccacctagcagctatctgaccatcgatttgactgacgacacggaagatacccacggcacaccccaatcctccagcacaccttatgcccgactagctcaagactcccagcaaggcggaatggaatcccctcaggttgaggcggactctggcgatggtgacagctctgaatatcaggatgggaaagagtttggaattggcgatttggtctggggaaaaataaagggcttttcttggtggcccgctatggttgtctcttggaaggcaacttccaaaaggcaggccatgagtggaatgagatgggtccagtggttcggggacgggaaattctcagaagtgagtgcagacaagttggtcgccttaggcctcttcagtcaacattttaaccttgcgacttttaataagcttgtgtcataccgaaaggccatgtatcatgctctggagaaggcgcgagttcgagcaggaaagacattcccctcttcacccggtgatagcctggaagatcaacttaaacccatgctggagtgggctcatggtggttttaaaccgactggaatagagggactcaagccaaacaatacccagcctgaaaataagaccaggcgtcgcacagccgatgatagcgccacatctgactactgtcctgctccaaaacggttgaaaactaactgttataataatggaaaagataggggcgatgaagatcagtcccgagagcagatggctagcgacgtcgctaacaacaaatcctccttagaagatggatgcttgagctgtggtagaaagaacccagtgtcgtttcatcccttattcgaggggggtctgtgtcaaacatgcagagataggttcttagaactcttctatatgtatgacgatgacggataccaaagctattgcacagtatgttgtgagggacgtgagttattgctgtgttccaacacctcatgttgtcggtgtttttgtgtagaatgccttgaagtgctggtcggtactgggaccgctgctgaggctaaactgcaggagccatggtcttgctacatgtgcttgccacagagatgtcatggtgtgttgcggagaaggaaggattggaatgttagactgcaagctttctttacaagtgacactggtcttgagtatgaggctcccaagctctacccagcaatacctgcagccagacggcgacctatccgagtgctctcactgtttgacgggatagccaccggatacctggttctcaaggagctgggcattaaggtgggaaaatacgtcgcgtctgaagtatgtgaagagagtatagctgtggggaccgtgaagcatgaaggcaatataaagtatgtgaacgacgttaggaacataactaagaagaacatcgaggagtgggggccttttgacctcgtaatcgggggttccccgtgcaacgatctctccaacgtgaaccctgctagaaagggcctgtacgaaggcacggggcgattgttctttgagttttatcatctactgaattactcccgacccaaagaaggtgacgacagaccatttttctggatgttcgagaatgtagtggcaatgaaagtgggagataagcgagacatatctaggtttttagagtgcaacccagtgatgatcgacgcaatcaaggtctctgcagcccaccgcgctaggtacttttgggggaacctccctggtatgaatagaccagttattgcttccaagaacgacaagctggaacttcaggattgcctagagtataaccgcattgctaaagacttgtggttgtcatgcgcacttcatcgccgagtacagcacggtccttggtgtccccctgaggctgcaggcaaggtcctggaaagagcatgccacccaacccctctgcgccctagcgagggattactttgcatgtag

SEQ ID NO: 221054 - DNA, 2313 bp, synthetic construct
  misc_feature 1..2313: note = Description of Artificial Sequence: Synthetic coding sequence
  source 1..2313: mol_type = other DNA
atgaagggcgacacccggcatctgaacggcgaggaggacgcagggggacgggaagattccattctagtaaatggggcttgctcagatcagagctctgacagtccccctatcttggaggcaattcgaacccccgaaattcgcggacgccgatcctccagccgattgagtaagagagaggtgagctcactgctgtcctacacccaagatttgaccggagatggtgacggcgaagacggcgatggctcagacactccagttatgcccaagcttttccgagaaacccgaacgcgatcggaaagtcctgccgtgcgaaccagaaacaacaattccgtctcatcccgagagcggcacaggcccagccccagaagcacaaggggcaggcagggcaggaatcacgtggacgagtcacccgtggaatttccggcaacgagatccctacgcagaagggccacggcatcagccggaacaccttggccatccccccctagcagttatctgaccattgatcttactgacgataccgaagacacacatggaactccgcagtccagtagcactccatatgccagacttgctcaagatagtcaacaagggggaatggaatcccctcaggtcgaggctgacagtggtgatggggactcaagtgagtaccaggacggcaaagaattcggaattggggacctagtctggggcaagatcaagggcttctcttggtggccagctatggtggtctcatggaaggcgacatccaagcgtcaagccatgagcggtatgaggtgggtccagtggttcggggacggaaaatttagcgaggtctcagcagacaagttggtggcactgggcctgttctcccagcactttaatctggccacatttaataagctggtgtcctatcgaaaagctatgtaccacgcactggagaaagcaagagttagagcaggcaaaacattcccttcctcgcccggagatagcctcgaagaccagctgaaacctatgctggaatgggctcatggcggtttcaagcccaccggtatcgaggggctcaaacccaacaatacacagccagagaacaaaaccaggcgaagaactgccgatgactccgctacatctgactattgtcccgcacccaagcgattgaaaactaactgttacaataacggcaaagaccgaggagatgaagatcagtctcgggaacagatggcctccgacgtggctaataacaaaagttctctcgaagacggttgccttagctgcggaagaaaaaaccctgtttcatttcacccactgttcgaaggaggcctgtgccagacctgccgcgataggttcctagaattgttttatatgtacgatgatgacggctatcagtcttactgcactgtctgttgcgagggtcgcgagctgctgctttgtagtaatacatcttgctgccgctgcttttgcgttgagtgcctagaggtgctggtgggcaccggtacagctgccgaggctaagttacaggaaccatggtcttgctatatgtgtctgccccaacggtgtcatggcgtcttacgacgcaggaaggactggaacgtgcgactgcaagctttttttactagtgacacaggactggaatacgaggcaccaaagctttacccggctattcccgcagccagaaggcggcctattcgggtgctgtcactttttgatggaattgcaactggctatctggtgctgaaagaactcggcattaaggttggaaagtatgtggcctcagaagtttgcgaagagagcatcgccgtcggtacagttaagcatgagggcaacattaaatatgtcaatgacgtgaggaatatcaccaagaagaacattgaggaatgggggccattcgacctggtaattggcggatcaccttgcaacgacctcagtaatgtaaacccggcacgcaaaggactctatgagggtaccggcaggcttttcttcgagttctaccacctgctcaactactcgaggcccaaggaaggagacgatcggccatttttctggatgttcgagaacgttgttgcaatgaaggtgggagataaacgcgatatttctcgattcctcgaatgcaatcctgtgatgattgatgccatcaaagtctctgccgctcatagagcccgatatttttggggaaatctgcccggtatgaacagaatttttggtttccctgtgcactatacagacgtttccaacatgggcagaggagcccgacagaaactcctgggacgaagctggagcgttcccgtgattcgccacctgtttgctccactcaaggactattttgcctgtgaatag

SEQ ID NO: 221055 - DNA, 2502 bp, synthetic construct
  misc_feature 1..2502: note = Description of Artificial Sequence: Synthetic coding sequence
  source 1..2502: mol_type = other DNA
atgaagggtgatactagacacttaaacggggaggaggatgccggtggtcgcgaggacagcattcttgtgaacggggcatgttctgatcagtcatcagatagcccgcctatcctagaggctattaggacacccgaaattcgtggccgtcggtcctcttctagattatctaagcgtgaggtgtcaagcttgcttagttatacacaggatctgaccggtgatggcgatggggaagacggcgatggatccgacactccggtcatgccaaagctattccgagaaaccagaaccaggagcgagagtcccgcagtgcgaactcggaataacaattccgtttcttcgcgcgagaggcaccgtccatcacccaggtcgacaaggggtcggcaagggcgaaaccacgtggacgaatccccagtcgagtttcctgccaccagatcactgagacggagggctaccgcatccgctggcactccctggcctagtccaccgtcctcctacctgacaatagacctgacagatgacaccgaagacacccacggcacacctcagagctcgtcgacgccctatgcacgcctggcgcaggactctcagcaaggtgggatggagtcacctcaggttgaggccgatagtggagacggagactctagtgaataccaggatgggaaggagttcggcattggcgacctggtttggggcaagatcaagggtttctcttggtggcccgctatggtagtgagctggaaagccacgagcaaaagacaggccatgtcaggaatgcgctgggttcagtggttcggtgacggtaagttcagtgaagtttcagcagataagttggtggctctgggtcttttcagccaacattttaacctggctacatttaacaaacttgtttcttacagaaaagccatgtatcacgctctagagaaggcccgtgttcgcgctggtaaaacatttccttcgtcaccaggtgactctctggaggaccaacttaaaccaatgctcgagtgggctcatggtggcttcaagccgaccggaatcgagggcctcaaaccgaataacacccagcctgagaacaaaacaaggaggcgcactgcagacgacagcgcaactagtgactattgcccggcaccaaaaaggctcaagacaaattgttacaataatggcaaggaccgaggcgatgaggatcagagcagagagcagatggctagtgacgttgctaataataaaagttccttagaagatggatgtctgtcttgtggccgaaaaaatcccgtctccttccacccattatttgagggtggtctatgtcagacttgtcgcgatcgtttcctagagctgttttatatgtatgacgatgatggataccagtcgtactgcaccgtgtgttgcgaagggcgtgaactcttgttatgttccaatacctcctgttgtcgttgcttctgcgtggagtgcctcgaagtccttgtggggaccggcacagcagcagaagcgaagctgcaggaaccatggtcatgctacatgtgcttgccccagcgttgtcacggagtgctgcgcagaagaaaagattggaatgtgcggcttcaggcctttttcacaagtgatactgggcttgagtacgaggctccaaagttgtatccggctatccccgctgcaaggcgcagaccaattagagtgctatcgctgttcgacggcatagccactggctatctggttctgaaagaactgggtattaaggtgggaaagtatgtagcaagcgaggtgtgtgaggaatcaatagcagtgggtaccgtgaaacacgagggtaatattaagtatgtcaatgacgtcaggaatataacaaagaagaacatcgaagagtggggtccattcgatctagtgatcggaggaagtccttgcaatgatctcagtaacgtaaatcccgcaagaaaagggctgtacgagggcacgggcaggctgttcttcgaattctatcatcttctgaattactccaggcccaaagagggtgatgaccgccctttcttctggatgtttgagaacgtggtcgctatgaaggtgggtgataagcgcgatatctccagattcttagagtgcaatcctgttatgatcgacgcaatcaaggtttctgccgcacatagagccagatatttctggggtaatctccctggaatgaatcgccctgtaattgctagtaagaatgataagctcgaactgcaggactgtctggagtataacaggatagcaaagcttaagaaggtccagacaattacaaccaaatcaaacagcatcaagcaaggtaagaaccagctgtttccagtcgtcatgaatggtaaggaagatgttctctggtgcacagaattggaacgtatatttgggttcccagtgcactacacagacgtctcgaacatgggaaggggcgcaaggcagaagctgctggggagaagctggtcagtcccagttatccgtcacctgttcgcgcctttgaaagactattttgcatgcgaatag

SEQ ID NO: 221056 - DNA, 999 bp, synthetic construct
  misc_feature 1..999: note = Description of Artificial Sequence: Synthetic coding sequence
  source 1..999: mol_type = other DNA
atgaagggagatacacgacacttgaacggcgaagaggacgcagggggacgcgaggacagtatactggtcaatggcgcatgtagcgaccagagcagcgattcacccccaattctggaggccatccggactcctgaaatcagagggcgtcggtcctcttctcgactctccaaaagggaagtcagctccctgctatcctacacgcaggatctgacaggcgatggggacggagaggatggagatggcagcgatactccggttatgcccaaactattccgcgaaacaagaacacgctctgaatcaccagcaagtcttcgtcgcagggccactgcaagtgctggaacaccctggcccagtcccccttcttcctacttaactatcgacctgacagacgatacagaggacacgcacggcacaccccagagcagttcaacgccatatgctcgcttggcacaagatagtcagcaagggggtatggagagcccccaggtcgaagctgactccggcgatggtgattccagtgaataccaggacggcaaagagttcggtattggcgatctcgtgtggggaaaaataaagggcttttcttggtggcccgctatggttgtgtcttggaaagccacgtccaagcggcaggccatgagcggcatgagatgggtccagtggtttggggacggcaaattctctgaagtgtctgctgataagttggtggctctgggcctgttttcccagcacttcaatctggcaacttttaacaagctggtgagttatcgcaaagcaatgtaccacgctttggaaagaacaagactagaagacgcgcagttgaccacccaaccacccctcaccacagcccctcatccaagcgcctctaggcagatcgctatcacaacagccaaaaccgagggcatgaaaattagagcagagaacaaatggctgcagatgctacccaccacccgggcagcttggaaggagaagccacgagttctcccccctagcctatag

SEQ ID NO: 221057 - DNA, 2187 bp, synthetic construct
  misc_feature 1..2187: note = Description of Artificial Sequence: Synthetic coding sequence
  source 1..2187: mol_type = other DNA
atgaagggcgatacaagacacctgaacggagaagaggacgcaggcggacgggaagacagtattcttgtgaatggcgcatgctccgaccagtcctcggatagcccgcctattctggaggccattaggacgcccgaaattcgaggacgacgatcttcgtcccggttgagcaagcgggaggtgagttctttgctgtcttacacccaggatcttaccggggacggcgacggagaagatggcgacggatccgacacaccagtgatgcctaaactgtttcgcgagacacgcactcgctccgaatctcccgcaagcctgagacgcagagcaacagcctctgccggaacaccctggccatcacctcccagttcctatttgacaatcgacctgaccgacgacacagaggatacccacggaacccctcagagctccagtacaccatacgcaagactggcgcaagacagccagcaaggcggaatggaatccccgcaggtggaagctgattctggagatggcgactcatcagaataccaggacggaaaagaatttggtatcggagacctcgtttggggaaagattaaaggtttctcatggtggccagctatggttgtaagctggaaagccacgtcaaaacgtcaggcaatgtctggaatgagatgggtccagtggttcggcgatgggaagttctccgaagttagtgccgacaagctggtggcactgggactctttagccaacacttcaatcttgctaccttcaataagctagtatcgtataggaaggcgatgtatcacgccctagaaaaagctcgggtgcgcgctggtaagactttcccaagctcgccaggagactctctcgaagatcagctaaagcctatgctggagtgggcacacggaggttttaagcctactggcatcgagggactgaagcctaataatactcagcccgaaaacaaaacacggagacgcaccgcagacgactctgccacatccgactactgccccgctccaaagagattgaaaactaattgctataataacggcaaagacaggggagacgaagaccagagccgggagcagatggccagtgacgtggccaacaacaagtcttctttggaggatggatgtctgagctgcggcagaaagaaccccgtctcattccaccccttgtttgagggcggactgtgccagacttgtagggacagattcctggagctgttctatatgtatgacgatgatggatatcaaagttattgcaccgtgtgttgcgaaggccgagaactgttgctctgcagtaacaccagctgttgcaggtgcttctgcgtggaatgccttgaggtgctggtgggcacaggcaccgcagctgaggctaagctgcaggaaccctggagttgttatatgtgtctgccacagcggtgtcacggagtgctgaggcgccgaaaagactggaatgtgcggctccaggcgttcttcacctccgacactggactggaatatgaagctccaaagctctaccctgctataccagctgcaaggcggagaccgatccgggtcctgagcctttttgacgggatagccaccggttatctggtactgaaggaacttggaataaaggtcggtaaatatgtggccagtgaagtctgcgaggaatccattgctgtgggcacggtaaagcatgagggaaacattaagtatgtcaatgacgtacgaaatatcacaaaaaaaaacatcgaagaatgggggccattcgacttagtgatcggagggtctccctgtaacgacctgtcgaatgttaaccccgctcggaaaggtctgtatgaaggaaccgggcgactgttcttcgagttttaccacctgctcaactacagcaggcctaaagaaggagacgaccggccattcttctggatgttcgaaaacgtagtggccatgaaggtgggcgacaaacgggatatctctagatttttagagtgtaaccctgttatgatcgatgcaatcaaagtctcagccgctcatcgcgctaggtatttttggggaaatctgccaggaatgaatcggatttttggattccccgttcactatacggacgtgtccaatatgggccgaggggctcgtcagaagctgctgggcaggtcttggtccgtacctgtaatccgccacctcttcgctcctttgaaagattactttgcctgcgaatag

SEQ ID NO: 221058 - DNA, 2085 bp, synthetic construct
  misc_feature 1..2085: note = Description of Artificial Sequence: Synthetic coding sequence
  source 1..2085: mol_type = other DNA
atgaaaggtgatacccgccatttaaacggggaagaagatgcgggaggcagggaagattccatcctggtaaatggggcttgctccgaccaatcctccgactcacctccgattctcgaggccataaggactcctgagatcaggggccgacgctcctccagtcgcttgtcgaagagagaagtttcttcactcctgtcatacacgcaatccctgcgaagacgcgctaccgctagtgctggtaccccctggccatctccgccaagctcttatctgaccatcgaccttacagacgacacggaggacacccacggaaccccccaatcctcttccactccctacgccaggctggcccaggatagccagcagggcggtatggagagcccccaggtcgaggccgactcaggagacggagatagcagcgagtaccaggatggaaaagagttcggtatcggggatttggtttggggtaagattaaaggcttcagttggtggcctgcaatggtggtgtcatggaaagctacgtccaagagacaggcgatgtccggaatgaggtgggttcagtggttcggagacgggaagttctccgaggtctccgctgataaacttgtggcgcttggcctgtttagccagcacttcaatctcgcaactttcaacaaattagtgagctaccgcaaggcaatgtaccacgcgctggagaaggccagggtgcgtgctggcaagaccttccccagctcacctggcgacagcctagaggaccaactaaaacctatgctggaatgggcgcacgggggttttaaacccacagggatcgaagggcttaagcccaacaacacccaaccggaaaacaagacccgacggaggaccgcagacgatagcgcaacgagcgactattgccctgccccaaagcgcctcaaaacaaattgctacaacaatgggaaagaccgtggggacgaggaccagagtagagagcagatggccagcgatgtagcaaataataagtccagtctggaggacgggtgcctgtcctgcggtcgcaagaacccggtttcctttcaccccctctttgagggcggattatgccagacttgtcgagatcgattcttggaactcttttacatgtacgacgacgacgggtatcagtcttattgcactgtgtgctgtgagggcagagaactacttctgtgcagcaacacttcatgttgcaggtgcttctgcgtggagtgtttagaagtgctggttggtaccggcacagctgccgaagctaagctgcaagaaccttggtcctgctatatgtgcctgcctcagcgctgtcacggggtgctgcggaggaggaaagattggaacgtcagattgcaggctttttttacctccgatactggattagagtacgaggcgccaaagctataccctgcgatacctgccgctaggaggagacccatcagggttctcagcctcttcgacgggattgcaacagggtacctggtcttgaaagaactgggaatcaaggttggcaaatatgtggcaagcgaggtttgcgaggaaagcattgccgtggggacagtgaaacatgagggaaacattaaatatgtgaatgatgtacgcaacatcacgaagaagaacatcgaggagtgggggccatttgacttggtaatcggcggaagcccatgtaacgacctgtctaacgtgaaccctgctaggaaagggctgtatgaagggaccggccgtctgttctttgagttttatcatttactgaactactcacgaccaaaggagggagatgacagaccatttttttggatgtttgaaaatgtggtggctatgaaggtgggcgataagcgggacatatcccggttcctggaatgcaatcccgtaatgatcgatgccatcaaggttagtgccgctcaccgggctcgctacttttggggcaacctcccaggaatgaatcgcatcttcgggtttccggttcattacacagatgtgtctaatatgggccgtggtgcacgtcagaaactgctggggagatcatggagtgttcctgtaatcagacatctgtttgcccctctgaaagactactttgcctgcgaatag

SEQ ID NO: 221059 - DNA, 1701 bp, synthetic construct
  misc_feature 1..1701: note = Description of Artificial Sequence: Synthetic coding sequence
  source 1..1701: mol_type = other DNA
gggcgtagtccacggggtcggtctgaacgcccacccaccgatggcaccggctcactcgctgtgggtcgtgcaggcggtaacgccgctaggcccgcagccctcgggctctctggcccatcaaagccgagtagcgcgatcggagccggagatagccgggcacaaagaccagcacgccctccagccggactgccccctgcgtctccagacccccgactgagacgccctgccgctccccaaccagcactacggcaagagagtatgaaaggtgatacccggcacttaaatggagaggaggacgctggcggaagggaggactctatattagtcaacggggcttgcagcgaccagagcagtgattccccccctattctggaagctatccgaacacccgagatccgcggacggcgaagctcaagcagactgtccaagcgggaggtctcatccctgctgtcctatacacaggacctgacaggcgacggggacggggaggacggcgatggctccgacactccagtgatgcccaagctgttccgtgagacccgcactcggagtgagtcacctgccgttcgaacgcgcaacaacaatagcgtgtcttcccgcgagagacataggcccagccctagatctacacgagggcgacaagggaggaatcacgtagacgagagtcctgtggagtttcccgctacacgctcactccgtaggagagccaccgcctccgctggtaccccttggccctcgccaccatcctcctacctcactattgatctgaccgacgacactgaagacacgcacggaacaccacaatcaagcagcactccatacgcacgcctggcccaggatagccaacagggaggtatggaatccccacaggttgaggccgattccggagacggggactcatcggaatatcaagacggtaaggagtttgggatcggggatctggtgtgggggaaaatcaagggttttagctggtggcccgcaatggtggtgtcttggaaggccacatccaagagacaggccatgtcaggaatgagatgggttcagtggtttggggatggcaagtttagtgaagtatccgcggacaagttagtggccttgggcctgttctcacagcattttaacttggcaacattcaacaagctcgtgtcatatcggaaagctatgtaccatgctctcgaaaaagccagagttagggcaggtaagaccttcccctccagtccaggcgactctctggaggatcagctcaagccaatgctggaatgggctcatggcggattcaagccaacaggtattgagggcctaaagccgaacaatactcagccagaaaacaaaacccgccgtcgtacagctgacgactcagccaccagtgattattgtcccgctccaaagagattgaagactaactgttacaataacggtaaagatagaggcgacgaggatcagtcacgggaacagatggcttccgatgtcgccaacaataagagctccctggaggacgggtgcctcagctgtggacgtaaaaacccagtatcttttcatcctttgttcgaggggggactgtgccagacatgtaggcacctgtgtggtgactctgtgaagcccacccacccatcttgcctggcgctgtgcctatggggacgaatgggcgacagttgtcatagggggcagtggcacgccggacacagccagctcagtttctag

SEQ ID NO: 221060 - DNA, 1164 bp, synthetic construct
  misc_feature 1..1164: note = Description of Artificial Sequence: Synthetic coding sequence
  source 1..1164: mol_type = other DNA
atggcggcaatcccagcactggatccagaagctgaaccttcaatggatgtgattttggtcggatcatcagaactatcctcaagcgtatccccaggtacgggacgagacctcattgcttatgaagtaaaggcaaatcagcgcaacatagaagacatttgtatttgttgcgggtcacttcaggtgcacacacagcaccctctgtttgaagggggtatctgcgctccatgtaaggacaagtttctggatgctctgtttctgtatgatgacgacggttatcagagttattgttccatctgttgttccggggagaccctgctcatatgtggaaaccctgattgcactaggtgttattgtttcgaatgtgttgacagcctggttggtccaggaaccagtgggaaagttcatgcaatgagtaactgggtatgttatctgtgcctgccctcttcacggtctggcctgctccagcgtaggcgaaaatggcgctctcagctgaaagcattctacgaccgagagagcgaaaaccccctggagatgttcgagactgtaccggtatggagacggcagcccgtgcgcgtcctgagtctttttgaggacatcaaaaaggagctgacatcactcggattcctagagtcaggctcagatcctggtcaacttaaacacgtggtcgatgttaccgataccgtgcgcaaagacgtggaagagtgggggccttttgatttggtgtacggtgctacccctcctttagggcatacttgcgatcgccctccgtcctggtacttgttccagtttcaccgtttactgcagtatgcaaggccaaaacccggtagcccccgaccattcttttggatgttcgtcgacaatcttgtcctgaacaaagaggatctcgatgtcgcgagcaggtttttagagatggaaccggtgaccattccagacgtccatggcggtagcttacagaatgcagtccgggtgtggtccaatatcccagccatccgttcctcacggcattgggccctggtaagtgaggaggaactctcccttctcgcacagaataaacagtcctccaaattagccgctaagtggcccacgaaactggtcaagaattgcttcctgcctcttagagagtacttcaagtatttctccaccgagcttacctcttcattatag

SEQ ID NO: 221061 - DNA, 1161 bp, synthetic construct
  misc_feature 1..1161: note = Description of Artificial Sequence: Synthetic coding sequence
  source 1..1161: mol_type = other DNA
atggctgctattcccgcattagaccctgaggcagagccgtctatggatgtgattctggtgggttcgtccgagctgagcagtagcgttagcccaggaacaggacgcgacctgatagcttacgaagttaaggccaatcaacgaaacatcgaggatatctgcatctgttgtggatcacttcaggtccatactcaacacccactgttcgaaggaggcatctgtgcaccgtgtaaagataagtttcttgatgccctgtttctttacgacgacgacggttatcagagctattgtagtatctgctgtagtggagagaccctgctgatttgtggaaaccccgattgcaccagatgttactgcttcgagtgtgtggactctctggtaggcccaggcacttccggcaaggtgcatgccatgtccaactgggtctgttacttgtgcctgccgtcctctcgctctggtctccttcagaggaggcggaaatggcgcagccagctgaaggcgttttacgacagggagtccgaaaaccctcttgagatgttcgagaccgtgccagtctggcgcaggcagcccgtgcgggtacttagcctgtttgaagacatcaagaaggaactgacttcacttggctttctggagagcggatccgaccctggacaactgaagcacgtcgtagatgtgaccgacaccgtgagaaaggatgtcgaagaatggggacctttcgacctggtctacggagccaccccacctctggggcacacctgcgacaggcctccctcctggtatctgttccagttccataggctgctgcaatacgctagaccgaagcctggttcccccaggcccttcttctggatgtttgtcgataatttggttctgaataaagaggatctggacgtagcatcacgcttcttagagatggagcctgtgacgatacctgacgtgcacgggggttccttgcagaatgccgtccgcgtgtggagcaacatcccggcaatccgctcccgtcactgggctctcgtatctgaggaagaacttagccttcttgcccagaataaacagtccagtaagcttgcggctaagtggccaacaaagctggtgaaaaactgctttctccctcttcgggagtactttaagtacttttctaccgagctgacttcttctctgtag

SEQ ID NO: 221062 - DNA, 3123 bp, synthetic construct
  misc_feature 1..3123: note = Description of Artificial Sequence: Synthetic coding sequence
  source 1..3123: mol_type = other DNA
atgttagaggacatcagtgaagaggatatttgggagtacaagtcaaagagaaagccaaaacgtgtagaccctaataatggtagcaagaatattctaaagtcagttgagaaggcaacagacggcaagtatcaatcaaaacgcagtcggaaccggaaacgggcagctgaagctaaagaagtaaaggatcacgaggtgcccctaggcaatgccggttgtcagacctcagtcgccagcagtcaaaactcctcatgcggggatggcatccagcagacccaagataaagaaaccactccagggaagctatgccggacccagaaatctcagcacgtttctcccaaaatccgccctgtttacgatgggtactgtcccaactgtcaaatgccattttcttccctcattggccagaccccccgttggcatgtttttgagtgccttgattctccgcctcgctcagaaaccgaatgtcctgacggtttgctgtgtacttccacaattccatttcactataaacgttacactcactttctcttagcacagtcccgagctggcgaccaccccttttcttctcccagcccggcaagcggcggaagcttcagcgaaacgaaatcaggggtgttgtgtagcctggaggaaaggtggtcttcctaccagaaccagacagataatagtgtctctaatgatcccctgctgatgacccagtacttcaagaaatctccttccctgaccgaggcctccgagaaaataagcacccacattcaaacgagccagcaggccctgcagttcaccgatttcgtcgaaaatgataaactggtaggcgttgccctgaggcttgcaaataatagcgaacacattaatctccccttgccagaaaacgatttttccgactgtgaaatttcctactccccattgcagtctgacgaagatacccacgacattgatgagaagccagacgactctcaagagcagctgttttttacagagtcatcaaaagacggtagcctggaagaggatgacgattcctgtgggtttttcaagaagagacatggtccactgttgaaggaccaggatgagtcttgtccaaaagttaactcttttctgactcgcgataagtatgatgagggactatacagattcaattccctcaatgatctatcccagcctatttctcagaataatgagtcaactttgccgtacgatttggcctgtaccggaggcgatttcgtgctttttcccccagcactagcaggaaaacttgccgcaagcgtgcaccaagcaaccaaggctaaacctgatgagcccgaattccatagtgcgcagagtaataagcagaaacaggttattgaggaatccagtgtctataaccaggtttccctcccactggtgaagtctctgatgcttaagccatttgaatcccaggtcgagggatatctctcttcacagcccacccagaatacaattaggaagctgtcatccgagaaccttaatgccaaaaacaatactaattcggcatgcttctgcagaaaagccctggagggcgtgccggtgggaaaggccactatcttaaatactgagaaccttagctctacgcccgctccgaagtaccttaaaatcctgcccagcggtctcaagtataacgcccgtcacccttccaccaaggtcatgaagcagatggatataggcgtatactttggactgccccctaagaggaaagaggagaagctgctcggtgaaagcgcactggaaggaatcaatctcaaccccgtgccctcccccaatcagaagcgcagcagccagtgtaagaggaaggcagagaagtcactctcagacctcgaattcgatgcctctaccctgcatgagagtcagctctcagtggagctttcaagtgagcgttctcaacgtcaaaaaaagcggtgcagaaaatctaactccctgcaggaaggcgcttgtcagaaaaggtcagaccatctgataaacacagaaagcgaagcagtcaatctcagtaaggtgaaagtgttcacaaagtctgcacacggcggactccagagaggaaataagaaaatccctgaaagcagcaacgttggcggatccagaaagaaaacctgcccgttttacaagaagattccaggcacagggttcactgtggacgccttccagtatggcgtcgtagaaggatgcacggcttactttcttacccacttccattctgaccactacgccggtctctcaaaacactttacgtttccagtgtactgcagcgaaatcactggtaatctgctcaagaataaacttcacgtgcaggagcaatacatccaccctcttccacttgacacagaatgcatcgtaaacggtgtgaaggttgttctgcttgacgctaatcattgtcctggcgcagtcatgatactgttttaccttcccaatggcacagtaatcctgcacactggagactttcgggcagacccctccatggagaggtcactccttgcagaccaaaaagttcacatgctgtatttggacaccacgtattgctcccccgagtacacctttccatctcaacaggaggtcattagattcgcaatcaacactgctttcgaagccgtcacactcaatcctcacgccctagtagtttgtggtacgtattccatcgggaaggagaaggtgtttcttgccattgcagacgtcctaggatccaaggtgggtatgtctcaggagaagtacaaaaccttgcaatgtctcaacattcccgaaattaacagcctcatcactactgatatgtgcagctcactagtgcacttgttgcctatgatgcagattaatttcaaaggactgcagtcacatcttaagaagtgcggcggaaagtataaccagatcctcgcatttcgccctaccgggtggactcactctaataaatttactagaatagcagacgtgatccctcagacaaagggcaacatttctatctacggcatcccttattctgaacacagctcttacttggagatgaagcgcttcgtgcagtggctgaaacctcaaaagattataccaactgtgaatgttggcacgtggaaatctcgctcgacaatggaaaaatattttcgggaatggaagctagaggcagggtactag

SEQ ID NO: 221063 - DNA, 3123 bp, synthetic construct
  misc_feature 1..3123: note = Description of Artificial Sequence: Synthetic coding sequence
  source 1..3123: mol_type = other DNA
atgctagaggacatttccgaagaagatatatgggagtataaatccaaacgaaagcctaaaagggtggatcctaataatggcagcaaaaacattttgaagtcggtagagaaagctaccgatggaaagtaccagtcaaaacgatccagaaaccgcaagagggctgcggaagccaaagaagtgaaagatcacgaggttccgctcgggaatgccggatgtcagacgagtgtcgcgtcttctcaaaacagctcttgcggcgatggaatccaacagacgcaggacaaagaaactactccgggaaagttatgtcgcacacagaaaagccagcacgtgtcgccaaaaattagacccgtctacgatggttattgtccgaactgtcaaatgccatttagcagcttgattggccagactccgaggtggcacgtgttcgagtgcctggacagccctccgcgaagtgaaactgagtgccctgatggactactgtgcaccagcacaattcctttccactacaaacgttacacacactttttacttgcccagagcagagcaggggaccaccccttttctagtccatcacccgctagcggagggtcattttccgagaccaagagcggtgtcctctgttctcttgaagagcggtggagctcataccaaaaccaaaccgacaacagcgtctccaatgatcccttgctgatgacccaatatttcaaaaagtccccatctctgacggaggccagtgaaaaaatctctacccatattcaaacatcacaacaggccctgcagttcaccgattttgttgaaaatgataagttggtgggtgtagccctgaggcttgcaaacaactcggagcatatcaatctgccactgcctgagaacgatttctctgattgcgagatctcatactccccactgcagtctgacgaggacactcatgatatcgatgaaaagccagacgacagccaggaacagttgttcttcacagagtcaagcaaagacgggagtctggaggaagacgatgatagctgcggattttttaaaaaaaggcacggccctctgcttaaggaccaggacgagagctgtcccaaggtgaacagctttcttactagagacaagtacgatgaagggctgtatcgcttcaactcacttaacgacctgtctcagcccatatcccagaataacgagtccacactcccttacgatctcgcatgcaccggaggcgattttgtgttgttcccaccagcacttgccggaaagttggctgcctctgtacatcaagcaacaaaggccaagcctgatgaacctgagttccatagtgcacagtctaataaacaaaagcaagttattgaggagagctcagtctacaatcaggtgtcgttgcctctggtgaagagtctgatgcttaagccctttgaatcccaggtcgaaggttatttatcgtcacagcccacccaaaatacgatcagaaaattgagttctgaaaatctgaacgccaagaataacaccaattcagcctgcttttgtcgaaaggctctcgagggtgtgcctgtgggaaaggctactatcttgaacaccgagaatctgtctagcaccccagcgcctaaatacctgaagattctgcccagtgggcttaaatacaatgcgcgtcatccgtccaccaaggttatgaaacaaatggacattggggtttactttggcttaccaccaaagcggaaagaggaaaaactgctaggtgagtctgctctggagggcatcaatctcaatcccgtcccatcccccaaccaaaaacggagttcacagtgcaagaggaaggccgaaaaatcactgagcgacctggaattcgacgcatctactctgcatgaatctcaacttagcgtggaactatcctccgaacgcagtcaacgccagaagaagcggtgtcggaagtcaaattctcttcaggaaggagcctgccagaagaggtcagatcacttgataaacacagagtcagaggccgtgaatttatccaaggttaaagtcttcaccaagagtgctcacggaggtctgcagcggggtaataagaaaataccagagtcttcaaacgttggaggatctcgcaagaagacttgcccattctacaaaaaaatccctggcacgggtttcacagtcgatgctttccagtatggcgtggtcgaaggctgtaccgcttacttcctgactcacttccactcagatcactatgcaggcttgagcaagcacttcacatttccggtttattgctcggagatcaccgggaacctgctgaagaacaaacttcatgtacaggagcaatatatacatcccttgcccctcgacacagagtgcatcgtgaatggagtgaaagtagtacttctggacgcaaatcactgtccaggagccgtcatgatattattttacctgccaaacggaacagtgattttgcataccggggactttcgagcggatccttctatggagcgttccctcctcgccgaccagaaggttcatatgctgtaccttgataccacttactgctcaccagagtacacctttccctctcagcaggaagtgattcgctttgctatcaacaccgcctttgaggctgtgacactcaaccctcatgcacttgtggtgtgcgggacctatagtatcggcaaggaaaaagtgttcctcgcgatagcagacgttctgggatccaaggttggcatgagccaggagaagtataaaactctgcagtgtctgaacatccctgaaattaattccctgatcactactgatatgtgcagctctctggtgcacctgttgcccatgatgcagattaattttaagggactgcagtcacatttaaagaagtgtggaggaaaatataaccagatcctcgcttttcggcctactgggtggacccattcaaataagtttacacgcattgcagacgttatcccccagactaagggaaacatctctatctatggcatcccctatagtgaacactcctcatatctggaaatgaaacgcttcgtgcagtggctgaaaccccagaagattattcccacagtgaacgtggggacgtggaaatccagaagcaccatggagaaatactttcgcgagtggaagctggaagctgggtactag

SEQ ID NO: 221064 - DNA, 813 bp, synthetic construct
  misc_feature 1..813: note = Description of Artificial Sequence: Synthetic coding sequence
  source 1..813: mol_type = other DNA
atgctgcagaaacccaagagtgttaagttacgggctttgaggagtcctcgtaagtttggtgtggccggacgctcctgtcaggaggtcttgagaaaggggtgtctgagatttcagctgcctgaacgaggatctagactctgcctatacgaggatggcaccgaactgacagaagattatttccccagcgttcctgacaacgctgaattggtgctcctgacactgggtcaggcctggcagggctatgtgtctgacatccgcaggtttctcagtgcgttccacgagcctcaagtgggcctgatccaggccgcacaacaactgctttgcgacgaacaggccccacagaggcagcggctgctggcggacctcctgcacaacgtcagccagaacattgccgcagagactagagcagaagacccaccttggttcgaaggcctcgagagcaggttccagtctaaaagtggatacttgcgttattcctgtgaatcaagaatccggtcctatctgcgcgaggtaagctcctacccaagcacagtgggggctgaggcccaggaggagtttttacgtgtcctgggtagcatgtgccagcgtctaaggtcaatgcaatataacggctcctatttcgacagaggtgccaagggcggttccaggctttgtaccccagaggggtggttttcatgtcagggaccttttgacatggacagctgtctctcaagacactctatcaacccatatagtaacagggagagcaggatccttttctccacatggaatcttgaccacattgatggggtcctactatgtggcccaggctag

SEQ ID NO: 221065 - DNA, 825 bp, synthetic construct
  misc_feature 1..825: note = Description of Artificial Sequence: Synthetic coding sequence
  source 1..825: mol_type = other DNA
atgtgccttctgcttgacagacatcttctctttgttcctctggtggccgatgtaagcgacattcggcgattcttgtccgccttccatgaaccccaagttggcctgattcaagccgcacagcagctgctgtgtgatgaacaagccccacagagacagcggctgctggcggacctcctgcataacgtgtctcagaacattgcggctgaaactcgggcagaagatccgccatggttcgaagggctcgaatcaagattccagtcaaagagcggatacctgagatattcctgcgagagtaggatcagatcctacctacgcgaggtgagtagctatccttccaccgtgggcgctgaggcccaggaagagtttttgagagtactcggaagcatgtgccagcgcttgcggtccatgcagtataatggaagctatttcgaccgaggcgcaaagggcggatcgcgtttgtgtacgccagagggctggtttagctgccagggccctttcgacatggattcttgcctgtctcggcactccataaatccttattcgaatagagagagtagaattcttttttccacatggaacttggaccacattattgagaagaaacggactatcatcccgactctggtggaagccatcaaggagcaggacggacgcgaggtggattgggaatacttttacggtctgctgtttactagtgagaaccttaaacttgtgcacatagtctgccacaagaaaaccactcacaaattaaattgtgatcccagcagaatttataagccacaaacacgcctaaagagaaagcagcccgttagaaagaggcaatag

SEQ ID NO: 221066 - DNA, 312 bp, synthetic construct
  misc_feature 1..312: note = Description of Artificial Sequence: Synthetic coding sequence
  source 1..312: mol_type = other DNA
atgctgcagaagcctaaatctgtcaagctgcgggctctgagatcgcccagaaagttcggcgtggcgggacgatcctgtcaggaggtgctgcgaaagggctgcttacgcttccagctccctgaacgcggaagccgcctttgcctgtacgaggacggcacagagcttaccgaagactactttcccagcgtcccagacaacgcagagctagtcctcctgactctcgggcaggcctggcaggggtggtttcgccatgtcagccaggatagcctgacacttctgggcagctcctgtcccccagcgttggtctcatag

SEQ ID NO: 221067 - DNA, 825 bp, synthetic construct
  misc_feature 1..825: note = Description of Artificial Sequence: Synthetic coding sequence
  source 1..825: mol_type = other DNA
atgtgtctgctgttggaccgacacctgctcttcgtgccactggtggccgacgtttctgacatacggcgtttcctctcagccttccacgaaccacaggtgggtttaatacaagcagcccagcagctcctctgtgacgagcaagcaccccagcgccagcgccttttggcggacctcctgcacaatgtatcgcaaaacatcgcagccgagactcgtgcagaagaccctccatggtttgagggcctcgaatctagatttcagtctaaaagcggttatctgcgatatagttgcgaaagtcggatcaggtcttatctgcgcgaggtcagcagctaccccagcaccgtgggagccgaggcccaggaggaattcctgcgcgtgctggggagtatgtgtcagaggctcaggagtatgcagtacaacggatcctactttgaccgtggtgctaaaggtggcagtaggctgtgtacaccagagggatggttttcttgccaaggtccatttgatatggatagctgtcttagcagacactctattaatccttactctaacagagagagtaggatactgttctcgacatggaacttagatcatattatagaaaaaaagcgcactataattcctaccctcgtcgaggccataaaggaacaggacggacgcgaggtcgattgggagtatttttatggattactgttcactagcgagaaccttaagctggtgcacattgtatgtcataaaaagaccacccataaactgaattgcgatccgtctcgaatatataaaccgcagacccggctcaagagaaaacagcccgtgaggaagcggcagtag

SEQ ID NO: 221068 - DNA, 1017 bp, synthetic construct
  misc_feature 1..1017: note = Description of Artificial Sequence: Synthetic coding sequence
  source 1..1017: mol_type = other DNA
atgctgcagaaaccaaagtcggtaaaactaagggccctcagaagcccacggaaatttggagtagctgggagatcttgccaggaggttctgcgcaagggctgtctgcgcttccagctgcctgagagaggtagcaggttgtgtctgtatgaggacggcaccgaactgacagaggactatttccctagcgtccccgataacgctgaacttgtactgctcactctgggtcaggcctggcagggctacgtgtctgatatccggcgtttcctgtcagcattccacgaacctcaggtgggtctgatacaggcagctcaacaattgctgtgtgacgaacaagcccctcagcggcagagactcctcgctgatctgctgcataatgtctcccagaacatagctgcggagactagagccgaggaccctccttggtttgagggcctcgaatcacggttccaatcaaaaagtggctacctccggtactcctgcgagtcccggataaggtcctacctccgcgaagtgagtagctacccttctaccgtgggggctgaggctcaggaagaatttctccgggtcctgggctccatgtgtcagagactccggtcaatgcagtataacggcagctacttcgaccgcggagctaaagggggttcccggctgtgtacgcctgagggatggtttagctgccagggacctttcgatatggatagttgtctctcccgccactcaattaatccgtactcgaatcgggagtcccggattctcttttccacctggaacctggaccacataattgagaagaagcgaaccataattcccactttagtggaagcgattaaagaacaagatggcagggaggtagactgggagtacttctacggccttttgtttacttctgaaaatcttaagctggttcacattgtgtgtcacaaaaaaacaacgcataagcttaactgtgatcctagtcgtatctacaaaccgcagacgcggctaaagcgtaagcaacctgttagaaagcgtcagtag

SEQ ID NO: 221069 - DNA, 351 bp, synthetic construct
  misc_feature 1..351: note = Description of Artificial Sequence: Synthetic coding sequence
  source 1..351: mol_type = other DNA
atgctgcagaaacccaagagcgtgaagctcagagcgctgcgtagccctagaaaattcggtgtagcgggtagaagctgtcaggaagtgcttcgcaaaggttgtctgcgattccagctacctgagagaggttcccggttatgtctttatgaggatggcaccgaactgacagaggattacttcccgtccgttcctgacaatgcggagctcgtgctcctcactttggggcaggcttggcaaggcagcgtgggtgtgcgcgctcgaacaaagacgcgagacacttcatctctcagcccaggcgattgccaggccctgggcaacgggggacgatgtgggcagcggctgtttctgtag

SEQ ID NO: 221070 - DNA, 261 bp, synthetic construct
  misc_feature 1..261: note = Description of Artificial Sequence: Synthetic coding sequence
  source 1..261: mol_type = other DNA
atgcttcaaaagccaaaatcagtgaagctgcgcgctttaaggtcacctcgcaagttcggggtcgctgggagatcttgccaggaggtgctgcgcaaaggctgcctcaggtttcagttaccggaacgcggatcgcggctctgcctctatgaagatgggaccgagctgacggaagattacttcccaagtgtcccagataacgcagaacttgtgctgttgaccctggggcaggcctggcagggatgttggagtgccgtcgcatag

SEQ ID NO: 221071 - DNA, 249 bp, synthetic construct
  misc_feature 1..249: note = Description of Artificial Sequence: Synthetic coding sequence
  source 1..249: mol_type = other DNA
atgttacagaaacctaaatccgtcaagctgcgggcacttagaagccccaggaagttcggtgtcgccggtagaagctgtcaggaggtccttcgcaaagggtgtctgcggttccagcttcccgagcgaggcagccgcctttgcttgtatgaggatggtactgaattgacggaagactacttcccctcagttcccgacaatgcagagcttgtgctgttaactctggggcaggcgtggcaggggtgcgagtag

SEQ ID NO: 221072 - DNA, 813 bp, synthetic construct
  misc_feature 1..813: note = Description of Artificial Sequence: Synthetic coding sequence
  source 1..813: mol_type = other DNA
atgctccagaagcccaaatccgtcaaattaagagctttgaggtcccccagaaaatttggtgtagcaggtcggtcttgtcaggaagtcctgcggaaagggtgcctccgtttccagctgcccgagcgcggaagccgcctgtgcctgtatgaggatggtaccgagttgaccgaagattatttcccatctgtgccagacaacgctgagctggtacttcttactctcggccaggcttggcaaggatacgtgtctgacataaggcgcttcctttctgcttttcacgaaccacaggtgggcctgatacaggcagcccagcagctgctgtgtgatgaacaggctccccagaggcagcgtctccttgccgacctgctccacaatgtgagtcagaatatcgctgcagagactcgcgcagaagacccaccctggttcgagggattggaatcccgattccagtccaaatctggctacctgaggtacagctgcgaatctaggatccgcagctatctgcgcgaggtgtcgtcctaccctagtactgtgggagccgaggcacaggaagagtttctgcgcgtgttagggtctatgtgccaacgcctgcgcagcatgcagtacaatggcagctacttcgaccgaggcgcaaaaggcggtagtaggctgtgcacaccagagggatggttcagctgccaaggcccttttgatatggattcttgcctctcacggcattctatcaacccttattcgaatcgggagagcaggatactgttctcaacctggaacctggaccacatcgacggcgtcttgctctgtggtcccggatag

SEQ ID NO: 221073 - DNA, 3183 bp, synthetic construct
  misc_feature 1..3183: note = Description of Artificial Sequence: Synthetic coding sequence
  source 1..3183: mol_type = other DNA
atggagcagctgaacgaactcgagctgttaatggagaagtctttctgggaggaggccgagctcccagcagaactgttccaaaaaaaggtagtggcatcctttccccgtactgtgttgagtacgggaatggataaccgctacttggtcttggctgttaatacggttcagaataaagaagggaactgcgagaaacgcctagtgattacagctagccagagtctagaaaataaagaactgtgtatcctgcgtaacgattggtgtagcgtgcccgttgaaccgggtgacattatccacctggagggtgattgcacatccgatacctggataatcgacaaagattttggctacctcatactgtacccagatatgctgatcagtgggacgtccatcgccagctctatccgatgtatgaggagagcggtactgagcgagaccttcagaagtagtgatcctgctacccgccagatgttaattgggactgtcttgcacgaagttttccagaaagcaatcaacaactcctttgccccagaaaagctccaagagctggcttttcagactatacaggagatccgtcacctcaaagagatgtacaggttgaacctgtcccaggacgagataaaacaggaagtggaggattacctgccaagcttttgtaagtgggctggcgattttatgcacaagaacacaagcaccgacttccctcaaatgcagctgtcacttcccagcgacaattccaaggataatagcacttgtaatatcgaggtcgtgaagccaatggacatcgaggaaagtatctggtcccccaggtttgggctgaaggggaaaatcgacgtaactgtcggggtcaagattcacagggggtacaagactaagtacaagatcatgccattggaactcaaaacaggtaaagagagcaacagtatcgaacatcgatcacaggttgtactatacaccctcctctcgcaagagcggagagcagatccagaggccggattgttactgtatctcaaaacaggacaaatgtatcctgttccggcaaatcacttagataagcgcgaactcctgaagctgcgcaaccagatggcctttagcctgttccatcgtatttcaaaatccgctacaaggcagaagactcagctggcttccctgcctcagatcattgaggaagaaaaaacttgcaaatactgctctcagattgggaactgcgccctgtactcccgtgcagtagagcagcaaatggattgctccagcgtgccgatcgtaatgctaccgaaaatagaagaggaaactcaacacctgaaacaaacccacctcgagtatttcagcctctggtgcctaatgttaacgctggaaagccaatccaaagataataagaaaaaccatcagaatatatggctgatgccggcatctgaaatggaaaagagcggcagttgtataggcaacttgatccggatggagcatgtgaagattgtatgtgacggccaatacctgcacaatttccaatgtaaacacggcgctatcccagtaacaaacctcatggccggagaccgggtaattgtgagcggagaagagcggtctctgtttgcactctcacgcggttacgttaaagagatcaatatgactacagtaacatgcctgttggatcgcaacctgagcgtgctgccagaatcaacactctttagacttgaccaggaagaaaaaaattgcgacattgacacacctttgggcaatttgagtaagctgatggagaatacattcgtgtctaaaaagctccgggaccttatcatcgattttcgggaacctcagtttatctcctatctgtcctctgttcttccgcatgacgctaaggacaccgtggcatgcatattgaaaggcctgaataagcctcaaaggcaggctatgaaaaaggtactcctgagcaaggattacacactcattgttggcatgccgggaactggtaaaacaactaccatctgtaccctggtgcgcattctctatgcctgtggcttctccgtgctgttaaccagctacacccatagcgcagtagataatatactccttaagctagctaaattcaagataggcttcctccgtctggggcagatccaaaaggtgcacccagctattcaacagttcacagagcaagaaatctgtagatctaaatctattaagtccttggctcttttggaggaactgtacaacagccagttgatcgttgcaactacgtgtatggggattaatcaccctatctttagtcgaaagatcttcgacttctgtattgtggacgaggctagccaaatctctcagccaatctgcttgggacccctgttcttcagccggcgattcgttctggtgggagaccatcagcagttaccgccactggtactcaacagggaggctcgggctctgggtatgtcagagagcctctttaaacggcttgaacagaacaagtctgccgtggtacaacttacagtccagtacagaatgaacagcaaaatcatgagcctgtccaacaagctcacttatgagggcaagttagagtgcgggtctgacaaggtggctaatgcggtgatcaaccttcgccacttcaaagacgtgaagttggagctggagttctacgccgactatagcgacaatccttggctcatgggagtgttcgaacctaataaccccgtttgtttccttaacaccgataaggtgcctgcccctgagcaggtggaaaaaggcggtgtgtctaatgtcaccgaggccaaactgatcgtctttctgacatccatctttgtcaaagccggatgtagcccgtccgatattggaatcatagcaccgtacagacagcagctcaagataataaacgacctgctggcccgaagtattgggatggtagaagtcaatacagtcgataagtatcagggcagagacaagagtattgtccttgtgtctttcgtccgctctaataaggacggcactgttggagaacttctgaaggattggagaagattaaacgtggccataacacgagctaagcacaagttaattctgttaggatgtgtaccttctctcaactgctaccctccgctagagaagttgctgaatcatttgaacagtgaaaaactgattattgacctcccttcaagagagcacgaatcactgtgtcacatcctgggagattttcagagggagtag

SEQ ID NO: 221074 - DNA, 2469 bp, synthetic construct
  misc_feature 1..2469: note = Description of Artificial Sequence: Synthetic coding sequence
  source 1..2469: mol_type = other DNA
atggaacagttgaacgagctggagttgctgatggagaagtcattctgggaggaagctgagctccccgcagagttgttccagaaaaaagtcgtcgctagctttcccaggactgtcctgagtacagggatggacaatcgctatctggtcttagcagtaaatacagtccagaacaaagaaggcaactgcgaaaaaagattggtgattaccgcttctcagagcctggagaacaaggaactgtgtatcctacggaacgactggtgttccgtgccggtggagcccggagacatcattcaccttgagggagattgtacctctgatacctggataattgataaggattttggctatttgatcctgtatcccgatatgctgattagcggcacttcaatcgccagctccatccgctgtatgagacgggcagtccttagtgagactttcaggtcctcggaccccgctacacgtcaaatgcttattggcaccgttttgcatgaagtctttcagaaagccataaataacagctttgcccctgagaagctgcaggaattagcatttcagacaattcaagaaattcgccatctgaaggaaatgtatcgcctaaatttatcccaggacgaaattaaacaggaggtcgaggactacctgccttctttctgcaaatgggcgggagactttatgcataaaaacacaagtacagattttccacaaatgcagctctccctgccttctgacaacagtaaagataattccacctgtaacatcgaggtggtgaagcctatggacatagaagagtccatatggtccccacgctttgggctgaagggaaagattgacgttacagtgggggtgaaaatccacaggggttacaagactaagtacaagattatgccactggaactcaagactggaaaagaatcgaacagcattgagcataggagccaggttgtcctgtacacactcctttcccaagaacgcagggccgatcctgaagctgggttactgctgtacctgaagacaggtcagatgtatccagtaccagcgaatcacctggacaaacgggagcttctaaaactacggaaccagatggcgttctcactttttcatcggatctctaagtctgccacacggcagaaaacacagcttgcatctctgccgcaaattattgaagaggaaaagacctgcaaatattgctctcagattggaaattgcgctctgtactctcgcgcagtggagcagcagatggattgcagctctgtgcccattgttatgctacccaagatcgaggaggaaactcagcacttgaaacagacccatctggagtacttctccttgtggtgtctaatgctgaccttagagtcgcagagtaaggataataagaaaaaccaccagaatatctggctgatgcccgcttctgagatggagaagagcggtagttgcattgggaatctgatccgaatggaacacgtaaaaatcgtctgtgacggccagtacctgcacaattttcaatgtaagcatggtgccatcccggtaacgaacctgatggctggtgatcgagtgatcgtgtctggcgaagaaagatctctgtttgctttatctagaggctacgtaaaagagattaacatgacaactgtgacctgtctgctagatcggaatctctccgtgctgcctgaatctactttgtttaggctcgaccaggaagaaaagaactgcgacatagatacacctctggggaatctttccaaattgatggaaaatacgttcgtgagcaagaagctccgcgatctgatcatcgacttccgggaaccacagttcatcagctacttgtccagcgtcctcccacatgacgctaaggatacagttgcctgtatcctcaagggactcaataagccccaacgacaagctatgaaaaaagtccttctgagcaaggactatacccttatcgtggggatgccaggcacgggcaagaccacaacgatctgtactttggtgcccgctcccgaacaagtggagaaaggaggagtgagtaacgtcaccgaggctaagctgatcgtctttttgaccagcatcttcgtgaaggctggctgctctccgtctgatatagggatcattgcaccttacagacagcagctgaaaattataaacgatttactcgcccgttccatcggcatggtagaagtgaatacggttgataagtatcaaggacgggacaagtctatcgtactggtgtcatttgtgagatccaataaagatggaacagtaggagaactcctgaaggattggaggaggctgaatgtggcgatcactcgggctaagcacaaattgattttgttaggctgtgtgccttcactcaactgttatcccccactcgagaaactcctgaaccacttaaactccgagaagttaattattgacctcccaagtagagagcacgaatccctttgtcacatcttgggtgatttccagagagaatag

SEQ ID NO: 221075 - DNA, 3441 bp, synthetic construct
  misc_feature 1..3441: note = Description of Artificial Sequence: Synthetic coding sequence
  source 1..3441: mol_type = other DNA
atgaaaacgccttgcataccatcaccaaagcaggggtcaaagggcagaggccaatcaccagccgctcaagttcgaggcccaacgtggaatgcccctgctcgcgaaggacgacccggtgctgggcatctgggtcacctgcgggtgggcgcttgtgcaagaggcgctcaggcccgagcatttttcccgttcttgagtttcctttgttatcctaggtttcggtgcttgttctgccttcagttcgctattcctgcctcgaggatggagcaacttaatgaacttgaactcctgatggagaagagcttttgggaggaagctgagcttcccgctgagctctttcagaaaaaagtggttgcctcttttccaaggacagtgctgagcacaggaatggacaaccgttaccttgtacttgcagttaacaccgtccagaataaagaaggcaactgtgagaagcgactggtcataaccgcaagtcagtcactggagaataaggagctgtgtattctacgtaatgattggtgctcagtgcccgtcgagcctggggatattattcacctggagggggactgtacctctgacacctggatcattgataaggatttcgggtatctaatcctgtatcctgacatgctcatcagcggaacctccatcgcgtcgtcaattaggtgtatgcgcagggccgtgctttcggagacctttagaagcagcgatccagcgacccggcagatgctaatcgggactgtgctgcacgaggtgttccagaaagccatcaataacagttttgcccctgagaagctccaggagctcgcttttcagaccatacaggagattcgccaccttaaagagatgtatagactgaacctcagccaggacgagatcaaacaagaagtggaggactatctcccttctttttgcaagtgggcaggcgactttatgcacaagaatacctccacggattttccccagatgcaactgagcctcccatccgataatagcaaggataatagtacctgtaatattgaggtagtcaagcccatggacattgaggagagcatctggagccccagatttggtctgaaggggaagatcgatgtcaccgtcggtgtcaagattcaccggggttacaaaaccaagtataaaatcatgccattagaactgaagacaggaaaagagtctaattctattgagcatcggagccaagtcgtgctttatactctgttaagtcaggaaagacgtgccgatccagaggcaggcctgttattatacctgaagacaggccaaatgtaccccgtaccggcaaaccacctggacaaacgggagttactaaaactccggaatcagatggcgttttccctctttcataggattagcaagtctgcaacccggcaaaaaacccagttggcatctttgcctcagattattgaggaggagaaaacctgtaaatattgctctcaaataggtaattgtgcgctgtactcacgtgccgtcgagcagcagatggactgttccagcgtgcccatcgtaatgctgccgaagatagaggaagaaacacaacatctgaagcagacacatctggaatattttagtctttggtgcctgatgttgactctggagagccagagtaaagataataagaagaaccatcaaaacatctggctcatgcctgcctctgaaatggaaaagtcaggctcatgcattggaaacttaattagaatggagcatgttaagatcgtctgcgatggacagtaccttcacaacttccagtgtaagcacggtgcaatccccgtcacaaacctcatggctggcgacagagtgattgtgtctggtgaggaacgttccctttttgctctttcccgcggttatgttaaggagatcaatatgaccacggtgacatgtctgcttgacagaaatctgagcgtactacccgagagcacactgtttagactcgatcaggaggaaaagaactgtgacatcgacacccccttaggcaatcttagtaaacttatggagaatacctttgtctctaaaaaactacgtgacctaataatcgactttcgcgaacctcagtttatcagctatctctcctccgtgctgccccacgacgcaaaagataccgttgcatgcatcctgaaggggttaaacaagccacagcgccaggctatgaagaaggttctgctttctaaagactataccctgattgtcgggatgcccggaacaggaaaaacaaccactatctgcacactcgtccggatcctctacgcttgtgggttttccgtactattgactagctatactcacagtgcagtggataacatcctactgaaacttgccaagtttaaaattgggtttttgcggctcggccagatccaaaaggtgcacccggcaatccagcaattcaccgagcaggaaatctgccggagcaagtccattaaatccctggcactcctggaggaactgtacaattcccagttgattgtggcaacgacctgtatggggataaatcatccaatcttctctcgaaagatcttcgatttttgtatcgttgacgaagcgtcccagatctcccagccaatctgtctgggtccattattcttttcccgcagatttgtgctcgtgggcgaccatcagcagctgccccctctggtcctgaatcgcgaggctcgagctttgggcatgagtgagagcctattcaaaagactcgagcagaataagagcgctgtggtgcaacttacagtgcagtaccgcatgaactcaaagatcatgagcctgtcgaacaaactgacttacgagggcaaactcgagtgtggatccgataaagtagcaaacgcagtgatcaatctccgccatttcaaggacgtgaaactggagctcgaattttatgctgattactcagacaacccttggttaatgggggtcttcgagccaaacaaccccgtttgctttctgaataccgataaagtgccggcaccagagcaggttgagaaggggggagtgagtaatgtcacagaggctaaattaatagtgttcttgacttcaatcttcgtgaaagcagggtgttcgccatcagacattggcattatcgccccatatcggcagcagctgaagatcataaacgatctcctggcgcgtagtataggcatggtcgaggtcaacaccgtagataaataccagggtagagacaagagcattgtcctggtgagctttgttcggtctaacaaggacggcaccgtgggggagcttctgaaggactggagacgccttaatgtcgctataactcgcgcaaagcataagcttattctgctcggatgcgtgccaagcctcaactgttaccctcctctggagaaattgttgaaccatctgaactcagaaaaactcattatcgaccttccatcacgcgaacacgagtccctctgtcatattttaggggacttccaaagggaatag

SEQ ID NO: 221076 - DNA, 717 bp, synthetic construct
  misc_feature 1..717: note = Description of Artificial Sequence: Synthetic coding sequence
  source 1..717: mol_type = other DNA
atgctgtgctttctcaggggcatggcctttgttccgttcttgttagtcacgtggagctcagcggctttcatcataagctacgtcgtggccgtgctgtcaggtcacgtcaatccttttcttccttacattagcgacaccggaaccacacctccggagtctggtatttttgggttcatgattaatttcagcgcatttctgggcgctgccacaatgtacactcgctacaaaatcgtgcagaagcagaaccagacatgttacttctccactccagtgttcaacttggtgagtctcgttctcggtttggtagggtgcttcgggatgggcatcgttgccaattttcaggaactggctgtgccagtggttcacgacggaggcgctctgctggcattcgtatgcggcgtcgtatacacccttctgcagagtataataagctataagtcatgcccccagtggaactccctctcaacctgccacataaggatggtcatcagtgccgtatcctgcgctgcagttatcccgatgattgtgtgtgccagcctgattagcatcactaagctcgaatggaaccccagagaaaaagactacgtttatcacgtggttagcgctatttgtgagtggacggtggccttcgggtttattttttactttctgaccttcatacaggacttccaaagcgtgactctgcgcataagtaccgagattaacggggatatctag

SEQ ID NO: 221077 - DNA, 801 bp, synthetic construct
  misc_feature 1..801: note = Description of Artificial Sequence: Synthetic coding sequence
  source 1..801: mol_type = other DNA
atgtggtggtttcagcagggtctctcattcttgccttcggcgctagtgatctggacctcagctgcattcatattctcatacatcacagctgtcacattacatcacatcgacccggcactgccatacatctccgacacagggacggtggctcctgaaaaatgcctttttggcgctatgctcaacatcgccgctgtactgtgtatagccacaatctatgtgaggtacaaacaggtgcacgccctatcacccgaggaaaatgtgataattaaattaaataaggccggtctcgtactgggcatcttatcttgtctcggtttatcaatcgtggcgaattttcagaagaccaccctgtttgcggctcacgtttcaggtgccgtgctgacatttggaatgggatctctgtacatgttcgttcagacaatcctgtcttatcagatgcaaccgaagatccacgggaagcaggtgttttggattagactgctactcgtgatatggtgcggggtgtccgccctgagcatgctgacctgcagtagcgttctacattctggtaattttgggaccgatctggaacagaagctgcactggaatcctgaggacaaaggttatgtgctgcacatgataacaacagccgctgagtggagtatgagcttttctttttttggattctttctgacttatatccgggatttccagaagattagcttgagagtagaagccaatcttcacggcctcacattgtatgacacggccccatgtccaatcaacaacgaacggacccgtttactgagtcgcgatatctag

SEQ ID NO: 221078 - DNA, 801 bp, synthetic construct
  misc_feature 1..801: note = Description of Artificial Sequence: Synthetic coding sequence
  source 1..801: mol_type = other DNA
atgtggtggtttcagcagggactgagtttcttaccttctgctcttgtgatctggaccagcgctgcttttatcttctcttatattacggctgtcacactgcatcacattgacccagccctcccttacatcagcgatacaggcacggtagctcctgaaaaatgtctgtttggggcaatgttaaacatcgccgctgtgttatgcatcgccacaatatatgtgcgttacaagcaggtgcacgctctgtcccccgaggagaacgtcatcattaaactgaacaaagcaggactggtcctgggcatactctcctgcttgggcctgtcaatcgtggccaatttccaaaagacaacgctgttcgctgcacacgtgtcaggagcagtgctcacattcggcatgggttcactctatatgtttgtgcagacaatccttagttaccaaatgcagcccaaaatccacggaaaacaagtcttttggatccgcctcctgttagtgatctggtgcggggtctccgccttatctatgttgacatgctcatcggtattgcactctggaaacttcggaacagatctggagcaaaaactgcactggaaccctgaggacaaggggtacgtcctccacatgattacaaccgctgccgaatggtccatgtccttttcatttttcgggttctttctgacttatattcgcgactttcagaaaatttctctgcgcgtggaagctaatctacacggactgacactgtatgatacggccccatgccccatcaataatgagaggaccagactgctatcacgggacatctag

SEQ ID NO: 221079 - DNA, 699 bp, synthetic construct
  misc_feature 1..699: note = Description of Artificial Sequence: Synthetic coding sequence
  source 1..699: mol_type = other DNA
atgccatctttatgggatcgcttttctagtagctctacatcaagtagcccttcttctctccccaggacacctactcccgataggcccccaaggagcgcgtggggctccgccacccgcgaagagggctttgatcggtctaccagtcttgaaagttccgactgcgaatccctggattcttcaaattccggcttcggacccgaggaggatactgcttacctggatggcgtatctctgcccgacttcgagttgttgtcggatccagaggatgagcacctgtgcgccaacttgatgcaacttcttcaggaaagtttggcacaagcgagactgggatctcgaagaccggcacggctccttatgccttcgcagttagtgagtcaggtgggcaaagagctactccggctggcctactcagaaccctgcggcctccgcggtgccctgctggatgtgtgcgtcgagcagggcaagtcttgccacagtgtcgggcagctcgcactggatccctccctggtgcctacatttcagctaactcttgtgctgagattggactctaggctgtggccaaaaattcaaggactgttctcaagtgctaacagccccttcctgccaggattctcacagtcactcacactgagcaccggatttagagtgattaagaagaagctctacagttcagaacagttgctgattgaagagtgctag

SEQ ID NO: 221080 - DNA, 582 bp, synthetic construct
  misc_feature 1..582: note = Description of Artificial Sequence: Synthetic coding sequence
  source 1..582: mol_type = other DNA
atggtggccacaggctccttgtctagcaagaatccggcttctatttccgagctcctggattgtgggtaccatccagaatctctcctgtcggacttcgactactgggactatgtggttcctgagcccaatctgaatgaggttatcttcgaagaaagcacttgccaaaacttggtgaaaatgctggagaactgtctgtccaagtcgaagcagaccaaactgggctgcagcaaagttttggtgcctgagaaactcacacagagaatcgcacaggacgtgctaagactatcgtcaactgaaccctgcggactgaggggatgtgtgatgcatgttaatctcgagattgaaaacgtttgtaaaaaattggaccgaatcgtctgcgatagcagcgttgttcctaccttcgagctaacactggtatttaagcaggaaaactgctcctggacctcattccgggatttctttttcagccgcggaaggttctcaagcggtttcagaagaacgctgatattgtcatcaggatttcggctcgttaagaaaaaattgtactccctgattggaaccacggttatcgagggctcctag

SEQ ID NO: 221081 - DNA, 534 bp, synthetic construct
  misc_feature 1..534: note = Description of Artificial Sequence: Synthetic coding sequence
  source 1..534: mol_type = other DNA
atggtcgccacggggagcctctctagcaaaaaccccgcttccatcagcgaactgctggattgtggatatcaccccgaatctctcctgagcgactttgactactgggattatgtggttccggaaccaaacttaaacgaagtgattttcgaggagtccacctgccagaatctcgtcaagatgttggaaaattgtctgtcaaagagcaagcagactaagcttggctgctctaaagtgctggttcctgaaaagctcactcagaggatcgcgcaggatgtcctgagactgtcatcgactgagccctgcggccttcggggatgcgtgatgcacgtaaacctggaaattgagaacgtgtgcaagaagttagacaggattgtgtgcgactcatctgtggtgcctaccttcgagcttactctcgtgttcaagcaggagaactgctcatggacctcattccgggatttctttttttccaggggcagattttcaagcggtttcagacgaactctgatcctcagttcaggtttccggttggtgtag

SEQ ID NO: 221082 - DNA, 387 bp, synthetic construct
  misc_feature 1..387: note = Description of Artificial Sequence: Synthetic coding sequence
  source 1..387: mol_type = other DNA
atggtagcaaccggctcgttgtcctcaaaaaatcctgcttccatttcagagcttttggactgcggctatcacccagagagtctcctcagcgatttcgattactgggattacgtggtgccagagcctaacctcaatgaagtgattttcgaggagtccacgtgccagaacttggttaagatgctggaaaattgcctgtcgaagagcaaacaaaccaagctcggatgttccaaggtgctcgtgcccgaaaaattgacgcagcgcattgcccaggacgtgctcaggctctcaagcacagaaccatgtgggctgagggggtgcgtgatgcatgtcaatctggagatcgagaacgtgtgcaagaagctggacaggatagtgtgcgacagctag

SEQ ID NO: 221083 - DNA, 1239 bp, synthetic construct
  misc_feature 1..1239: note = Description of Artificial Sequence: Synthetic coding sequence
  source 1..1239: mol_type = other DNA
atggctaatgtcgcagacaccaagctgtatgacattctgggagtcccacccggtgcatctgaaaacgagctcaagaaggcatataggaaactggccaaggagtatcaccctgataagaacccaaacgcaggcgacaagtttaaagagatcagtttcgcgtacgaagtcctcagtaaccccgagaaacgtgagctttacgatcgctacggcgaacaaggtctgcgcgaggggagcgggggtggcggtggaatggatgatatcttctcacacattttcgggggtggcctgtttggctttatgggcaaccaaagtcggtcccgaaatggccgaagacgaggagaggacatgatgcaccccctgaaggtgtctttggaggacctgtacaacggcaaaacgacaaaactccagctttccaagaacgtgctatgttccgcctgtagcgggcagggtggaaaaagtggtgccgtccagaagtgttcagcatgtcgcggtcgcggtgtacggatcatgattcggcagttagctcctggcatggtacagcaaatgcagtctgtctgctctgattgtaatggtgaaggtgaagtgataaacgagaaggacaggtgtaaaaaatgtgagggcaaaaaggtgataaaggaggtcaagatactggaggttcatgttgacaagggtatgaagcacggccagcgcatcacatttacaggcgaagccgaccaagccccaggcgtagagcccggagacattgttctcttgctccaggagaaggagcacgaggtttttcagcgcgatggaaacgacttacatatgacctacaagatcgggctggtggaggccctgtgcgggttccagttcacattcaagcatttggatggacggcaaattgtggtgaagtatcccccaggcaaggtgattgagcctggctgtgtgcgagtggttcgtggagagggtatgcctcagtacaggaatccctttgagaaaggggacctttatattaaatttgacgtccagtttccagaaaataattggattaaccccgacaaacttagcgagcttgaggatcttcttccctcaagacctgaagtgcctaacataataggagagactgaggaggtagagcttcaggagtttgactctacacgtggcagtgggggtgggcagcggagagaggcatacaatgattcctccgatgaagagagcagcagtcaccacggaccaggcgttcagtgtgcccatcaatag

SEQ ID NO: 221084 - DNA, 1443 bp, synthetic construct
  misc_feature 1..1443: note = Description of Artificial Sequence: Synthetic coding sequence
  source 1..1443: mol_type = other DNA
atggctgcaaggtgttctacccgatggctgctcgtggttgtaggcactccccgtctgcccgctatttctgggaggggggctcggccaccacgagaaggtgtggtgggtgcctggctgtccagaaagctcagtgtccccgcatttgcgagctctcttacttcttgtggtcccagggccctgcttactctccgacccggtgtgtctctgacaggcacaaagcacaacccatttatttgtacagccagtttccacacatcagctcccttagctaaggaggattactaccagattctgggagtcccaaggaatgcctcgcaaaaggagataaagaaagcttactatcaacttgcgaagaagtaccacccagataccaacaaagatgacccaaaggccaaggaaaagttctcccaactagccgaggcctacgaagtactgagcgatgaggtgaaaaggaagcaatacgacgcctacgggtctgctggttttgatcccggagcatcaggctcccaacacagctattggaaaggtgggccaactgtggatcccgaagaactgttccgaaaaatttttggggagttttcttcgagctcgttcggagacttccagactgtgttcgatcagccccaggagtacttcatggaattaaccttcaaccaggcggctaagggggtaaataaggagttcaccgtgaatatcatggatacttgcgagagatgcaacgggaaagggaacgagccagggaccaaggtgcagcactgccattattgtggcggttcgggcatggaaaccattaacaccgggccattcgttatgcggtctacctgtcgcagatgtggcggacggggatccatcatcatttccccttgtgtggtgtgcagaggagccggacaggcaaaacagaaaaagagagtcatgattcccgtgcctgctggtgtagaggatgggcagactgtcagaatgcccgtagggaagcgggaaatcttcattacctttcgggtccaaaagtcccctgttttccgaagagatggtgcagacattcactcagatctgttcatatcaatcgctcaggcactgttgggaggcactgcacgcgcacaggggttgtacgaaaccatcaatgtcacaatcccgccaggtactcaaactgaccagaagatccgaatgggtggtaaaggcattcccagaattaactcctacgggtacggggaccattatattcacatcaaaatccgcgtgcctaagcggctgaccagccgccagcaatctctgattctttcttacgcagaggatgagaccgatgtagagggcacagtgaacggagttactctcacgtccagtgggggatctaccatggacagctccgctgggagtaaggcccgaagagaagccggtgaagacgaagaaggtttcctctcaaagctgaagaaaatgttcactagctag

SEQ ID NO: 221085 - DNA, 1362 bp, synthetic construct
  misc_feature 1..1362: note = Description of Artificial Sequence: Synthetic coding sequence
  source 1..1362: mol_type = other DNA
atggcagcccgatgttcaactagatggctgctcgttgtggtcgggacacctaggctgcccgcaattagtgggagaggggctcggcctccaagagaaggtgtggtcggtgcctggctctctcgcaagctgtcggtccctgcttttgcgtctagcctgacctcttgcggaccccgagcgcttctgacacttcggcctggagtttccctgaccggaacaaaacacaatccctttatttgcaccgcaagtttccacacttccgcacccctggcgaaagaggattactaccaaattttgggcgttcctcggaatgcatctcagaaggagatcaagaaagcttactaccagctggctaagaagtaccacccggatactaacaaggacgatcccaaagccaaggagaaatttagccagctggctgaggcatacgaagttctttcagacgaggtgaaaagaaaacagtatgatgcgtacggctctgccggattcgaccctggagcttccggatcccaacatagctattggaaagggggtcccacagtggatccagaggaactgttccggaagatcttcggagaattcagctcaagctccttcggcgattttcagactgtcttcgatcaaccccaggaatactttatggagttgactttcaaccaagctgccaagggagtgaataaggagtttaccgtcaacataatggatacctgtgagcggtgtaacggtaagggaaatgagcccggaacaaaggtccagcattgtcactactgtggtggctccggtatggaaacaattaataccggccctttcgtgatgagatccacttgcagaaggtgcggtggtcggggtagtatcattataagcccttgtgttgtgtgccggggagcagggcaagccaagcagaagaaaagggtcatgatacccgtgccggcaggggtggaagacggacagaccgtaaggatgccagttggtaagagagagattttcattaccttccgggtgcagaagtcccctgtatttagaagggacggggcagacatccacagcgacctattcatcagcattgcccaggccttgttaggcggaactgcacgggcacagggcttatacgagactattaatgtgaccattcccccaggaacccagaccgatcagaaaatacgaatgggcggaaaaggcatccccagaattaattcttacggatacggggatcattacattcacatcaagatccgggttcccaagcggctcactagcaggcagcagtcgctgattttgagttacgctgaggacgagaccgatgtggagggcacagtgaatggggtcactctgaccagcagtggaaaacgcagcacaggcaattag

SEQ ID NO: 221086 - DNA, 903 bp, synthetic construct
  misc_feature 1..903: note = Description of Artificial Sequence: Synthetic coding sequence
  source 1..903: mol_type = other DNA
atggcagaaccccaggcggaacggcctaggctctgtgtctttcccgacctgctgagacccccttccgctgccgatatcgaaacctggtgtcaaccatacagaaaaatcttcggagaattttcttccagcagtttcggcgatttccaaactgtctttgaccagccacaggaatacttcatggagctgacgtttaatcaagctgccaagggagtcaataaagagttcaccgtgaatatcatggatacctgtgagaggtgcaatggcaagggcaacgaacctggcaccaaggtgcagcactgccactattgtggtgggtccggcatggagaccattaataccggaccattcgtaatgcggagtacatgtaggcgctgcggtggcaggggaagcatcattatctcgccttgtgtcgtatgcaggggtgctggccaggccaaacagaaaaaaagagtcatgattccagtcccagcaggtgtagaagatggccagaccgtccggatgcccgttgggaaaagagaaattttcatcactttccgggtccagaagtctccggttttccgccgagacggcgctgacatacactccgatttatttatatcaatcgctcaggctctcctgggcggaacggccagggcccagggactgtatgaaacaatcaacgttaccatcccccctgggacccaaacagatcagaaaataagaatgggcggtaaggggatacctagaatcaattcatacggatacggcgatcattacatccatatcaagatacgggtgccaaagcggcttacctccagacagcagtccctgatcctgtcttacgcggaggatgaaacagatgtagaaggtacagtgaacggggtcacgctcacaagttccggcaagagatccacaggcaattag

SEQ ID NO: 221087 - DNA, 1023 bp, synthetic construct
  misc_feature 1..1023: note = Description of Artificial Sequence: Synthetic coding sequence
  source 1..1023: mol_type = other DNA
atgggtaaggattactaccagactcttgggttggcccgaggggcttccgatgaggaaattaagagagcgtaccgtagacaggcacttcggtaccaccctgataaaaacaaggaacccggagccgaggagaaattcaaggaaatcgctgaagcttacgatgtcctgagcgatccaagaaaacgcgagattttcgataggtatggcgaggaaggtcttaaaggaagcggcccatccggcggtagtggtggtggcgctaatgggacttccttctcttatacttttcacggtgacccgcacgctatgttcgccgagttctttggcggacggaatccatttgatacatttttcggccagcgtaacggtgaagaggggatggacatagatgacccgttttctggatttccaatgggcatgggagggttcactaatgtcaattttggcagatctcggagcgctcaggagccggctaggaagaagcaagatccccctgtgacacacgaccttcgcgtgagcctggaggagatctatagcggatgtactaaaaaaatgaaaatctcccataaacgcctgaatccagacggcaaatctataaggaacgaggataaaattctcacgatcgaggtaaaaaagggttggaaagaggggaccaaaataacttttcccaaggagggggatcagaccagtaataatattcccgctgacatcgtgtttgtcctgaaggataaaccccacaacatcttcaagagggacgggagcgatgtgatatatcccgctaggattagcctgcgggaggccttgtgcgggtgcacagtcaatgtccctactctcgacggacgtacgattcctgtggtgttcaaagatgtcattcgccctggaatgcgacgaaaggtccctggagaaggcttgcccttgcccaagacccctgagaaaagaggcgacttgatcattgaattcgaagtcatttttcccgagcggatacctcagacaagcaggactgtgctggaacaggtgctgcccatttag

SEQ ID NO: 221088 - DNA, 723 bp, synthetic construct
  misc_feature 1..723: note = Description of Artificial Sequence: Synthetic coding sequence
  source 1..723: mol_type = other DNA
atgtttgcagagttttttgggggtcggaaccccttcgacacattctttgggcaacgcaacggtgaggagggaatggatattgatgaccccttctctgggttcccgatgggtatgggcggttttacgaatgttaacttcggaagatcaagaagcgcgcaagagcctgcacgtaaaaagcaggatcccccagtgacgcatgatctgagggtgtcactggaggagatctactctggctgcaccaaaaaaatgaagattagccataaaaggctaaaccccgatggaaaatccattcggaatgaggacaaaatactgaccatcgaggtgaaaaagggatggaaagaggggactaaaataactttccctaaggagggcgatcagacatccaataacatccctgctgacattgtgtttgttctgaaggacaagcctcataatatcttcaagcgggacggcagcgatgtgatttacccggctcgcattagtctcagggaagcactatgtggctgcacagtgaacgtgccaacactcgatggtcgcactataccagtggtatttaaagacgtgatcagacccggaatgcggcgtaaggttccaggggaggggctgccactccccaaaacgcccgaaaagcgcggagacctcatcattgagttcgaggtcattttccctgaaagaatacctcaaacgtccagaaccgtactggaacaggtacttccaatttag

SEQ ID NO: 221089 - DNA, 1230 bp, synthetic construct
  misc_feature 1..1230: note = Description of Artificial Sequence: Synthetic coding sequence
  source 1..1230: mol_type = other DNA
atgtcatccctccgcgcacggctccctgccactcggaggagggtggcacaaccttttgccaggcccgcttccccgagccttgtgccacgttcaggctcggctatggaatctaacaaagatgaggcagaacgctgcatctcgattgctctgaaggcgattcaaagtaatcagccggacagggctctccgattcctagagaaagcgcagcgtctgtaccccactccaagagttagagccctcatcgagtcgctgaatcagaagccacagactgccggagatcaaccacctcctacagacacaacccacgctacccatcgcaaggcaggtggtactgacgctccatcagctaatggtgaggctggcggtgagagtaccaagggttatacagccgaacaggttgctgcagttaagagggttaagcagtgcaaggactattacgagatcctgggggtatcccgtggggcatctgatgaggaccttaagaaggcctacaggcgacttgctctgaaatttcatccagacaagaaccacgcacctggggctaccgaagccttcaaggccatcggaaccgcatatgctgtgctcagtaaccccgagaagcgcaagcagtacgatcagtttggagacgacaaatcacaggctgccagacacggtcacgggcatggggacttccatcggggtttcgaagctgatatttctccagaagatttgtttaacatgtttttcggtggcggattccctagttccaacgttcacgtgtactctaatggcagaatgcgctacacctaccagcagcgccaggataggcgggacaaccaaggggatggaggcttgggcgttttcgttcagctcatgcctattctgattctaatcctagtttctgctttaagccagttgatggtttcgtcacccccttacagcttgagcccccgtccaagcgtcggacatattcacagaagggtgacagaccacctgggcgtcgtgtattacgtaggggatactttcagtgaggaatatacaggaagctcactgaaaaccgtggaacggaatgttgaggatgactatattgcgaacctccgaaacaactgctggaaggagaaacagcagaaggagggactgttgtaccgggctagatatttcggtgacactgatatgtaccatagagcccaaaagatggggacaccatcgtgttctcggctctcagaggtgcaggccagcttgcatggatag

SEQ ID NO: 221090 - DNA, 1230 bp, synthetic construct
  misc_feature 1..1230: note = Description of Artificial Sequence: Synthetic coding sequence
  source 1..1230: mol_type = other DNA
atgtcatccttgcgggcacgactgcctgctacgcgtaggagggtggcacaacccttcgcgaggcctgcctctccaagtcttgtacctaggtccggatctgccatggaatcaaacaaggatgaagctgaaaggtgcatttctatcgccctaaaggcaatccagagcaaccagcccgacagggccctgcgcttcctggagaaggcgcagcgtctgtatcccacacccagagttcgcgctctgatcgagagtctcaaccagaagccacagaccgcaggagatcagccacctccgacagacacaactcatgccacacatcgcaaggcaggtgggaccgacgctccctctgctaacggcgaggcagggggagaaagtaccaaaggctatacagcggaacaggtggcggctgtgaagagggttaaacagtgcaaagactattatgagatccttggagttagccgcggtgcctcagatgaagacctcaagaaggcctatcgtcggctggctctgaaatttcatccagacaaaaaccatgcccctggggcaacggaggccttcaaagccattgggacagcttatgccgtcctctctaatcccgagaagaggaaacagtacgatcagttcggcgacgataagagccaggccgcacgacacggccacggccacggggatttccaccggggattcgaggctgacatttctcctgaggacttgttcaacatgttctttggcggtggcttccccagttctaacgtccacgtgtactcgaacgggaggatgaggtatacgtaccaacaacggcaggacagacgtgacaaccagggggatggtggactcggcgtgttcgtgcagttgatgccaattctgatcctaatactggttagcgcactaagtcagttgatggtatctagtcccccatactccctttccccgaggccgtcagtcggccatatccaccggcgagtgactgaccacctgggggtggtgtattatgtcggtgatacctttagcgaggagtacactggatcaagcttaaagaccgtggagcgaaatgttgaggacgattatatagccaacctcagaaacaactgctggaaggagaagcaacagaaagaaggactcctgtacagagctagatactttggagacactgatatgtatcaccgtgcacagaagatgggaaccccctcgtgtagtcgcttaagcgaggtgcaggctagccttcatggctag

SEQ ID NO: 221091 - DNA, 1128 bp, synthetic construct
  misc_feature 1..1128: note = Description of Artificial Sequence: Synthetic coding sequence
  source 1..1128: mol_type = other DNA
atggagtccaacaaggacgaggctgaacgctgcatatccattgccttgaaggctattcaaagcaatcagcccgatagggcgctgagatttcttgagaaggcccagcgcctgtacccaaccccacgcgttcgggcactgatcgagtccctgaatcagaaaccacagacggcgggagaccagccacctccgaccgatacaactcatgcgacccacagaaaagccggtgggaccgacgcaccctcagccaatggtgaagctggcggagaaagtacaaaagggtatacagctgagcaagtggctgcagtgaaacgagtcaagcagtgcaaggactattacgagatcctgggggtttctcgaggagcctccgacgaagacctgaaaaaagcatatagacgtttagccctcaaattccacccggataagaatcacgcccctggggctacagaagcctttaaggccatcggtaccgcctacgcagtgctgagtaatcccgagaagcgcaaacagtatgaccagttcggggacgacaagtcacaggccgctcggcatgggcacgggcatggggacttccacagaggcttcgaagctgacatttccccagaggatttgttcaacatgttcttcggtggcggattcccatccagcaacgtacacgtatatagcaacggtaggatgcgatacacctaccagcaacgccaggatcgtcgcgacaaccagggagacggcggactgggggtgttcgtacagctcatgcccattttgatcctgattctagtttcagctttatcacaactgatggtgagctcaccaccatacagtctctcacctcgcccttctgtgggccacatacaccgccgagtaacggatcatcttggagtggtctattacgtgggtgacaccttttctgaagagtacaccggctcatccttaaaaactgtggagcgcaacgtggaggacgattacatcgccaacctacgcaataactgctggaaggagaaacagcagaaggagggattattataccgcgctcgatactttggcgataccgacatgtaccaccgtgcacaaaagatggggactccctcctgcagtcgcctttcagaggtgcaagcctcgttgcatgggtag

SEQ ID NO: 221092 - DNA, 975 bp, synthetic construct
  misc_feature 1..975: note = Description of Artificial Sequence: Synthetic coding sequence
  source 1..975: mol_type = other DNA
atggccagctattatgaaatactcgatgtacccaggtcagcgtctgcagatgatatcaaaaaagcgtatcggagaaaagctctgcaatggcacccagataagaaccccgataacaaggagttcgcggagaagaaatttaaagaagtcgctgaagcatatgaggtgctgtccgacaaacacaaacgcgagatatatgacagatacggccgagaaggcctgaccggtacggggactggaccaagccgggcagaggctggtagcggcggaccgggattcacattcactttccggtctcccgaggaagtgttcagagaattcttcgggagtggcgaccctttcgctgaactgttcgatgacctcggcccattctccgagctgcagaaccgcggtagcagacatagtggcccattctttacattttccagctcctttccagggcactcagatttcagcagctcttctttttccttctcgcctggggcaggtgcattcagaagtgtgtcaaccagtacaacttttgtccaggggagaaggatcaccaccaggcgcattatggaaaatggacaggagagggtggaggtggaagaggacggccagctcaaatctgtgaccatcaatggggtgcctgatgaccttgctttgggccttgagcttagtcggagagaacagcagccaagcgtaacgagcagaagcgggggaacacaggtgcagcagacaccagcatcctgccctctcgacagcgacctatcagaagatgaggacctgcagcttgcgatggcatactctctgagcgagatggaggctgccggaaaaaaacccgcaggaggacgcgaagctcagcatcgccgacagggaaggcccaaggctcagcatcaggaccccggactcggcggaacacaggaaggcgcaagaggggaagccactaagcggagtccaagcccggaggagaaggctagccgctgtctcattttgtag

SEQ ID NO: 221093 - DNA, 834 bp, synthetic construct
  misc_feature 1..834: note = Description of Artificial Sequence: Synthetic coding sequence
  source 1..834: mol_type = other DNA
atggcctcatattatgagatactggacgttcctaggtcagcttctgctgatgatattaagaaggcctaccgccgaaaggccctccagtggcatcctgacaagaaccctgacaacaaagaatttgccgagaagaaattcaaggaggtagccgaggcctatgaagtgttatccgacaagcataaacgggagatctatgacaggtacggacgcgaaggactcaccggcaccggtacgggtccgagccgcgcagaggctgggtcaggcggaccgggattcacatttactttccgtagccccgaggaagtgttcagagagttttttgggagtggagatccctttgctgagctctttgacgatcttggacctttctcagagttgcagaacaggggctctcgtcattcaggcccattctttacttttagctcatctttccctggccattctgattttagcagttccagcttttccttttcacccggtgccggagctttcaggtccgtcagtacgtcgacgacattcgtgcaagggaggaggatcaccactcgccgtattatggagaatggtcaagaaagagtggaggtggaggaggatggtcagctgaagtctgtgaccatcaacggggtgcccgatgatttggcgctcggactggagctttctaggagagagcaacagcctagcgtcacctcccgcagcggtggcactcaggtgcagcaaactcccgcaagttgtcccctggattctgatctcagtgaggacgaggacttgcagttggccatggcatactcactgagcgaaatggaagcagccggtaaaaaaccagctgacgtgttctag

SEQ ID NO: 221094 - DNA, 687 bp, synthetic construct
  misc_feature 1..687: note = Description of Artificial Sequence: Synthetic coding sequence
  source 1..687: mol_type = other DNA
atggctagttattacgaaatcctggatgtccccaggtccgctagcgcagatgatattaagaaagcctaccgcaggaaggctttgcagtggcacccagacaaaaacccagacaacaaggaattcgccgaaaaaaagttcaaggaagtcgctgaggcgtacgaggtactgagtgacaaacataagcgggagatctacgacagatacggcagagagggccttacaggtacaggtactgggccttcacgggctgaggcagggtcgggtgggcctggctttaccttcacctttcgcagccctgaggaagtgttccgcgagttcttcgggagcggagacccttttgccgagttgtttgatgacttaggaccattcagcgagctgcagaaccgtggatcccgtcattcgggtcccttttttacctttagttcgagcttcccaggccactctgacttttcctccagttcattttcttttagccccggtgccggagcctttcggtccgtgtccacttctaccacatttgtgcaggggaggaggatcaccacacggaggatcatggagaacgggcaggaacgggtggaggtcgaagaagacggacaactgaaatccgtaacgataaacggagtgccagacgacttggctctaggcctggaactgagcaggcgagaacaacagccaagtgtgacctag

SEQ ID NO: 221095 - DNA, 447 bp, synthetic construct
  misc_feature 1..447: note = Description of Artificial Sequence: Synthetic coding sequence
  source 1..447: mol_type = other DNA
atggcttcatattatgaaatcctagacgtgccacgtagtgcttctgcagatgacataaaaaaagcctatagaagaaaagcactccagtggcatcctgataaaaatccagacaacaaagagttcgccgagaaaaaattcaaggaggtggctgaggcatacgaggtcctgtctgataagcataagagagagatctatgacaggtacggacgcgaaggcttgaccggaactggaaccggcccatcgcgggcagaggctggctctgggggacctgggtttacctttacatttcgctcccccgaggaagtcttcagagagttcttcggaagcggcgatccgttcgcagaactattcgatgatctggggccatttagtgagctgcagaaccgaggttctcgacactctggccctttctttactttttcctcttcgttcccaggccactcgtag

SEQ ID NO: 221096 - DNA, 369 bp, synthetic construct
  misc_feature 1..369: note = Description of Artificial Sequence: Synthetic coding sequence
  source 1..369: mol_type = other DNA
atggcctcctactacgaaattttggatgtgcccagatctgccagtgcggatgatatcaagaaagcgtacagacgaaaggcactgcagtggcaccccgataaaaaccccgataacaaagagttcgccgaaaaaaaatttaaagaagtggcggaagcttatgaagtcctctcagacaagcacaaacgcgaaatctatgatcgatacgggcgtgagggccttactgggacagggaccgggcctagtagagcggaggcagggtctgggggtccaggctttaccttcacattccgctcacccgaagaggtcttccgggaattctttggatctggggatccatttgccgaactgttcgacgacctgggaccgtag

SEQ ID NO: 221097 - DNA, 981 bp, synthetic construct
  misc_feature 1..981: note = Description of Artificial Sequence: Synthetic coding sequence
  source 1..981: mol_type = other DNA
atggtggattactacgaagtgctcggcgtccagagacacgcatctcccgaggacattaagaaggcgtatagaaagttagcactgaagtggcacccagacaagaaccccgagaataaagaagaggcggagagaaagtttaaacaagtggccgaggcgtacgaggtgctgagcgacgcaaaaaagagagatatttatgataaatacgggaaggaggggctcaacgggggtggcggaggcggatctcacttcgacagtcccttcgagttcggttttacatttaggaaccccgacgatgtattcagggagttctttggcggaagagacccatttagttttgatttcttcgaagatccttttgaggatttctttggcaatagacgcggacccaggggatcccgttcccggggaacagggtcttttttctcagcttttagtggatttccctccttcggatcagggtttagtagctttgacacagggttcacctcatttggcagcttagggcatgggggtctcaccagcttttcgagcacatcattcggagggtccggcatggggaactttaagtccataagcactagcactaagatggtaaacggcagaaagatcaccaccaagagaatcgtggagaatggacaagagcgcgtggaagtggaagaggatggtcagctaaaatcactgaccataaatggggttgcagacgatgatgccctcgcggaagagcggatgcgccgtgggcagaacgctttgcctgcacagccagccggactacggccacccaaaccacccagacctgcgtctcttcttaggcacgcacctcactgcctgtccgaggaagaaggagagcaggatcgccctagggcacccggtccttgggatccacttgcttctgctgcagggctcaaggaaggagggaagagaaagaagcagaagcagcgagaggagtcaaagaaaaaaaagtctacgaagggtaaccattag

SEQ ID NO: 221098 - DNA, 378 bp, synthetic construct
  misc_feature 1..378: note = Description of Artificial Sequence: Synthetic coding sequence
  source 1..378: mol_type = other DNA
atggtggactattatgaggtgttaggcgtgcagaggcacgcaagtccagaagacatcaaaaaagcatacaggaaactggcactcaaatggcaccctgacaagaatcccgaaaacaaagaagaggccgagcgtaagttcaagcaggttgccgaggcttacgaggttctgagcgacgctaagaagagggacatatacgacaaatatggtaaagaaggacttaacggtgggggaggaggagggtcccatttcgactctccattcgagttcggcttcacattccggaatcccgacgacgttttccgggagtttttcggcggaagagatcctttttccttcgatttctttgaggatccattcgaggactttttcgggaattag

SEQ ID NO: 221099 - DNA, 687 bp, synthetic construct
  misc_feature 1..687: note = Description of Artificial Sequence: Synthetic coding sequence
  source 1..687: mol_type = other DNA
atggtcgactactacgaggtgttgggggtgcaaaggcatgcatcacccgaggacatcaaaaaggcttatagaaaactggctctgaagtggcatccagacaaaaaccctgaaaataaggaagaggccgagaggaaatttaagcaggttgccgaggcctacgaagtactgtccgatgctaagaagagggacatttatgataaatatggcaaggaaggcctcaacggtggagggggtggcggaagtcactttgactcccctttcgaattcggctttaccttcagaaaccctgacgatgtttttcgtgagttcttcggtggcagggatccgttctcctttgacttctttgaggacccatttgaagatttttttggcaaccgcagaggtccaagagggtcaagaagtagagggacaggaagcttcttcagcgccttttccggtttccctagctttggctcggggtttagtagcttcgatacaggatttaccagcttcgggagtttaggccacggtgggctgacaagtttcagttcgacctcttttggtgggtccggaatgggtaacttcaagtccatcagcacctcaactaaaatggtaaatgggaggaagatcactactaagaggattgtagagaatggtcaggagcgggtggaggtcgaagaggacggccagctcaagtctctgacttag

SEQ ID NO: 221100 - DNA, 648 bp, synthetic construct
  misc_feature 1..648: note = Description of Artificial Sequence: Synthetic coding sequence
  source 1..648: mol_type = other DNA
atggtggactactacgaagtgctgggcgtgcaaagacacgctagcccggaggacatcaagaaagcctatagaaagctcgcccttaaatggcaccccgacaaaaaccctgagaacaaggaggaggccgagaggaaatttaagcaggtcgccgaagcttacgaggtgctctccgatgctaagaagcgcgacatctacgataaatacggcaaagagggcctgaatggaggcggtgggggaggtagccactttgactccccttttgagttcggctttactttccggaaccctgacgatgtcttcagagagttctttggaggaagagatcctttctccttcgacttttttgaggacccattcgaagacttctttggcaatcgcagaggtcctagaggcagccggtctcgcggtacggggagctttttctccgccttttccggcttccccagttttggttcggggttttccagctttgacaccggtttcactagttttggaagcctggggcacggcggacttacgagcttcagctccaccagcttcggcggatctggcatgggtaactttaaatcaatcagcactagcacaaagtggctgatggccgagaaatccctccagcgggaactgagtagaacagtgaagaaggaatag

SEQ ID NO: 221101 - DNA, 726 bp, synthetic construct
  misc_feature 1..726: note = Description of Artificial Sequence: Synthetic coding sequence
  source 1..726: mol_type = other DNA
atggtggattactatgaagtcctgggggtccagcgccacgcctcaccagaagacatcaaaaaagcatacaggaaactggccctaaaatggcacccggacaaaaacccggaaaacaaagaagaggccgagagaaagttcaagcaggttgccgaagcatacgaggtgctctccgacgccaaaaaacgcgatatatatgataaatatggtaaggagggactgaacggaggcggtggagggggttcccactttgattccccttttgaatttggctttaccttccgtaacccagacgacgtgttcagggaattcttcggaggaagagatccttttagtttcgacttctttgaggatccgttcgaagacttcttcggcaatagacgaggacctagaggctcacggtccagagggactggctcattcttttcggctttctccggatttccatcattcgggtccggcttctcttcatttgacacaggcttcacatcattcggcagcctgggccacggagggctcacatccttctcatccacttccttcggcggatctggcatgggtaatttcaaaagcatcagcacgagtacaaaaatggtgaatggtaggaagattactactaagaggatcgtcgagaacggacaggagcgggtggaggtcgaggaggacggacagctaaagtctctgactatcaacggcaaggagcaactcctgagactggacaataagtag

SEQ ID NO: 221102 - DNA, 201 bp, synthetic construct
  misc_feature 1..201: note = Description of Artificial Sequence: Synthetic coding sequence
  source 1..201: mol_type = other DNA
atggtcgactattacgaagtgctgggcgttcagcgccatgcttcccccgaggacattaaaaaagcataccgaaaactcgccctgaagtggcatccagacaaaaatcccgagaataaggaggaagccgagcgtaagtttaagcaggtcgccgaagcctacgaggtgttaagcgacgctaagaagagggacatctacgattag

SEQ ID NO: 221103 - DNA, 138 bp, synthetic construct
  misc_feature 1..138: note = Description of Artificial Sequence: Synthetic coding sequence
  source 1..138: mol_type = other DNA
atggtggactactatgaggttttaggagtgcagaggcatgcctctcccgaagatattaaaaaagcttaccggaaacttgccctgaagtggcatcctgacaagaatcctgagaataaggaggaggccgagcgcaagtag

SEQ ID NO: 221104 - DNA, 441 bp, synthetic construct
  misc_feature 1..441: note = Description of Artificial Sequence: Synthetic coding sequence
  source 1..441: mol_type = other DNA
atggtagattactacgaagtgttgggagtgcaaaggcatgccagccccgaagatatcaagaaggcctaccgcaagctggccctgaaatggcacccagataagaaccccgaaaacaaggaggaagctgaaaggaaatttaaacaggttgctgaagcctatgaagtcctatccgatgccaagaagagggacatatatgacaagtacgggaaggagggtctgaatggcggtgggggaggtgggagtcattttgactctccgttcgagttcggctttacattccgcaacccagatgacgtttttcgtgaattctttggcggaagagacccattctcttttgactttttcgaggatcccttcgaagatttttttggtaatcgcaggggccctcgagggagtcgcagtaggggcaccggttcctttttttccgccttctcagggtag

SEQ ID NO: 221105 - DNA, 636 bp, synthetic construct
  misc_feature 1..636: note = Description of Artificial Sequence: Synthetic coding sequence
  source 1..636: mol_type = other DNA
atggtggactattatgaggtcctgggagtgcagcgtcatgcttcccccgaagatataaaaaaagcttacagaaagttggcactgaaatggcatccagataagaatcccgaaaataaagaggaggccgaaagaaaattcaagcaggtggccgaagcctacgaggtgctctcggacgccaaaaagcgcgacatatatgacaagtatggcaaggaggggttgaacggcggtggcggaggagggtctcacttcgactccccatttgaattcgggtttacgttccggaatcccgacgacgtctttcgagagttctttggagggagagatcccttttccttcgacttttttggagtggccgacgatgatgccctggctgaggagcgcatgaggaggggccagaacgccttgccagcccagcctgccggtttaagacccccaaagcctcccagacctgccagtctgctgcgacatgcgccacattgtttatcagaggaggagggggagcaggatagaccgagggcccctggcccatgggatccgctcgcatctgccgctggcctgaaggaaggaggcaagaggaaaaaacagaagcagcgcgaggaaagcaaaaagaagaagagtaccaaaggcaatcactag

SEQ ID NO: 221106 - DNA, 834 bp, synthetic construct
  misc_feature 1..834: note = Description of Artificial Sequence: Synthetic coding sequence
  source 1..834: mol_type = other DNA
atgccacatcccagaatacttaaacgacctaagaagcgcgatatttacgataaatatgggaaagagggcttgaacgggggtggaggtggtggctctcacttcgattctccattcgaattcgggttcactttccggaacccagatgatgtgtttcgggagttctttggaggaagagatcccttttctttcgacttttttgaggaccctttcgaagatttttttggaaatcgtaggggcccacgaggttctcgatcgagaggcacgggctcttttttcagcgcttttagtggtttcccgtcttttggatctggcttctcaagttttgacacaggattcactagctttggctcactcggtcacgggggtctcacgtcctttagcagcacgtcttttggtggatccgggatgggcaatttcaaatcaatctcaacctccactaagatggtaaatgggcgaaaaattactactaagcgcatagtggaaaatggacaagaaagagtcgaagtggaagaagacggacaactgaagtccctgaccatcaatggcgtcgcagacgacgatgcccttgctgaagaacggatgcggcgtggccaaaacgcactccctgcacagcctgctggcctgaggcctccaaaaccacctcggccagcttctctgctgaggcatgcaccacattgccttagcgaggaagaaggagagcaagacaggcccagagcccctggcccatgggaccctctggctagtgctgcgggacttaaggagggcggtaaacggaaaaagcagaagcagagggaagaatctaagaagaagaagtcaactaaaggcaaccactag

SEQ ID NO: 221107 - DNA, 297 bp, synthetic construct
  misc_feature 1..297: note = Description of Artificial Sequence: Synthetic coding sequence
  source 1..297: mol_type = other DNA
atggtggactattacgaggttctgggggtccagcgtcatgcatctccagaagatattaaaaaggcttacaggaagctcgccctaaagtggcacccagataagaaccctgaaaacaaggaggaagctgaacgaaaattcaaacaggtagcagaagcttatgaggtgctctctgatgcaaaaaagcgcgatatttatgacaagtacgggaaggaaggactgaacgggggaggcggtggaggctctcactttgactctccatttgagttcggctttacttttagaaacccggatgactag

SEQ ID NO: 221108 - DNA, 672 bp, synthetic construct
  misc_feature 1..672: note = Description of Artificial Sequence: Synthetic coding sequence
  source 1..672: mol_type = other DNA
atggcaacaccacagtctatcttcatttttgccatatgcattctgatgatcaccgagctgatccttgccagtaagagctactatgatattctgggtgtgccaaaatccgcttctgagcggcagatcaagaaggcgtttcacaaactcgccatgaagtatcatcctgacaagaacaagtcgccagacgcagaagcaaaatttcgggaaatcgcagaagcctatgagaccctgtcagacgctaatcgaaggaaagaatatgatacactcggccactccgcattcacaagtgggaaggggcagcggggttccgggtcgtctttcgaacaatctttcaattttaactttgatgacttgttcaaggacttcggatttttcggacagaatcagaatactggttctaagaaacggttcgagaatcattttcagactaggcaggacgggggttcctcacgtcagcggcaccatttccaggaatttagtttcggcggtggcctgtttgatgacatgttcgaggatatggaaaaaatgttttctttttccggatttgactctaccaaccagcacactgtacaaaccgaaaacagatttcacggatcaagtaaacactgccggaccgtgacccagcgacgcggaaacatggtcaccacttacaccgattgttcaggacaatag

SEQ ID NO: 221109 - DNA, 2382 bp, synthetic construct
  misc_feature 1..2382: note = Description of Artificial Sequence: Synthetic coding sequence
  source 1..2382: mol_type = other DNA
atgggggtgtggctgaataaagatgattacataagagaccttaagcggatcatcttatgttttctgattgtgtatatggccatcttggtcgggaccgatcaggatttttattcactgctgggcgtcagtaagacagcatctagccgcgaaatccgacaggcattcaaaaagctcgctttgaagctgcatcctgataagaatcctaataatccaaacgctcacggcgattttctcaagattaatagggcatatgaagttttgaaggacgaagatctaaggaagaagtacgacaaatacggcgaaaagggtctcgaagataaccagggcggtcagtatgaatcttggaattactaccggtatgactttgggatatacgacgatgacccagaaatcattactctggagagacgggagtttgacgccgcagtcaactcaggagagttgtggtttgtgaacttttattcacctggatgttctcactgccatgatctcgccccaacatggcgggactttgctaaagaggtagacggactgctccgcattggagcggtgaactgcggagacgataggatgctgtgccgtatgaaaggtgtcaacagctacccctcactgttcatctttagatccggcatggcgccagtgaaatatcacggagacaggagcaaagagtctcttgtgtcattcgccatgcagcacgtcagaagcacagtcaccgaactgtggacaggcaatttcgttaattctatccaaacagcttttgctgcaggcatcggatggttgattacattttgtagtaagggcggtgactgtcttacctctcagaccagactgcgactgtctgggatgctcgacggtcttgtgaatgtggggtggatggattgtgccacacaagacaacctatgcaaaagcttagatattaccactagtacaacggcctactttcctccaggagcgacactgaacaataaggagaaaaacagcatacttttccttaacagcctggatgctaaggagatctacttggaagtcatccacaacctgcctgacttcgagctgctgagcgctaatacgcttgaggatcggcttgcccaccatcgctggcttctgttttttcattttggcaagaacgaaaactccaatgacccagagctgaaaaagctgaaaacgctgctcaagaacgaccacatccaagttggcaggttcgattgctctagcgctcccgatatatgttccaatctgtacgtgttccagccctctctggccgtgtttaagggccagggcacaaaggagtatgagatccatcacgggaaaaagatcttgtacgacatactggcatttgcaaaggagtccgtcaactcccacgtgaccacactggggccacaaaatttccccgcaaacgacaaagaaccttggctagtggatttctttgcaccctggtgtcccccatgcagagctctactgccggaacttcggcgtgccagtaacctgctttatggacagctgaagtttggcactttggattgtactgtgcatgaagggctatgcaatatgtataatattcaagcttatccaacaactgtggtattcaaccagtccaacatccacgagtatgagggccaccactccgctgagcagatcctggagttcattgaggatctcatgaacccctctgtggtctccctcacccccacaaccttcaacgaactggtcacccaaagaaaacacaacgaagtgtggatggtggatttttactctccgtggtgccacccctgccaagtgctgatgccggagtggaagagaatggcacggaccctgaccggcctgattaacgtgggctccattgattgccagcaatatcactctttctgcgcccaggagaacgtgcagcggtatcccgagatacgattttttccccctaagtccaacaaggcctaccactatcattcctataatggctggaatcgggatgcttattccctcagaatatgggggctaggtttcctgccacaggtatctactgacctcactcctcagactttctcagagaaggtgttgcaggggaaaaatcattgggttattgacttttacgcaccttggtgcgggccttgtcagaatttcgcgccagagttcgaattgctcgcacggatgatcaagggaaaggtaaaagctggtaaggtcgattgccaggcatacgctcagacttgccagaaggccggaataagggcatacccaacagtgaagttctacttttacgaacgggcaaagagaaatttccaggaggagcagatcaatacacgcgatgccaaagctatcgctgcactgataagtgagaagctggagacactcaggaatcaggggaaaaggaacaaggacgagctctag

SEQ ID NO: 221110 - DNA, 2244 bp, synthetic construct
  misc_feature 1..2244: note = Description of Artificial Sequence: Synthetic coding sequence
  source 1..2244: mol_type = other DNA
atgggagtctggctgaacaaagacgactatattagagaccttaagcgaatcatcttatgctttttgattgtatacatggcaatcctggtcgggaccgatcaggacttctattcactgctgggggtcagtaaaacggccagctcccgggagattaggcaggcttttaaaaagttggctttgaaacttcatccggataaaaatcctaacaatccaaacgctcacggggattttctgaagatcaatcgtgcctacgaagtgcttaaggatgaggatctgcggaagaagtacgacaaatacggagaaaagggactagaggacaatcagggaggccagtacgaaagctggaattattatagatatgacttcggcatttatgatgatgaccccgagataataacgctggaaaggcgagaattcgatgcggcagtgaattcaggcgaactgtggttcgtgaacttctactctccaggatgcagccattgccatgacctggcacctacctggagggacttcgcgaaggaagtggacggactgttgcgcataggggctgtgaattgtggagatgacagaatgctctgccggatgaaaggggttaatagttacccctctttatttatatttcgaagtgggatggcacctgtaaaatatcacggcgacaggtcaaaagaatccctggtgtcattcgcaatgcagcatgtgcgttccacagtgacagaattgtggacaggaaattttgttaactctattcagaccgcatttgcagctggtattggttggctgattactttttgtagtaaggggggagattgcctcacatcacagactcggctcagactgagcggaatgctatttcttaactctctggatgctaaggagatctatctggaggttatccacaacttgcccgacttcgagctcctttcagccaataccctcgaagaccgactcgcccatcatcgctggctgctgtttttccacttcggtaagaatgagaacagcaacgacccagaactgaaaaagcttaagacattactgaagaatgatcacattcaggttggaagatttgactgctccagcgcaccagacatatgttccaatttgtacgttttccagccttcactggccgttttcaagggccaggggacaaaggaatatgagattcatcatggaaaaaagattctctatgatattctggctttcgccaaagagtcggtgaatagtcacgtcaccaccttggggcctcagaattttcctgctaatgataaggagccttggctggtcgacttctttgccccatggtgccccccttgccgggctctcctgccagagctgagaagggcatcgaatctactctacgggcagctgaaattcgggacactggattgcacagtgcatgagggcctgtgtaacatgtacaacatccaagcctatccaaccacagtagtgtttaaccaatctaacatccatgagtacgagggtcatcactccgccgagcagatcttggagttcatagaggacctgatgaacccgagcgtggtctcactcacacccactactttcaacgaattggtcacgcagcgaaagcataacgaggtctggatggtcgacttctactcaccctggtgccacccatgccaagttctgatgcccgaatggaagcggatggcacggaccttgaccggactgatcaatgtgggtagcattgactgccaacagtaccactcattctgcgcacaggagaacgttcagcggtatcctgagattaggtttttcccccctaagagtaacaaggcataccactatcactcttacaatgggtggaaccgtgacgcctactccctcaggatctggggactcggctttctaccacaggtgagtaccgaccttactccgcagactttctctgaaaaggtgctccagggaaagaatcactgggttattgatttctacgccccttggtgcggtccgtgccagaactttgccccagaattcgagctgctcgcacggatgatcaagggaaaagttaaagctggtaaagtggactgtcaagcctatgctcaaacctgccagaaagccggaatcagggcctacccaaccgtgaagttttacttttacgagagggctaaaaggaatttccaggaggaacagataaacaccagagatgcaaaggctatcgccgcacttatatctgaaaaattggaaacacttcgtaaccaggggaaaaggaacaaggatcacttgtag

SEQ ID NO: 221111 - DNA, 534 bp, synthetic construct
  misc_feature 1..534: note = Description of Artificial Sequence: Synthetic coding sequence
  source 1..534: mol_type = other DNA
atgggggtatggctgaacaaggatgattacatcagagatttgaaacggattattttatgttttttgatagtgtatatggccatcttggtcggcaccgaccaggatttttactccctgctcggggtcagtaagactgctagctctagggaaataagacaagctttcaaaaaactcgcactcaagctccaccccgacaaaaatcccaataatccgaatgcccatggagactttctgaagattaaccgcgcatatgaagtgctgaaggatgaagatcttcgtaagaaatacgataagtatggagagaaaggtctggaagacaaccagggaggacagtatgagagctggaattactacaggtatgacttcggtatatacgacgatgatccagaaattattactctggaaaggcgcgaatttgacgccgcagtgaactctggcgagttgtggtttgttaacttctatagccccggatgttcccattgtcacgatttagctcccacatggcgcgacttcgccaaagagtctctccggtag

SEQ ID NO: 221112 - DNA, 999 bp, synthetic construct
  misc_feature 1..999: note = Description of Artificial Sequence: Synthetic coding sequence
  source 1..999: mol_type = other DNA
atgggtgtgtggttgaacaaggatgactacatccgcgaccttaaacggatcattctctgttttctaatcgtctacatggccattcttgtaggcactgatcaagatttctactctttactcggagtgtccaagactgccagctccagggagatccgccaggcttttaagaagctcgctctgaagctccaccccgacaaaaaccccaataaccccaacgctcacggtgactttctgaagataaatcgggcatacgaagtattgaaggatgaagacctgagaaagaagtatgacaagtatggggaaaagggcctggaggacaatcaggggggacagtacgagtcctggaactactaccgctatgactttgggatttatgatgacgacccagagatcatcaccttagaaagaagggagtttgatgctgcagtcaactcaggagaactttggtttgtaaatttttacagccctgggtgttcacattgccacgacctggccccaacatggagggactttgcgaaggaggtggatgggctcctgcggattggggctgtcaactgtggagatgatagaatgctttgtagaatgaagggtgtcaattcctacccctcacttttcatcttcaggagcggaatggcccctgtgaagtaccacggggatagatccaaagaaagcctggttagcttcgcaatgcagcacgtgcggtctactgtaaccgagctgtggactgggaatttcgtcaactccatccagaccgcatttgccgcagggattggatggctcatcaccttttgttcaaaggggggagattgcctgacctcccagactagacttagactttctggaatgctggatgggttggtgaacgtaggatggatggactgtgcaacccaagataatctgtgtaagtcactcgatatcacaacgagcaccaccgcctacttccccccaggggctacgttaaataataaggaaaagaactccattctgctcctacattag

SEQ ID NO: 221113 - DNA, 6732 bp, synthetic construct
  misc_feature 1..6732: note = Description of Artificial Sequence: Synthetic coding sequence
  source 1..6732: mol_type = other DNA
atgaatatcatacgagagaacaaagacttggcgtgtttttacacaaccaagcatagctggcggggaaagtataaaagagtgttctctgttggaacgcacgcgatcactacctataatccaaacacattggaggtgacgaatcagtggccatatggagatatctgttcgatcagtccagtcgggaaggggcagggaaccgagttcaacctcacctttaggaaggggagcgggaagaaatccgaaacactgaagttctccaccgaacaccgaaccgagctgcttactgaggctctgcgtttcaggactgattttagtgagggcaagattacaggacgacggtacaattgttacaagcatcactggtccgactcacgcaaaccagtcatcttagaagtcacacccggaggatttgatcagatcaatcctgctaccaacagggtcctctgctcatatgactaccgcaatattgaaggctttgtagacttatccgattaccaggggggtttttgcattctgtacggagggtttagcaggttgcatttgtttgcctccgaacaaagggaggagatcatcaagtctgccatcgatcatgctgggaattacattggcatcagcctgcggattcggaaggaaccactagagttcgagcagtacttaaatctgcgtttcgggaaatacagcacagacgagagcataacatctttagccgagtttgtggtgcagaaaatcagccctagacattccgagccagtcaaacgcgtcctggcactaacagaaacatgtctagttgagcgcgatccggctacatacaatatagcaacactgaagcctttaggcgaggtgtttgctctggtgtgtgacagcgaaaacccccagctctttacaatcgagttcatcaagggccaggttcgtaaatactctagtacagagagagacagtctgcttgcatcattgttggacggtgtgcgtgcatctggaaacagggacgtatgcgtgaaaatgacaccgactcacaaaggtcaaagatgggggcttctctccatgcctgttgacgaggaggttgagtccctacacctgagatttctggcgacacctcccaatggaaacttcgccgacgcagtgttccgctttaatgctaacattagctattccggagtcttgcacgccgtgacccaggatgggcttttctctgaaaataaggaaaaactcattaacaatgctataacagccctcctgagtcaggagggtgacgtcgttgcgtctaacgccgaactggaaagtcaatttcaggccgtgcgcagacttgttgcctccaaggcaggctttctcgcattcacacagctgcccaagttcagagagcgcttgggcgttaaggtcgtgaaggccctaaagcgaagcaataacggcatcatccacgccgctgtggatatgctgtgcgcccttatgtgtccaatgcatgacgactatgatctgcgtcaggaacaactgaataaagcctccctgctctcgagcaaaaagtttctggagaacctgctggagaagtttaactcccacgtggatcatggcactggagctctggtgatcagctcactccttgattttctgacattcgcattgtgcgccccttactccgaaacgacagagggccaacaattcgatatgctcctggagatggtggcatctaacggcagaactctgtttaagctgttccagcatcccagtatggcaataattaaaggggctggcttggtgatgaaagccattatcgaagagggtgacaaagagatcgcgacaaagatgcaagaacttgccctcagcgaaggcgcactgccgaggcatttgcataccgccatgtttacaatcagttcagatcagcgaatgcttaccaaccggcagctgtcccggcatttagtgggcctgtggaccgcagataacgctacagcaactaatcttctgaagcggatcctgcctccaggtttactcgcgtacctggagtcgagcgatctcgttccagaaaaggacgcggatcgtatgcacgtgcgggataatgttaaaatcgctatggaccagtacggcaagtttaataaggtgccagagtggcagcgcctggctgggaaagccgcaaaggaggtggagaagtttgcgaaggagaaggtcgatcttgtgcttatgcactggcgggatcgaatggggatcgcccagaaggagaatatcaaccagaagccagtggttttacgtaagagacgacagcgaattaagattgaggctaactgggacctgttctattatcggtttggacaggatcacgcccgaagcaatctgatctggaatttcaagacccgtgaggaacttaaggacacactggaaagcgagatgcgcgctttcaatattgaccgggaactaggcagcgctaacgtcatctcttggaatcaccacgaatttgaggtcaaatatgaatgcctggctgaggaaattaagatcggcgattactacctgagactccttttggaggaggacgagaacgaggaatctggctctatcaagaggtcctacgagttctttaatgagttataccatagattcctcctgacaccaaaagtgaacatgaaatgtctgtgcctgcaggcgttggccatcgtatacgggaggtgccacgaagagatcggtccatttaccgacacacggtatatcattgggatgctggaacgctgtaccgataaacttgaaagagataggctgatacttttcctgaacaaattgatcctgaataagaagaatgtgaaggacctgatggatagcaatggtatcaggattctggtggatctgctcacgcttgcccatttacatgtctctagggccacagtcccgctccagagcaacgtaattgaggctgctcctgatatgaaacgagagtctgagaaagagtggtattttggcaacgccgataaagaaaggtctgggccttacggcttccacgagatgcaggaactctggacaaagggcatgctcaatgccaaaacacgttgttgggcacagggaatggacggctggcgcccactgcagtctatccctcagctgaaatggtgcttgctggctagcggacaagccgtcctgaatgagacagatctggccacgttgatcctgaatatgcttatcacgatgtgcggctactttccaagcagggaccaggataacgctatcatccgacccttacctaaggtcaaacggctgcttagcgactccacctgtctcccgcatatcatacaactgctgttgactttcgatcctatcctggtcgaaaaagtggcaatcctcctgtatcacatcatgcaagacaacccacagttgcctcgactctatctgagtggggtgttcttcttcatcatgatgtataccggaagtaatgtcctgccagttgctagatttttgaagtacacacacaccaaacaagcattcaagagcgaggaaactaaaggccaggacatattccaacgcagcattttaggtcatatcctaccagaggccatggtgtgctacctggaaaattatgaacctgagaaattttcggagatttttctcggcgagttcgatacccccgaggcgatttggagttctgaaatgcgtagactgatgatcgaaaagattgcagcacatttggccgatttcacacctaggctgcagtctaacacaagagcgctttatcagtactgtcccatccccatcatcaattacccccagctcgagaacgagctattttgcaatatttactacctgaagcaactttgcgacaccctgagatttcccgattggccgattaaagaccccgtgaaattgctgaaggacactctggatgcttggaaaaaagaagtggagaagaaaccaccaatgatgagcattgacgacgcttacgaggtattaaatcttccacagggccagggacctcacgacgagagcaaaatcaggaaggcctattttaggctcgcacaaaagtaccatcctgataagaatcctgagggcagagatatgttcgagaaggtcaataaagcctatgagttcctttgtacaaagagcgcaaaaatcgtcgacggccctgatccggagaacatcatcttaatcttgaagacccagtcaatccttttcaacagacataaggaggacttgcaaccatacaaatacgccggataccctatgctgatccgcaccatcacgatggaaaccagtgacgacctgctcttctcaaaagagagccctctcctgcctgctgctacggaacttgcattccatacagtgaattgctcggccctcaatgcagaagagttgcgtagagagaatggcttggaggtgctccaggaagcattcagccgctgtgtcgccgtacttacaagagcaagtaaacccagcgacatgtcggttcaggtttgcggatatatctcaaagtgctattccgttgccgctcagtttgaagagtgccgagaaaaaattaccgaaatgccctccatcatcaaagacctctgtagggttttgtatttcgggaagtccattccacgagtggcggcattgggagtcgaatgtgtgtcgagtttcgctgtggatttctggctccagacccacctgtttcaagcgggaatcctgtggtatttattaggattcctttttaactacgactataccctggaagagagcgggatccagaagagcgaggaaacgaatcagcaggaggtggcaaattccctggcaaaattgtctgtccacgctctgagccgcctgggtggttacctggccgaagaacaggccacccccgagaatccaacaatcaggaaatcccttgctggcatgcttactccctacgtggcccgaaagctcgccgtggcctcagtgaccgagattcttaagatgctgaattcaaacaccgaaagtccatacctcatctggaacaattctactagggccgagctgctcgagttcttggagtctcagcaggaaaatatgatcaagaagggcgactgtgataaaacttacggcagtgaattcgtttacagcgatcacgccaaggaactaatcgttggcgagattttcgtccgtgtgtataacgaggtgcccacttttcagcttgaggtgcccaaggctttcgcagccagcttgttagactatattgggagccaggcccaataccttcacacctttatggccattacacacgctgcaaaggttgaatcagagcagcatggcgaccgtcttcctagggtggaaatggcactggaggccttgagaaacgtcatcaagtacaatccgggatctgaatctgaatgcatcggccattttaaactgatattcagcctactgcgtgttcacggagcaggccaggtacagcagctcgcgctggaggtggtgaacattgtgacctcaaaccaggactgcgtaaataacatcgcagagtctatggtcctgtccagcctgctcgcactgcttcactcgctgccaagctccaggcaactcgtactcgaaacgctgtatgccctgaccagctctaccaaaatcatcaaagaagccatggctaaaggggctttaatctatctactcgatatgttttgtaacagcactcatccgcaagtgcgggctcaaaccgccgagctgttcgccaagatgacggcggacaaacttatcgggcctaaagtgagaataaccctaatgaaattcctgcccagtgtattcatggacgccatgcgtgataatcccgaggctgcagtccatatcttcgaaggaactcatgaaaaccccgagctgatatggaacgataattctagagataaagtttctaccactgtgagagaaatgatgctggagcactttaaaaaccagcaggataatcctgaggctaactggaagctccccgaagattttgctgtggtgttcggggaggcagaaggagagctggctgtcggtggcgtgttcttgcgcatttttatagctcagcccgcttgggtccttcggaaaccccgagaattccttattgccctgctcgagaagttgaccgaactgctcgagaagaacaatccacacggcgagaccctggagaccctgaccatggcgactgtatgtctcttcagcgctcagccacagctcgctgatcaggtacctcctcttggccatctgcctaaggtgatccaggctatgaatcaccggaacaatgcaatacctaagagcgcaattcgagtgatacatgcactcagtgagaacgaattgtgcgtgcgggcaatggccagcctcgagaccatcggccctcttatgaacggcatgaagaagcgggctgatactgtgggcctggcctgcgaggccatcaaccgcatgtttcagaaagaacagtccgagctggttgctcaagcactcaaggcggatctggtcccttatctgttgaaacttttagagggtatcggactcgaaaatttggactcccccgctgctaccaaggctcagatagtaaaagcattgaaggcaatgacgcggagcctccaatatggcgaacaggtcaacgaaattctttgtaggagcagcgtgtggagtgccttcaaggatcagaagcacgatctgttcatttccgaaagtcaaacggctggctatctgactggccctggggtggccggatacctcacagcaggaactagcacctccgtcatgagtaatctgcctcctccagtggatcatgaggctggtgacttggggtatcaaacatat

SEQ ID NO: 221114 - DNA, 2673 bp, synthetic construct
  misc_feature 1..2673: note = Description of Artificial Sequence: Synthetic coding sequence
  source 1..2673: mol_type = other DNA
atgtaccagatttcaaagaattcaggctgggccaggagtcgggagtataattttaacctgaagacccaatctatactctttaacagacataaagaggacctccaaccctataaatacgcaggctatccaatgctgattaggacgatcacaatggagacaagcgatgacctgctcttttctaaggaatcacctttactaccggctgctaccgagctcgcgttccacaccgttaattgctcagccctgaatgctgaggaactgcggagggagaacggcttagaagtgctgcaggaagctttttcgcgctgcgtcgcggtgctcaccagagcctccaagccatcagatatgtccgtccaagtatgtggctacatttctaagtgctatagcgtggctgcccagttcgaggagtgccgcgaaaaaatcacagagatgcccagcatcattaaagatctatgcagggtgctgtatttcgggaaatcgatccctcgagtggccgctctgggagttgaatgcgtcagctctttcgccgttgacttctggctgcaaactcatctctttcaggccggaattttgtggtacttgctaggcttcctattcaactacgattacactctggaggaatcaggtattcagaaatctgaagaaaccaaccagcaggaggttgccaacagtctggccaaactctccgttcatgctttatcccggctagggggatacctggccgaggagcaggcaacaccagagaaccccaccattcggaagtcgctggctggaatgttgactccatacgtcgcgaggaaacttgcagtggcctcagtgaccgaaatacttaagatgctcaactcaaacaccgaatctccctacctgatctggaacaactcaacacgcgctgaactgctggagttcctagagagtcagcaagagaatatgatcaagaagggagactgcgacaaaacatacggtagcgagttcgtttactctgatcacgcaaaagagttgattgttggcgaaatcttcgtgcgcgtctacaacgaagtgcctactttccagctggaggtaccaaaggctttcgccgcttcactactcgactatatcggcagccaggcccagtatctccatacctttatggctattacacatgctgcgaaggttgagtctgagcagcacggggatcggctgccgagagtcgaaatggctctggaggctctccggaatgtgattaaatacaaccccggtagcgaatccgagtgcatcgggcatttcaaactcattttctccttgcttcgcgtacacggcgcaggtcaggtccagcaactagccttggaggttgtgaacatcgtcacatctaaccaggactgtgtgaacaatatcgccgagtctatggtgctgtctagcctgttagcgctgctgcattctcttccatcatcacgtcagttagtcctggaaactctttacgccctgacaagttccacgaaaattatcaaagaggccatggctaaaggagcactcatctacctgctggacatgttctgcaactctacgcatccccaggtccgagctcaaaccgctgagctgttcgcaaagatgacggcagataagcttattggccctaaagttcggatcacattgatgaagtttctgccctccgtgtttatggacgctatgagggacaatccagaggccgcagtgcatatatttgagggtacgcatgaaaatcctgaactgatctggaacgataattctagggacaaagtcagtacgactgtgcgtgagatgatgctggagcactttaaaaatcagcaagataatccggaagcaaactggaaattgccagaggactttgccgttgtgtttggggaagctgaaggggagctggccgttggcggagtgttcctgcgaatcttcatagcccaacccgcttgggtgctgcgcaagccgagagagtttctaatcgcccttctggagaagctcactgaactgcttgagaagaataaccctcatggagaaacactggaaaccctcaccatggctacagtgtgtctttttagcgctcagccacaactggcagatcaggtcccacctctgggccatctaccgaaagttatccaggcaatgaatcaccgaaacaatgccattcctaagtccgccatccgcgtcatccatgcactgtccgagaatgagctgtgtgttagggccatggcatcgctcgaaacgattggacccctgatgaatgggatgaaaaagcgcgcagacaccgttggcctggcctgcgaggccatcaacagaatgttccagaaggagcagtcagaactggtggcccaggccctgaaggcagacttagtgccttacttgttgaagctgctggagggcattgggctggagaaccttgacagccctgcggcaacaaaggcacagattgtcaaggcgttaaaggctatgacaaggtcattgcaatacggtgaacaggtgaacgagatactttgtcgcagctccgtctggtcggctttcaaggaccagaagcacgacttatttataagcgaatcgcaaactgcaggatatcttacgggtccgggtgtcgccggatacctgaccgctggcacttcgacttcagtcatgtccaacctgccacctccagttgatcacgaagccggtgacttaggctatcaaacctag

SEQ ID NO: 221115 - DNA, 351 bp, synthetic construct
  misc_feature 1..351: note = Description of Artificial Sequence: Synthetic coding sequence
  source 1..351: mol_type = other DNA
atggcgagcaccgtggtggctgtgggattaactattgccgcagctggctttgctggacggtacgtgttgcaggcaatgaaacacatggaaccgcaggtgaagcaagttttccagtctctcccaaaatccgcgttcagcggaggatattaccgaggtggcttcgagccgaagatgaccaagcgggaagctgctcttattcttggcgtgtcacccaccgccaacaaggggaagattagggacgcgcatcggagaatcatgctgctgaaccatcctgataagggagggtcgccctacatcgccgcaaagatcaacgaggccaaagatctcttggaaggccaagccaagaagtag

SEQ ID NO: 221116 - DNA, 1707 bp, synthetic construct
  misc_feature 1..1707: note = Description of Artificial Sequence: Synthetic coding sequence
  source 1..1707: mol_type = other DNA
atgcttctgctccccagcgcagccgacggacggggaacagccatcacacatgcactgacctcagcatccacgttgtgccaggtggagccagtcgggagatggtttgaagctttcgtcaaaaggcgcaatcggaatgccagtgcttcctttcaggagctcgaggataagaaagaattgtcagaggagtccgaggatgaagaactgcagttggaagagtttcctatgctgaaaacactcgaccccaaggactggaaaaaccaagatcactatgccgtgcttgggttggggcatgtgagatataaggcaacccagcgacagatcaaagccgctcacaaggcaatggtactgaagcatcatccagataaacgtaaggccgcaggggaacccattaaagagggggataatgattactttacctgtatcaccaaggcctacgagatgttgagtgacccagtgaaaaggcgtgcattcaattccgtcgaccctacattcgacaactctgtgcccagtaagtccgaagctaaggacaatttttttgaggtttttactccagtttttgagaggaacagccgctggtccaacaagaaaaatgtccctaagctgggtgatatgaatagtagcttcgaggacgtggatatcttctacagtttctggtacaatttcgacagctggcgggaattttcatacctggatgaggaggaaaaggaaaaggcggagtgcagggatgagcggagatggattgagaagcagaacagggccactcgcgctcaacgcaagaaagaggagatgaacaggattcgaacactggtagataatgcatattcttgcgatcccaggatcaagaagttcaaggaggaagagaaagcaaagaaagaagcggagaagaaggccaaggccgaagcaaagagaaaagaacaggaggccaaggaaaaacaacgccaggcagaactggaggcagcgagattagccaaggagaaagaggaggaagaagtccggcagcaggctctgctcgctaagaaggaaaaagacatccaaaagaaagctatcaagaaggaacggcagaaactgaggaattcatgcaaaatagaggaaataaacgagcagatacggaaagaaaaggaagaagccgaagcacgcatgagacaggcttccaaaaacacagagaaatctaccggaggcggagggaatggctccaagaattggagtgaagatgatctccaactgttaatcaaggccgtgaatctcttcccggcaggtaccaactctaggtgggaggtaatagccaattatatgaacattcatagttctagtggagtgaaacgcactgccaaggacgtcatcggcaaggccaaaagccttcagaaactggaccctcatcagaaggatgatatcaataagaaagctttcgacaagtttaagaaagaacacggtgtagtgccccaagcggataatgccactccgtctgaacggtttgagggcccttatactgatttcacgccttggactacagaagagcagaaacttctggagcaagcactgaaaacgtatcccgtgaacacacccgaaaggtgggagaaaatcgccgaagccgtcccaggcaggaccaagaaggactgcatgaagagatacaaagagctggtggaaatggtgaaggccaaaaaagcagcgcaggaacaggttttgaatgcaagccgtgcaaagaaatag

SEQ ID NO: 221117 - DNA, 1866 bp, synthetic construct
  misc_feature 1..1866: note = Description of Artificial Sequence: Synthetic coding sequence
  source 1..1866: mol_type = other DNA
atgttattgcttccttctgccgctgacggcagaggaacagcaattacacatgctctgacctcagctagcactctttgtcaagtagagcccgtgggccgatggtttgaagctttcgtgaagcgcaggaatagaaatgcatctgcctccttccaggaacttgaggacaagaaggaattgtcagaagagtctgaggatgaggaactgcagctggaggagttcccaatgttgaaaaccctggatcctaaggattggaaaaatcaggatcattacgccgttttgggtctgggacatgtacgctataaagcgacccagcgccagattaaggctgcccataaagccatggtgctaaagcatcacccagacaagcggaaggctgccggagagcccatcaaagaaggtgataatgattactttacatgcatcaccaaagcctatgaaatgctttctgacccagtgaagaggagggcctttaacagcgtggaccctaccttcgacaactccgttcccagtaagtcggaggcgaaggataatttttttgaggtgttcaccccagtgtttgagagaaactcccggtggtctaacaagaaaaatgtgcctaagctaggcgatatgaatagctccttcgaggacgtggatattttttattccttctggtataacttcgattcgtggagggaattctcctatcttgatgaggaggagaaagagaaggctgagtgtcgcgacgaacgtaggtggatcgagaagcagaatcgagccactagagcgcaaagaaaaaaggaggagatgaataggatccggacgttggtcgataacgcatattcatgtgatcccagaatcaaaaagttcaaagaggaagagaaagctaaaaaagaggctgagaaaaaggccaaggccgaggctaagagaaaggaacaggaggcgaaagaaaagcagaggcaggccgagctggaggctgccagactcgcgaaggagaaggaggaggaggaggttagacagcaagcattgctggctaagaaggaaaaagatatccagaagaaagctataaaaaaggaaaggcaaaaactccgtaattcatgtaaaacctggaaccacttctccgataacgaggcagaaagagtaaagatgatggaagaggtcgagaaactgtgtgacagactggagctagcaagcttacaatgtctgaacgagaccctcacaagttgcactaaagaggtagggaaggcagccttggagaagcagatcgaggaaatcaatgaacaaatccgcaaagagaaggaggaggcggaggctaggatgaggcaagcctctaagaacaccgagaagtccactgggggagggggtaatggaagcaaaaactggagcgaggatgatcttcagctgctgatcaaagccgtcaacttgttccctgcagggactaattcacgatgggaagtgatagccaattatatgaacattcactccagtagcggcgtgaaacgaaccgcaaaagatgttatcggaaaagctaagtctctgcaaaaactggatcctcaccaaaaagatgatattaacaagaaggcgttcgataaatttaagaaagagcacggcgtggtccctcaggcagacaatgcaacaccaagcgagcggttcgaaggcccttatactgattttaccccttggaccactgaggaacagaaattgctggaacaggctctgaagacgtaccctgttaacacccctgaaaggtgggagaagattgccgaagccgttccgggacggactaagaaagactgtatgaaacgttataaggagctggtggaaatggtcaaagctaagaaagccgctcaggagcaggtgcttaacgccagtcgtgccaagaagtag

SEQ ID NO: 221118 - DNA, 609 bp, synthetic construct
  misc_feature 1..609: note = Description of Artificial Sequence: Synthetic coding sequence
  source 1..609: mol_type = other DNA
atgctcctgttgccaagcgcggctgacggccgaggaacggcgatcacccatgctctgacgtccgcctccaccttgtgccaggtggaaccggttgggcgatggttcgaggccttcgtcaagcgccgaaacaggaatgcatcagccagctttcaagagttggaggacaagaaggagctgtccgaggaaagcgaagacgaggaattgcagctggaagagtttccgatgttaaagacccttgaccctaaggactggaagaaccaagaccactacgccgtgctgggacttgggcacgttcgatataaggccacccagagacagattaaggcagctcacaaggccatggtgttaaagcatcatcctgacaagagaaaggccgctggcgagccaatcaaggaaggggataatgattatttcacctgcatcaccaaagcctacgagatgttgagtgacccggtgaaacggcgtgcctttaattctgtcgaccccacgtttgacaattccgtcccctcgaaatccgaggcaaaggacaacttttttgaagtgtttactcccgtgttcgaacgaaactcacgtgtgagcatctcaaagaagaagaagaaaaagcggtag

SEQ ID NO: 221119 - DNA, 822 bp, synthetic construct
  misc_feature 1..822: note = Description of Artificial Sequence: Synthetic coding sequence
  source 1..822: mol_type = other DNA
atggaagccaacatgccaaaacggaaggaacctggcagatctcttcgcattaaggtaatctcaatgggaaacgctgaagtcggcaagtcatgcataataaagcggtactgcgagaaacggttcgtgagtaaataccttgccaccatcggcatagattacggggtgacgaaagtccatgtgcgggaccgagagatcaaggtaaacatttttgacatggccggacaccctttcttctacgaggtccggaatgaattttacaaggacacgcagggagtgatcttagtttacgatgtgggtcaaaaagattcctttgacgccctggatgcttggctggccgagatgaaacaggaattggggccacatgggaacatggaaaatattatcttcgtggtgtgtgcgaacaaaatagactgcactaaacacagatgcgtagacgaaagtgaaggcaggctctgggccgagagtaaaggatttctatactttgaaaccagcgctcagaccggagaaggtattaacgaaatgtttcagaccttctatatcagtatcgtggacctttgcgaaaatggtggaaagcggccaacgaccaatagctccgcctccttcaccaaggagcaggctgacgccattcgcagaatccgcaatagcaaggatagctgggacatgctcggggtcaaaccaggtgctagtcgtgatgaggtgaataaagcctataggaaacttgccgtgttactccaccccgataagtgtgttgctcctggcagtgaggacgcctttaaagcggtcgtgaacgcccgtaccgccctgttgaaaaatataaaatag

SEQ ID NO: 221120 - DNA, 609 bp, synthetic construct
  misc_feature 1..609: note = Description of Artificial Sequence: Synthetic coding sequence
  source 1..609: mol_type = other DNA
atggcgggtcacccattcttttacgaagtcagaaatgaattctataaagacacccaaggcgtgatactcgtgtatgatgtaggccaaaaggatagttttgacgcactggacgcctggcttgccgagatgaagcaagagctgggtccccatgggaacatggaaaatattatatttgtggtttgcgctaataaaatcgactgtactaagcacaggtgcgtggacgaatctgaaggccgtctgtgggcagagagcaagggcttcctctacttcgagacgtcagcccagactggtgagggaattaacgagatgttccagaccttctatattagcatcgtggacctttgtgagaatggagggaaacggccaacaactaactcaagcgccagcttcactaaggagcaagccgacgcgatacgcagaataaggaatagcaaggactcctgggatatgttgggagtcaagcctggagcctcgcgcgatgaggtgaataaggcctaccgtaagttggccgtgctcctgcacccagacaaatgtgtcgcacccggtagcgaggacgcgttcaaagccgtggtgaatgccaggacagccttactcaaaaacattaagtag

SEQ ID NO: 221121 - DNA, 1515 bp, synthetic construct
  misc_feature 1..1515: note = Description of Artificial Sequence: Synthetic coding sequence
  source 1..1515: mol_type = other DNA
atggtcgcgccaggcagcgttacttcgagattaggcagtgtgtttccttttctgctggttctcgtcgatttgcagtatgaaggagctgagtgcggcgtcaacgccgacgtagagaagcacttggaactcggtaagaagctgttggccgcagggcagctcgccgacgctttgagccagttccacgccgctgtcgatggggatccagataattatatagcatattatcgacgcgctactgtgtttttagcaatgggaaaaagtaaggccgcactccctgacctaacaaaagtcattcagctgaagatggactttactgctgccaggctgcagagggggcacctgctcttaaagcaagggaagcttgacgaggcagaggatgatttcaaaaaggtgctaaaatctaacccaagcgagaacgaggagaaggaggcgcagagtcagctgatcaagtctgatgaaatgcagcgactcaggtcacaagccctgaacgctttcggcagcggcgattatacagcagctatcgcttttttagacaagattctggaagtgtgcgtgtgggacgccgaactgcgtgagttaagggcagagtgtttcatcaaggaaggtgagcctcgtaaagcaatctcagatctaaaggcagcgagtaaactaaagaacgataacaccgaggctttctacaagatctccaccctatattatcagctgggagaccacgaactgagtctgagcgaggtgcgagaatgtctgaaactggaccaggaccataagcgctgctttgcccactataagcaggtgaagaagctgaataagttgatcgaaagcgccgaggaacttatccgggacggcaggtacactgacgcgacatctaagtatgaatctgtcatgaagactgagccaagcatcgccgagtataccgtgcgctctaaggaacgaatctgtcattgtttctccaaggacgagaaacccgtggaagctattagggtgtgtagtgaggtgcttcagatggagcctgacaatgtcaatgccctcaaagaccgagctgaagcctacctgatcgaagaaatgtacgatgaagccattcaagattacgaaactgcgcaggaacataacgagaacgatcagcaaattcgcgaagggctcgagaaggcacagaggctgctgaaacagtcacagaagagagactattataagatcctcggcgtgaaacggaatgccaagaaacaggaaatcatcaaagcttacaggaagctggcactgcaatggcaccccgataattttcagaatgaagaggaaaagaagaaggctgagaaaaagtttatagacatcgcggcagcgaaggaggtcctatctgacccagaaatgcgtaagaagtttgatgacggggaggaccctctggatgcagagtcccaacagggtggcggagggaacccgtttcatcgatcttggaatagctggcagggcttcaatccattttcttctggaggacccttccgcttcaaatttcatttcaactag

SEQ ID NO: 221122 - DNA, 597 bp, synthetic construct
  misc_feature 1..597: note = Description of Artificial Sequence: Synthetic coding sequence
  source 1..597: mol_type = other DNA
atggcagatcagaggcagcgttcactgagtacatcaggggagtcgttgtatcatgtactgggcctcgacaagaacgcaacttctgacgacatcaagaagtcctataggaaactggccctcaagtatcaccctgataaaaacccagacaaccctgaagccgctgacaaatttaaggaaataaataatgcccatgctatcttaacagacgccactaaacgcaatatctatgacaaatacggtagcctggggctttatgtggccgagcagtttggagaagaaaatgtgaatacatatttcgtgctgagcagctggtgggccaaggctctgtttgtattttgcggtctgcttacatgctgttactgctgctgttgcctgtgctgctgttttaactgctgctgcggaaagtgcaaaccaaaggctccggaaggtgaagagactgaattctacgtgagtcctgaagatttggaggctcagctacagtcggatgagagagaggccaccgacactcccatcgtgatacagccagccagtgcgactgagacaactcagctgactgctgattcacatccatcttaccatacagatggctttaattag

SEQ ID NO: 221123 - DNA, 504 bp, synthetic construct
  misc_feature 1..504: note = Description of Artificial Sequence: Synthetic coding sequence
  source 1..504: mol_type = other DNA
atggccgaccaacggcaacggtcgctctctactagcggcgagtcactttaccacgtattagggctggataaaaacgcaacttccgacgacatcaaaaagagttacagaaagctggctctgaagtaccacccagacaagaatcctgacaatcccgaagccgctgataagtttaaggaaatcaataacgcccatgcaatcttaacagacgccaccaaaaggaatatttacgacaaatacgggagccttggcttgtatgtagcagagcagttcggagaagagaacgtgaatacttactttgtgcttagttcatggtgggccaaggccctatttgtgttctgtggactgcttacatgttgctattgttgttgctgtctctgttgttgctttaactgttgctgcgggaaatgcaaacccaaagcacctgaaggcgaggagacagagttttatgtcagcccggaagacctggaggcacagcttcagtctgatgagcgcggaggccattag

SEQ ID NO: 221124 - DNA, 600 bp, synthetic construct
  misc_feature 1..600: note = Description of Artificial Sequence: Synthetic coding sequence
  source 1..600: mol_type = other DNA
atggcgtgtaatattcctaaccaacggcagcgcacactgtctaccactggtgaggcactgtacgagatcttgggactccataaaggcgctagcaatgaggaaataaagaagacatacagaaaactggcgttgaagcatcacccagataagaatcctgatgatccagcagcgaccgagaagtttaaggagataaacaacgcccatgcgatcctcacagatatttcgaaacgaagcatttacgacaagtacggatcgctggggctgtatgtggctgagcagtttggagatgagaacgttaacacttactttatgttgtcatcctggtgggccaaagctctgttcgtgatcgtcggtcttctgactgggtgctacttttgttgctgcctgtgctgttgctgcaattgttgctgcggacactgtagaccagaatcaagcgtacccgaggaggatttttacgtctctccagaagacctggaggagcagatcaagtctgatatggagaaggacgtggacttccctgtctttttacagccaaccaatgctaacgagaagactcagttgatcaaagaagggagcagatcttattgtactgactcttag

SEQ ID NO: 221125 - DNA, 570 bp, synthetic construct
  misc_feature 1..570: note = Description of Artificial Sequence: Synthetic coding sequence
  source 1..570: mol_type = other DNA
atgagcaccgtgaaggaggccgctcatagactgtccaagtcagagatgtcactgtatgccgtactagacctcaaaaagggcgctagcccagaagattttaagaaatcgtacagtcactcagccctcctgccacatcccccattcgagtatcacttgggcagaaagctcgcgctgcgatatcaccctgataaaaacccaggtaacgcacaggccgctgaaatctttaaggaaattaacgctgcccatgccatactctcggactctaaaaagcggaaaatatatgaccagcatggaagtctggggatctatctgtatgatcactttggcgaggaaggcgtgcggtactactttattctgaacagttgctggtttaaaaccctggtcatcttgtgcactcttctgacttgctgttgtttctgttgttgttgctgtttttgttgtggcgctctcaagcctccccctgaacaggactccggccgtaaatatcagcagaatgtgcagagccagcccccaagatcaggagcaaagtgcgactttcgatccgaagagaactccgaagatgacttctag

SEQ ID NO: 221126 - DNA, 570 bp, synthetic construct
  misc_feature 1..570: note = Description of Artificial Sequence: Synthetic coding sequence
  source 1..570: mol_type = other DNA
atgagcaccgtgaaggaagccgctcatcggttgtccaagtccgagatgtccctgtatgctgtgttagacctgaagaaaggggcttcccccgaggatttcaaaaagtcttattctcactcagctctgctgccacaccccccttttgaataccaccttggccgaaagctggccctgaggtaccaccctgataagaacccaggtaacgcccaggctgccgaaatcttcaaagaaatcaacgccgctcacgctattctcagtgactcaaagaaacggaaaatctatgatcaacatggctccttgggcatttatctgtatgaccattttggagaagagggcgttcgctactatttcatcctcaactcttgttggtttaagacgttggtcattctgtgcactctgctcacgtgctgctgtttctgttgctgctgttgcttttgctgcggtgcactaaaaccccctccagagcaggatagtggccgtaaataccagcaaaacgtgcagagtcaacccccacggagcggagcaaagtgtgattttaggtccgaagagaattctgaggacgacttctag

SEQ ID NO: 221127 - DNA, 2703 bp, synthetic construct
  misc_feature 1..2703: note = Description of Artificial Sequence: Synthetic coding sequence
  source 1..2703: mol_type = other DNA
atggaaccttcgtatggcggagggctctttgacatggttaagggcggtgctgggagactgttctctaatttgaaggataacctcaaagacacccttaaagatacctcgtcgcgggtgatccagagcgtcacatcgtacactaagggtgacctcgactttacatacgtcaccagccggatcatcgtgatgagcttccctctggataacgtggacataggcttccgcaaccaggtggatgatattaggtctttcctcgactcacggcacctcgaccactacacagtgtataacttgagtcctaagagttatagaacggctaaattccactcacgcgtgtccgagtgcagttggccaatccgccaggccccttcacttcataacctgttcgccgtctgtagaaacatgtacaactggctacttcagaatcctaagaatgtatgtgtggttcattgccttgacggtcgcgctgcctccagcatactggtaggggcaatgtttattttctgtaacttgtattctacccctggaccagcaatcaggctcctgtacgcaaagagacccggaataggactgtccccatctcaccgtagatacctggggtacatgtgtgatctgctggctgacaagccttatcgtccccactttaaacccttgaccattaaatcaattactgtgtcaccaattccgttcttcaacaaacagcggaacggatgcaggccatattgtgacgtcctgattggtgaaacaaagatttactctacgtgtaccgatttcgagcgaatgaaggaatacagagtgcaagacggaaagatctttatacctctgaatattaccgtgcaaggcgacgtggtagtgtctatgtatcacctccgtagcacaatcggtagcaggctacaagccaaggtaacaaacacacagatcttccagttgcagttccacactggattcatccccttagatactacagtgctcaagttcacaaaacctgagttggatgcctgtgacgtgccagagaagtatcctcaactattccaagtcactctggacgttgagctccagccacacgacaaagtgatcgacttgacaccaccctgggagcactattgcactaaagatgtgaacccatctatactgttctccagtcaccaggagcaccaggacactcttgcattgggagggcaagctccgatagacattccacctgataatccaagacactatggccagagcggcttcttcgccagcctgtgttggcaggatcagaaaagcgaaaagagcttctgtgaagaagaccatgccgctctagtcaatcaagagagtgaacagtcagatgacgagctgctcactttgtccagcccgcatgggaatgcgaatggggataaaccacatggagttaagaagccatctaaaaagcaacaggagccagccgctcccccacctcccgaagacgtagatcttctaggcctagaaggttccgccatgtctaactcattctccccccctgccgcacctcccacaaacagcgaactgttaagtgacctgtttgggggaggcggagccgctgggcctacccaggctgggcagagtggtgtggaagacgtgttccatcccagtggaccagcgtcaacacagtcaacgccgcgaagatctgcgacctccacatccgccagcccaacactgagagtgggcgagggcgctacattcgaccccttcggcgctccttcaaaacctagtgggcaggacctcctgggatcattccttaataccagttccgctagctctgacccctttctgcaacctacaagaagcccctcccccactgtccatgcttctagcacacctgctgttaacatccagcccgacgtttccgggggatgggactggcacgccaagcctggagggttcggaatgggatcaaaatctgcagctacatcgcctacaggcagctcacacgggacccccacgcaccagtctaagccacaaaccctcgatcccttcgcagatctcgggaccctggggagttcttctttcgcttctaagccgacaacacctacgggcctcgggggaggattcccgccattgtcctctccacagaaagcctctcctcagccgatgggcggagggtggcaacaaggcggtgcatacaactggcagcaaccacaacccaagccccagccatccatgccccatagctctcctcagaatcggccaaattacaatgtgagcttcagcgccatgccaggtggccagaacgaacgcggaaaaggaagctctaaccttgagggcaagcagaaggcggctgacttcgaagacctgctatcaggccagggtttcaatgcacataaagacaagaagggaccaagaactatcgctgagatgaggaaggaagaaatggctaaagaaatggatcccgagaagctgaagatcctggagtggatagagggcaaggagcgtaacatacgggcactccttagtacgatgcatacagtcctgtgggctggagagactaagtggaaacccgttgggatggcagacctggttactccagaacaagtcaaaaaggtttataggaaggcggtgctggtggtccatcccgacaaggctacgggccagccctacgagcagtatgcaaagatgatattcatggagttaaatgacgcatggtcagagtttgaaaaccaggggcagaaacctttatactag

SEQ ID NO: 221128 - DNA, 2913 bp, synthetic construct
  misc_feature 1..2913: note = Description of Artificial Sequence: Synthetic coding sequence
  source 1..2913: mol_type = other DNA
atgtctttgctcggcagctatagaaaaaaaacatccaacgatggatacgaatctctgcagctggtagattctaatggcgatttgagcgcaggatctggaggtgtaggcggtaaacagcgcgtgaacgcgggtgcagctgcgaggagtcctgcaaggcaacctcccgaccgcgcatccaccatggactccagtggagcctctagtcccgacatggagccgagctatgggggtgggctgttcgatatggttaaaggaggcgctggtagactgttctccaatcttaaagacaatctgaaagacacactgaaggatacctctagccgcgtgatccagagtgttaccagctataccaagggtgatttagactttacatacgtgactagcaggattatcgtcatgtcgttccccttggacaacgtggatatcggctttcggaaccaagtggatgatatcaggtcctttctggacagcaggcaccttgatcactacaccgtgtacaatctgagtcccaagagttacaggactgccaaatttcattcccgggtcagtgagtgttcgtggccaataagacaggccccttcactccataacctcttcgccgtatgcagaaacatgtacaattggctgttgcagaacccgaaaaacgtctgtgtggttcattgtcttgatggcagagctgccagctctatcctagtgggcgcaatgttcattttttgcaatctgtacagcactccaggcccagctattaggcttctgtacgcaaaaagaccaggaatcggattgagcccttctcaccggcgatatctgggctatatgtgcgacctgttggctgacaagccttaccgccctcatttcaaacccctaacaattaaaagcatcacggtatctccaattccatttttcaacaagcagagaaatgggtgtcgaccatactgcgacgtactgattggcgaaaccaaaatttatagcacttgcacggactttgaacgaatgaaagagtacagagtgcaggacggaaagattttcataccgctaaacatcactgtccagggtgatgtggtcgtgagcatgtaccacctcaggtctacaatcggctcccggctccaggcaaaggtcactaatacacagatattccagctccaattccacaccgggttcatcccacttgacaccacagtgcttaaattcacaaagccagagctggatgcgtgtgacgtgcccgagaagtatccgcaactttttcaggtcactttggacgtggaactacagcctcacgataaggtcatcgatctgactcccccttgggaacactactgtacaaaggacgtgaatccttctatcctgttttcaagtcatcaggaacaccaggatactttagccttggggggtcaggcacccatcgatatcccacccgacaacccacgacattacggacagtcgggtttctttgcttctttgtgttggcaggaccaaaagagcgagaagtccttctgcgaagaggatcatgctgctctggtgaatcaagaaagcgaacagagtgatgacgaactgctcaccctgtctagccctcatggaaatgccaacggggacaagccgcacggggttaaaaagccttccaaaaaacagcaggagccagctgcacccccaccccctgaagatgttgacttgctgggactcgaggggagcgctatgtcgaactctttttcaccccctgctgcgcctcccacaaattcagagctgctgtccgatctcttcggaggcggaggtgctgctggccctactcaagctgggcagagcggggtggaggacgttttccacccaagcggaccagccagcacacagtcaacacctaggcggtccgccacatccacatctgcttcaccaacattaagggtgggcgagggagccacttttgaccccttcggtgctccctctaagccttcaggccaggatttgttggggagctttctgaatacttcgtccgccagttcagatcccttcttgcagcctacgcgcagcccgtcaccaaccgttcacgcttcaagtacccctgccgtaaacatccaacctgatgtttctggaggttgggattggcacgcaaaaccaggcggtttcgggatgggttctaagagcgctgccactagccccaccggtagttctcatggcacgcccacccaccaaagcaaaccacagactctggacccgtttgctgacctcggaacgcttggctcctcttcttttgcaagcaaacctactaccccgaccggactcggcggagggttcccccctctgtcctcaccccagaaggcttctcctcagcccatgggcggtggttggcaacaagggggagcctacaactggcaacaaccacagccaaagccccagccatctatgccccatagctctccccagaacagacctaattataacgtctccttctctgccatgccagggggacagaatgagcggggtaaggggtcttcaaatctggaaggtaaacagaaagcggctgacttcgaggatctcctgtctggtcagggcttcaatgcccataaagacaaaaagggcccacggactattgcagagatgaggaaggaagagatggctaaggagatggaccctgaaaagttgaaaatcctggagtggatcgagggaaaggaaagaaatatccgtgcgctcctcagcaccatgcacactgtgctctgggcaggcgaaactaagtggaagcctgtcggtatggctgacctggtcactccagagcaggtgaagaaagtctataggaaagctgttctggttgttcatccagataaagccacaggtcagccatatgagcaatacgctaaaatgatcttcatggagttgaacgacgcctggtccgaattcgaaaaccagggccaaaagcctctctactag

SEQ ID NO: 221129 - DNA, 2742 bp, synthetic construct
  misc_feature 1..2742: note = Description of Artificial Sequence: Synthetic coding sequence
  source 1..2742: mol_type = other DNA
atgaaggatagtgaaaataagggggcttccagcccagacatggaaccctcttatggaggcggactgttcgacatggtaaaagggggagctggacgcctcttctccaatctgaaggataacctgaaagacactctgaaagacaccagtagtagagttatacaaagcgtcacctcgtatacaaaaggcgatctggacttcacgtacgtgacaagtaggataattgttatgtcattcccactggacaacgtggatatcggtttcagaaaccaggtcgacgacatcaggtcctttttagactctaggcatctagatcactacacggtatataatttgtctccgaagagctacagaacagccaaatttcattctcgcgtatctgagtgctcctggccgattcggcaggctccttcactgcataatctcttcgctgtgtgtcgtaacatgtacaactggctgctccagaaccctaagaacgtgtgtgtggtacactgtctcgacgggcgagccgcatctagcatccttgtgggcgctatgtttattttctgtaacctgtacagcacccctggacctgctatccggctgctgtatgctaaaaggcctggcattggtctttcacctagccatagacgctacctcgggtacatgtgtgacctgctcgccgataagccttaccgtccacactttaagcccctcacaattaagtctataaccgtcagtccgatccccttcttcaacaaacaaaggaacggatgtaggccttactgtgacgttctgatcggggaaactaaaatttactccacttgtacagacttcgaaaggatgaaggagtatagagtgcaagacggcaagatttttattccattgaacatcaccgtgcaaggcgacgtcgttgtctctatgtaccatctcagatccaccatcggcagcagacttcaagccaaggtaacaaacactcaaatctttcagctgcagtttcacacaggcttcatccctctggatacaactgtcttaaagtttacaaaacccgaattagacgcttgtgatgtgcccgaaaaatatcctcagctgttccaggtcacccttgatgttgaactgcagccccacgataaagttatcgacctaacccctccctgggagcattactgcacaaaagatgttaaccctagcatactgttcagttcccatcaggagcaccaggataccctggctctgggaggccaggcaccgattgacatacctcccgacaatccaaggcactacggtcagtccggcttttttgcatctttatgctggcaggaccagaaatctgagaaatctttctgcgaggaggaccacgctgctctggtgaaccaggagtcagaacaaagcgacgacgaactgcttactcttagcagtccacacggcaatgcaaacggcgacaaaccgcacggggtaaaaaagccatccaagaagcagcaggaaccagccgcaccacctccaccagaggatgtggacctactcggccttgagggctctgccatgtctaactccttctctccacccgctgcccctcccaccaattctgaattactctcagatctgtttgggggaggcggagccgctggccctacacaggccggacagagtggcgttgaggatgtgttccacccttctggacctgcaagtacacagagcactccaaggcgttccgcaacatctaccagcgctagtcctacactgcgcgtaggcgaaggggctacttttgacccatttggagctccatctaaaccatcaggacaggaccttttaggttcctttctaaacacctcttctgccagcagtgacccgtttctgcaacccacaagatctcccagccctactgtccatgcctcctccactccagctgtgaacattcaacccgacgtgtctggcggatgggattggcatgcaaagcccggaggattcggaatggggtcaaagagtgccgctacatcccccactggatcgtcccacgggactcccactcaccagtctaagcctcagacactggaccctttcgccgatctcgggacactcgggtctagttcattcgcgtctaaacctacgacccccactgggctgggcggaggtttcccgcctttaagttccccccagaaggcttctcctcaaccaatgggtggcggatggcagcagggcggagcatataactggcagcagccccagccaaaaccacaaccaagcatgccccattcctctccccagaacagacccaattataatgtaagtttcagcgcgatgccaggtggacagaacgagaggggcaaagggtctagcaacctggagggtaagcagaaagcagccgatttcgaggatttactctcaggacagggatttaatgctcacaaggacaagaagggccctcggacaattgccgagatgcgtaaggaggagatggcaaaggagatggatcccgagaagctcaagattctcgaatggatagaggggaaggagagaaatattcgtgcactgctctctacgatgcacaccgtcctgtgggcaggcgaaaccaaatggaaacctgtcgggatggccgaccttgtgactccagagcaggtaaaaaaggtgtatagaaaggctgtcctagttgtacatcccgacaaagccaccggccagccatacgagcagtacgctaagatgatattcatggagctgaacgacgcctggtctgagtttgagaatcagggccagaagcccctttactag

SEQ ID NO: 221130 - DNA, 783 bp, synthetic construct
  misc_feature 1..783: note = Description of Artificial Sequence: Synthetic coding sequence
  source 1..783: mol_type = other DNA
atgggtctacttgacctctgtgaagaggtctttggtacagccgacctgtatcgagtcctgggggtcagacgggaggcatccgatggagaggtgagacgaggctatcataaggtgagcctgcaagtacacccagatcgcgttggcgagggggacaaggaggacgccacccgcagattccaaattctggggaaagtgtactcagtcctgtctgacagagagcagagggccgtgtatgacgagcaagggactgtggacgaggacagccccgtgctgacacaagaccgcgactgggaagcttattggcggctgctcttcaagaaaataagcttggaagacatccaggctttcgaaaaaacatataaaggaagtgaagaggagctggctgacattaaacaggcctacctggatttcaagggggacatggaccaaatcatggaaagtgttctatgtgtgcaatataccgaagaaccccgtataagaaatatcattcagcaagctatcgacgcgggtgaagtcccctcttacaacgcattcgtgaaggaatctaaacagaagatgaacgcgaggaagaggagggcacaggaggaagctaaagaagccgaaatgagcaggaaagagctcggcctggatgaaggtgttgattcactgaaggcggctattcagagccggcagaaggaccgacaaaaggagatggataacttcctggcccaaatggaagcgaagtattgcaagagcagtaaaggtggagggaaaaaaagtgcactgaaaaaagagaaaaagtag

SEQ ID NO: 221131 - DNA, 1029 bp, synthetic construct
  misc_feature 1..1029: note = Description of Artificial Sequence: Synthetic coding sequence
  source 1..1029: mol_type = other DNA
atgctggagaacagcctgtactcaccaacgtgggaggggagccagttttgggtgaccgttcagcgtaccgaggctgccgaacggtgcggactgcacggatcctacgttttgagggtcgaggccgaacggctgacactcctgacagtcggcgcacaaagtcaaatactggagcccctgctgagctggccatacacgttgcttcgcagatatggaagggataaggttatgtttagcttcgaggccggtaggagatgtccttcaggcccaggtacatttaccttccagacagcccagggcaatgatattttccaggctgtggaaactgcaatccaccgccagaaggctcaagggaaagccggacagggacatgatgtgctccgcgctgactctcacgagggcgaagtggcagaggggaagctaccctctcctccgggaccacaggagctgctcgatagcccacccgctctttacgctgaaccattggacagcctgcgaatagctccttgtccgagccaggacagcctttactcagacccgctggattctacctctgcgcaggctggagaaggcgtacaacgaaaaaagcctctttactgggacctgtatgagcacgcacagcagcagcttctcaaggcaaaactgactgacccgaaagaagatcccatctatgacgaaccggaaggtctggcgccagtccccccacaagggctgtatgacctgccccgtgagcctaaagatgcctggtggtgccaggcacgggtgaaggaagagggatatgagctgccttacaaccctgccacggatgactacgcagttcctccccctagaagcacgaaaccactgttagcgcctaaacctcagggtccggctttccccgaacctgggactgccaccgggtctggtattaagagccataactctgccctgtatagccaagtacagaagagcggcgcaagtgggagctgggactgtgggctctccagagttggcacggacaagacaggagtcaagtcagaggggagtacctag

SEQ ID NO: 221132 - DNA, 855 bp, synthetic construct
  misc_feature 1..855: note = Description of Artificial Sequence: Synthetic coding sequence
  source 1..855: mol_type = other DNA
atggaacccggaatgttagggccacacaatctacctcatcatgagcccatcagtttcgggatcgaccagatcttatccgggcctgagacgcccggtggcggtctgggcctcggccgagggggtcaaggccacggggaaaatggcgctttctccggtggttaccatggtgctagcgggtatggccctgcagggtccctggccccactgcccggatcatcaggagtcggacctggaggcgttattcgagtacctgcacaccggccactccccgtgccccctcctgcaggtggcgcacccgcagtgccaggcccatccggcttgggtggtgcagggggactagctgggctgacttttccatggatggacagcggcaggcgcttcgcgaaggacagactgactgcagcgctgtccccattctcaggtactaggagaattggccacccctaccaaaatcggacaccgcctaagcgcaagaaaccgaggacctccttttctcgaagccaggtgctggaactagaacgcagatttctaagacagaaatatttggcttccgctgagcgcgctgcactcgccaaagctctgcgcatgacagacgctcaggtaaagacatggtttcaaaaccggagaacgaagtggaggcgtcaaaccgctgaggaaagagaagctgagagacaccgggctggtaggctgctgctccaccttcagcaggacgctttaccgagaccactgcgaccacccctcccgccagatcctctctgcttacacaactccagtctgttcgctctccagaatttgcagccttgggccgaagataacaaagttgcttccgtgagcggcctggcatcagtcgtctag

SEQ ID NO: 221133 - DNA, 1239 bp, synthetic construct
  misc_feature 1..1239: note = Description of Artificial Sequence: Synthetic coding sequence
  source 1..1239: mol_type = other DNA
atgggtgatggcgctgttaagcagggttttctgtacctccagcaacagcagacttttggaaagaaatggagaaggtttggagccagtttgtacggaggatcggactgcgccttagctagactggagcttcaggaaggacccgagaagcctagaaggtgcgaagcagctaggaaggtcatccggctgagtgactgtctcagagtggccgaagccggtggggaagcttcaagtccaagggacacatcagccttcttcctcgaaacgaaagaaaggctatacctgctcgccgcacctgcagctgagagaggagactgggtccaggcaatctgcttgttggcctttccaggtcagcggaaggaactgtccgggccagagggaaagcagtctcggccttgcatggaagagaacgagttgtattcaagtgccgtcacagttggccctcataaggaattcgccgtcactatgcgcccaacagaggcatccgagaggtgccacctcagggggtcatataccctacgggcaggggaaagcgctctcgagctctggggcggtcccgaaccaggtactcagctttacgattggccctacaggttcctccggcgatttggcagagataaggttacattttcatttgaagcgggacggaggtgtgtcagtggtgagggcaactttgagttcgagacacggcaggggaacgagatctttctggccctggaggaagccatttctgcgcagaagaacgctgcccctgccactccccagccccagcccgcaacaatccctgcttctttacccagacctgacagcccatatagtagaccccacgacagcctgcccccacctagccctaccaccccggtgccagctcccaggccacggggtcaggagggcgaatacgccgttccattcgacgctgtcgccaggtctctgggcaagaacttccgcggtattttggctgtgccacctcagttgctggccgatccactctatgatagtattgaggaaactctccccccaagacctgatcacatctacgacgaacctgaaggcgtggccgctctgagtctatacgactcccctcaggagcccagaggagaggcatggagaaggcaggccacagctgatagagatccagccggactgcagcacgtgcagccagctggacaggacttttcggccagtggttggcaaccgggtacagaatatgataatgtcgttctcaagaagggtcccaaatag

SEQ ID NO: 221134 - DNA, 777 bp, synthetic construct
  misc_feature 1..777: note = Description of Artificial Sequence: Synthetic coding sequence
  source 1..777: mol_type = other DNA
atgagaccaacggaagcaagcgagaggtgccatttgcggggatcttacactctcagggcaggagaatccgccctggaactttggggtggacctgagcctggcacacagctctacgactggccgtatcggtttctccgccgattcggaagagacaaagtcaccttctccttcgaagctggtagaagatgtgttagtggtgaaggaaatttcgagttcgagacccgccagggaaacgagatctttcttgctttagaagaggctattagtgcccagaaaaacgctgcaccagccacgccacagcctcagcctgccacaatccccgcttccctgccaaggcccgatagcccatattctagacctcacgattccctgccacccccatctcctaccactcctgtgccagctcctcgcccacggggacaggagggagagtatgccgttcctttcgatgccgtcgccagaagtctgggaaagaactttcgcggtatcttggcagtgccaccccaactgcttgcagatcctctgtatgatagcattgaggagacactgccacccaggccggaccacatatacgacgagcctgagggagtagccgctttatccctttacgattcaccccaggagcctaggggcgaggcctggcgacgccaggctacagccgacagggatccagctgggctacaacacgtgcaaccagctggccaggacttttctgcctctggctggcagcccggaacggaatacgataacgtagtactgaaaaagggcccaaaatag

SEQ ID NO: 221135 - DNA, 993 bp, synthetic construct
  misc_feature 1..993: note = Description of Artificial Sequence: Synthetic coding sequence
  source 1..993: mol_type = other DNA
atggaccccctggagactccaatcaaggatgggatactctaccagcagcacgtgaagttcggtaagaaatgctggcggaaagtttgggctttgctgtacgcaggcggaccttcaggcgtggcgagactcgaatcatgggaggtccgggacggcggactcggcgcagccggagatagaagtgcgggacctggacgaaggggcgagagacgcgtcatccgcctggcggattgcgtatccgtgctgcccgctgatggcgagtcttgccccagggatacaggtgccttccttctaaccactaccgagaggtcccacctgctcgcagcccaacatcgacaggcgtggatggggcctatatgccagcttgcatttcctgggacgggtgaggcctcctctggtagtaccgacgctcagtctccaaagagagggttagtccccatggaagaaaatagcatttactcaagctggcaggaagttggcgagttcccagttgtggtgcagagaactgaagctgccacacgctgtcagttaaaaggcccagcgctcctcgtgctgggaccagatgccatccagcttagggaagccaagggcactcaggccctctactcttggccgtaccactttctaagaaagttcgggtccgataagattcttctgggaacccctggtgtgagtctcctgatatgcaaaggtgagaggactgacgacgtatccgggataatcctggacgaaagcttgcttcgagcgtactctgtcccaggggctggcggacactcaagggtgcaagactctctggggccagtgttacgggaacccaccttccaaggggagcgctcgtttctcaaaacttcaatgctcagaagccttctgtgcagttgtagctggcgacatcctcggtctcaaccgagaacgcaagcctcttgcctgcaagggagcgattgtcccgcaccccacagaaactccacaagcgctgcacacacactcggtacgtcttag

SEQ ID NO: 221136 - DNA, 1491 bp, synthetic construct
  misc_feature 1..1491: note = Description of Artificial Sequence: Synthetic coding sequence
  source 1..1491: mol_type = other DNA
atgactcgcggagccaggttacgcagcgacgctagggcccagctaaaccaactctcccttgacgggggaaccggtagcggccagaagggcaagtgcgaagaatttccgagctctcttagctcggtttcacccggactggaggccgctgcattgctccttgctgtgacaatggaccccctggagacccccattaaagacggaattctctatcaacagcacgtgaagttcgggaaaaaatgttggcgcaaagtctgggctctgctatatgccggagggccttccggagttgcaagactggagtcctgggaggtacgggatggcggtcttggggctgcaggggaccgcagcgcaggccctggcaggcgcggagagaggcgcgtgatccggctggccgattgtgttagtgtgctgccagccgacggggagagttgcccccgagacaccggcgcatttttgctgaccacgaccgagcgctcacacctgctcgcagcccaacacagacaggcctggatgggacctatttgtcagctcgcttttcccggtactggagaggcctcaagtggatctacagacgcacaatctcccaagcggggtctcgtgcccatggaggagaattccatttactccagctggcaggaggtgggagagtttcctgtagtcgtacagcgaaccgaggccgctacacgctgccagctgaaaggacccgctctcctagtcctaggtcctgatgccattcaactgagggaagccaaggggacacaggcactatactcctggccctatcacttcctacggaagttcggatcggataagggagtcttcagtttcgaagccggacggcgatgtcattccggggaagggctgtttgcattttccacaccatgcgctccggatctctgcagagccgtcgcaggggcaatagctcggcagagggaacgcctccccgagctcactcgcccacaaccttgtcctctgcctcgagctacaagcctgccctctctagacacgcccggagaactcagggaaatgcccccaggtcccgaaccccctacatctcggaagatgcacttggctgagccaggtcctcagtcattacctctgctcctgggccctgagccgaatgacctggcttccgggctatacgccagcgtctgcaaaagagccagcgggcctccaggcaatgagcatctgtacgagaatctgtgcgtgctggaggcatctcctaccttgcatgggggagaacctgagcctcatgagggccctggctccagatctcctaccacgtccccgatctaccacaacggtcaagatctctcatggcctggccctgcaaacgattctactctcgaggcccaatatcgcagactactcgagttggatcaggtggaaggcactgggaggcctgaccctcaggctggatttaaagcaaaattggtgaccctgctctccagggagcgtcggaaaggcccagcaccttgcgacaggccatag

SEQ ID NO: 221137 - DNA, 687 bp, synthetic construct
  misc_feature 1..687: note = Description of Artificial Sequence: Synthetic coding sequence
  source 1..687: mol_type = other DNA
atggacccactggagacccccataaaggatggcattctctaccagcagcacgtgaagtttgggaaaggaacgggcgaggccagctctggatccaccgacgcccagagtcctaaacgaggacttgtccccatggaggaaaattcaatttacagtagttggcaggaggtgggtgagttccccgtcgttgtgcagcggaccgaagccgctacccgctgccagttgaagggccctgccttgctggtgctgggccctgatgcaatccaattaagagaggccaaggggacccaggcactctactcctggccttatcattttctgcgtaagtttggaagcgataaaatccttcttggaactcccggagtgtctctcctcatctgtaaaggcgaacggaccgacgacgtgtctgggatcattctggacgaatctctcctgcgggcttatagcgtaccgggtgctgggggtcactctcgggtccaggactctctgggccctgtgttacgggaaccaactttccaaggagaacgctcattcctgaagaccagcatgctgaggtcattgttatgtagctgtagttggcgtcatcctaggagtcaaccacgtacgcaagcgtcttgtctgcaaggcagcgattgccctgctcctcatcggaactctacctctgccgctcatacgctcggcacctcctag

SEQ ID NO: 221138 - DNA, 435 bp, synthetic construct
  misc_feature 1..435: note = Description of Artificial Sequence: Synthetic coding sequence
  source 1..435: mol_type = other DNA
atggacccactggagacaccaatcaaggatggaattctgtatcaacagcatgtgaaattcggcaagaagtgctggagaaaagtgtgggccttgttgtatgctggaggtccaagcggtgtcgctaggctcgagtcgtgggaggtgagggacgggggtctgggagcagcgggagatcgcagtgcaggacccggtagacgcggtgagaggcgtgtcattcggctggccgattgtgtctctgtgctgcccgcagacggggagtcatgcccacgggacacaggcgcttttctgctgactaccacagaacgcagccacctcctggccgctcagcacagacaggcatggatggggcctatctgtcagcttgccttcccaggtacaggcgaggcgtcttctggatccactgacgcacaatcaccgaagaggggccttgtttag

SEQ ID NO: 221139 - DNA, 471 bp, synthetic construct
  misc_feature 1..471: note = Description of Artificial Sequence: Synthetic coding sequence
  source 1..471: mol_type = other DNA
atggaccctttggaaactcctatcaaagacggcattctataccagcagcacgttaagtttggaaagaagtgttggcggaaagtctgggcactcctctacgctggaggcccttcgggcgtcgctcgcttagagtcatgggaagttcgtgacggtggactgggtgctgcaggcgaccgaagtgccggtcctggtcggagaggggaacgcagggtcattagattggccgactgtgtatctgtcctcccggctgacggcgagtcctgtccaagggacaccggcgcattccttttaacgacaactgagcgtagtcacctgctggctgcacagcaccgccaggcctggatggggccaatttgccagcttgcattccccggaactggcgaggcctctagtggttccaccgatgctcagtctccgaaaagagggctggttcccatggaggaaaactctatctattctagctggcagtag

SEQ ID NO: 221140 - DNA, 132 bp, synthetic construct
  misc_feature 1..132: note = Description of Artificial Sequence: Synthetic coding sequence
  source 1..132: mol_type = other DNA
atggacccactagagacccccatcaaggacggtatcctttaccaacaacatgtcaagtttggcaaaaaatgctggcgaaaggtgtgggcactgttatatgctggtggcccttctggcgtcgcacgactgtag

SEQ ID NO: 221141 - DNA, 642 bp, synthetic construct
  misc_feature 1..642: note = Description of Artificial Sequence: Synthetic coding sequence
  source 1..642: mol_type = other DNA
atggacccactcgagacaccgattaaagatgggatcctgtaccagcaacacgtgaagttcggcaagaaatgttggcgaaaagtatgggccctcttatacgctggaggaccgtcaggcgtagcacgcctggagagctgggaggtgagggatgggggtctgggggctgcgggtgatagatcagcaggaccaggcagacggggagagaggagggtcatcagacttgcagactgcgtctcggtattgcctgcagatggggaatcctgccctcgggatacaggcgctttcctacttaccactactgaacggagccatctgcttgctgcccagcatcgacaagcctggatgggtccaatctgtcagcttgccttccctggcaccggagaggcctcctccggtagtaccgacgcccaaagtccgaaacgagggctcgtgcctatggaggaaaactccatttacagttcttggcaggaggtaggcgagttcccagtcgtggtccagcgcactgaggccgcaactagatgccaactgaaaggacctgccttactcgtactgggcccagatgcgatccagcttagggaggcaaagggtacacaagcactgtactcttggccctatcactttctgcgcaagtttgggagctag

SEQ ID NO: 221142 - DNA, 42 bp, synthetic construct
  misc_feature 1..42: note = Description of Artificial Sequence: Synthetic coding sequence
  source 1..42: mol_type = other DNA
atggacccactggagacaccgatcaaggatgggatactttag

SEQ ID NO: 221143 - DNA, 258 bp, synthetic construct
  misc_feature 1..258: note = Description of Artificial Sequence: Synthetic coding sequence
  source 1..258: mol_type = other DNA
atggatcctctagagacaccgatcaaagacgggatactgtaccaacaacatgtgaagttcggcaagaagtgttggaggaaggtgtgggcactcctgtatgccggaggtccgtcaggtgtagccaggttagagagttgggaggtgcgggatgggggactgggggctgctggtgatagaagcgctggtcccggacggaggggggaaaggcgagtcatccgactggctgattgtgtgagcgtacttccagccgatgggtag

SEQ ID NO: 221144 - DNA, 981 bp, synthetic construct
  misc_feature 1..981: note = Description of Artificial Sequence: Synthetic coding sequence
  source 1..981: mol_type = other DNA
atggcaacaaatttctctgacatagtgaagcaggggtacgtgaaaatgaagtcacgtaaattggggatataccgccgttgctggcttgttttccgcaaaagctcatctaagggaccacagcgtctcgaaaaatatcctgatgagaaatccgtgtgcctgcggggatgtcccaaagtcactgaaatcagtaacgtcaagtgcgtaaccaggctcccaaaggagaccaaaagacaggcagtggccattatatttaccgacgacagcgcaaggacttttacttgcgactctgagttagaagctgaagagtggtacaagaccctgtccgtagaatgcctgggctcacggctaaacgatatctcactgggcgaacctgacctacttgcccctggtgtgcagtgtgaacagactgacagattcaacgtcttcttgctcccctgcccaaatctggacgtgtatggggagtgtaagctccagattacccatgagaacatttacctgtgggacatccacaatcctagggtgaagcttgtcagctggcctctgtgttcactgcgaagatacggacgtgatgccaccagattcacatttgaggcgggtcggatgtgcgatgcaggcgaaggactatacacattccagacacaggagggggagcagatctatcagcgggttcactccgccacactggcgatcgctgagcagcataagagggttttgctcgagatggagaaaaatgtgcggctgctcaataaggggaccgagcattattcatatccctgcacacctaccacaatgctgccgcgatcggcctactggcatcacataaccggaagccaaaacatcgctgaggcttcctcatacgctggagagggttatggagctgcccaagcctcttccgagaccgacctgcttaaccgcttcatcctcctcaagccgaaacctagccagggggacagtagcgaggccaagaccccatctcagtag

SEQ ID NO: 221145 - DNA, 921 bp, synthetic construct
  misc_feature 1..921: note = Description of Artificial Sequence: Synthetic coding sequence
  source 1..921: mol_type = other DNA
atggcatccaacttcaatgatatcgtcaaacagggatatgtgcgcattaggtcccggaggctgggcatttatcaacgctgttggctggtgttcaagaaagcctctagtaaaggacccaaacgtttagagaagtttagcgacgagcgagccgcttatttcagatgctaccacaaggtgaccgaactgaacaacgtgaagaatgtcgcccgactgcctaagagcactaagaaacacgcgatcggaatttatttcaacgacgatacctcaaaaacctttgcatgtgaatccgacctcgaggccgacgaatggtgtaaggtgctccaaatggaatgcgtcggcacacggattaacgacatttctcttggtgagccggacctgcttgctacgggcgttgagcgggaacaatctgaaagatttaatgtctacctcatgccctcccccaacctggacgtccacggcgagtgcgctctccagattacttatgagtacatttgtctttgggacgtccaaaatcccagagttaagctgatctcctggccgctgagcgccttgagacggtatggcagagatacaacgtggttcaccttcgaggctggtcggatgtgtgagacgggcgagggtctgtttattttccagacccgcgacggagaggccatctatcagaaagtacacagtgccgctctggcaatagccgaacagcatgaaaggctactgcagagtgtgaagaactctatgctccagatgaagatgtccgagagggccgcatccctgagtacaatggtacctctgccacgcagcgcatattggcagcacatcacccgccaacacagcaccgggcagttatacaggctccaggacgtgtcctcccctctgaagttgcatagaacagaaaccttccccgcttatcggagcgaacattag

SEQ ID NO: 221146 - DNA, 1515 bp, synthetic construct
  misc_feature 1..1515: note = Description of Artificial Sequence: Synthetic coding sequence
  source 1..1515: mol_type = other DNA
atgactgaggcagctctggtcgagggccaggtgaagctgcgcgacgggaaaaagtggaagtctagatggctggtgctgagaaagccttcaccggtagcagactgtctattgatgctcgtgtataaggacaagagcgaaaggatcaagggccttagagaaagaagctctctcacactagaagatatctgcggtctggaacccggattgccctatgaggggctcgttcatactcttgccatcgtatgcctcagtcaggccatcatgctgggctttgacagccacgaagctatgtgcgcgtgggacgcgcgtatacggtatgccttgggcgaagttcaccgcttccacgttactgtggcgcctggcaccaagttagaatccggccctgcaacccttcatctgtgcaacgacgtcctggtattggccagggacatcccacccgcagtcactggtcaatggaagctgtccgatctgagacgctacggtgccgtgcccagtgggtttattttcgaaggagggacccggtgcggttattgggcaggggtttttttcttatccagtgccgagggggagcagataagttttctattcgattgcatcgtgagaggaatcagcccaactaaggggccttttgggctcaggcctgttttgccagatcccagcccccctggtccatccacagttgaagaaagagtcgctcaggaggccctggaaacactgcagttagaaaagcggctgagcctcctcagccacgctgggcgacccggaagcggcggtgatgacagaagtctgagctcgagctctagtgaggcctcacacctcgatgtgtccgcatcatcacgcttgaccgcatggcccgaacaatcctcaagctccgcgtctaccagtcaggaggggcctagaccagctgctgcccaggccgctggcgaagccatggtgggggcaagcaggccacccccaaagcccctgcggccacggcagctccaggaggtggggcgacagagctcctctgactccggaattgcaacagggagtcactccagttattcgtcctccctgtcctcctacgccggatcaagtctggacgtgtggcgagccactgacgagctggggtccctgctgtccttgccggcagccggtgcccctgaaccatcattgtgtacatgcctgcccggtacggtggaataccaagttcctacatcgctccgcgctcactatgataccccgcgatcactgtgcttggcaccgagggatcacagccctccatcccagggctcacctggtaactccgcagccagagactccgggggacagactagcgctgggtgtcctagtggttggctgggaaccaggagaagaggcctcgtgatggaagcaccgcagggtagcgaggccaccctgccgggacccgcacccggagagccatgggaggccggagggccacacgctggacctcccccagcatttttttctgcatgtccagtgtgcggagggctcaaggtgaaccccccaccctag

SEQ ID NO: 221147 - DNA, 1827 bp, synthetic construct
  misc_feature 1..1827: note = Description of Artificial Sequence: Synthetic coding sequence
  source 1..1827: mol_type = other DNA
atgacagaggccgcactggtggagggccaggttaagctcagagatggaaaaaaatggaaatcccgctggttggtccttaggaaaccgtcacctgtagctgactgtctgcttatgcttgtgtacaaagacaagtccgagagaattaaagggctgagggagcggtcatccttgacactcgaagatatttgtgggctggaacccggactgccgtatgagggtctagtgcacaccctggctattgtttgcctaagccaggcaattatgctgggcttcgatagccacgaagccatgtgcgcatgggacgcccgaattcggtacgcccttggtgaggtgcatagattccacgtcaccgtggcaccgggaacgaagctggagagcggcccagccaccctgcatctctgtaacgatgtgcttgtgttagctcgtgatataccacctgccgtgactggccagtggaagcttagcgacctaagacgatatggagctgtgccttctggatttattttcgaagggggaacgcgatgcggctactgggccggagtatttttcctgagctcagcagagggagagcagatcagcttcctttttgattgcatcgtgcgagggatatcacccaccaaagggccttttggtctgaggccggtgctccctgacccctctcctccaggaccgtcaaccgtggaagaaagagtcgcccaagaggcacttgaaactctacagctggagaagaggcttagcttgctgtcccacgctggacgcccaggatcaggaggtgacgatagatcactgtccagcagtagcagcgaagcgagccacctggacgtttccgcatcttctcggctgacggcgtggccagagcagtcgtcatcctcagcgtccacctcgcaggaaggccctagaccagccgcagctcaggctgcaggcgaggcaatggtcggcgcttctcggccaccgcctaaacctctgcggcctcggcagctgcaggaagtgggtagacaaagcagctccgattccggcatcgccactggaagccattcatcttattcctcaagtctgtccagttacgctggatcgtctctggacgtatggcgggcaaccgatgagttaggaagcttactatctcttccagccgctggagcgccagagcctagcttgtgcacatgcctacccggaacagttgaatatcaagtgccaacatctcttagagcccattatgacacaccacgcagcctttgtctagcacctcgcgaccattcacccccatcccagggaagccccggaaattccgctgcacgggactccggtggtcagacctctgccggatgtccatcggggtggctggggacccggagaaggggtctggttatggaggccccacaggggtcggaggccacactacctggcccagcgcctggcgaaccctgggaggccggtggtcctcatgctgggcctccacccgcttttttctccgcctgtcctgtgtgtggcggtctcaagggcgctgctgcctccgcgcctggacctgccacggcacattcgggcagccctgggccagtcgctgtcgactcacctggacccgaacgtcccagaggcgaatctcctacttacgtgaatatacctgtctcaccatcctcccgcaagcaactgcactatatgggcctagagctgcaggaggcttccgaaggcgtgaggggcgctggcgcaagcctgtacgcccaaattgacatcatggcgacagagaccgcccaccgcgttggggtgcgccacgcgcgtgcgcgtgaggagcagctcagcgaattggagcagcgaaaagccgcaccgcagtag

SEQ ID NO: 221148 - DNA, 768 bp, synthetic construct
  misc_feature 1..768: note = Description of Artificial Sequence: Synthetic coding sequence
  source 1..768: mol_type = other DNA
atgaccgaagcggctttggtggagggacaggtgaagctgagagatggcaagaagtggaagtcgcggtggctcgtcttaaggaaaccttcgcccgtggcagactgcttgttgatgttggtgtacaaagataagagtgagagaataaaagggttaagggagaggtcaagtttgaccctcgaagatatttgcggcctggaaccaggactgccatatgaagggctagtgcataccttggccatagtgtgtctctctcaggcaattatgctcggatttgactcacacgaagccatgtgcgcctgggacgcgaggatacgctatgccctgggcgaagtgcataggttccacgtgactgttgcccctggcacgaagctcgagtcaggaccagcaaccctacacctgtgcaatgacgttctcgtgttggctagagacatcccccctgcagtgaccggccaatggaagctctctgatttgcggcgttatggtgccgttcccagcgggtttatctttgaggggggaactaggggctggagactcctccctgtgctggggagaggtggggctgatcagcttccagttcgcttgcataggcctagacatctgcctcatcagggaccactatgggcagctgctgggtcaacccggcctaagtctccaggtacactcgattgtggaggggcatgtggtcctggaagtccgggaaatccaactgccggagaagccgctgaaccccctctgacatgcggccaagcagggcagtggcgaggttag

SEQ ID NO: 221149 - DNA, 1371 bp, synthetic construct
  misc_feature 1..1371: note = Description of Artificial Sequence: Synthetic coding sequence
  source 1..1371: mol_type = other DNA
atgggatatttccgctgcgctagagcgggaagcttcggcaggcggcgaaagatggaaccttccacagcagctcgagcctgggctttattttggctcctgttaccgctgctgggggctgtgtgcgcctcgggcccaagaacactggtacttctagacaacttgaacgtgagggaaacacacagcctcttctttcgttctctgaaagaccggggatttgagttaacctttaagaccgctgatgacccttcgctgtctctgatcaaatacggggaattcctttacgataatcttataattttttccccaagcgttgaagacttcgggggaaacattaatgttgagactatttctgcttttatagatgggggaggcagcgtactggtggccgcaagctccgatattggtgatcccctgcgtgagctggggtcagaatgcggcatcgagttcgatgaggagaagactgccgtcattgaccaccataattacgatatctctgacttagggcagcatactctcatcgtggctgacactgaaaaccttctcaaggccccaacaatcgtggggaaaagttccttgaatcctatcctgtttagaggtgtaggaatggttgcagatccggacaaccccctggtgctggatatcttaactggctctagtacatcctactctttttttccggacaaacccatcacacagtacccccatgcagttggcaagaacactctcctgatcgccggattacaggccaggaataacgccagggtgatcttcagcggctctctggatttcttcagcgacagcttttttaatagcgctgtacagaaggccgctccaggctcccagcggtattcccagaccggtaactacgaactggctgtcgcccttagccgctgggtgttcaaggaggagggggtgctaagggttggtcctgtatcacatcatcgggtaggggaaacagccccacccaatgcatataccgtcactgatcttgtagaatatagtatcgtgatccagcagttaagcaatggtaagtgggtgccattcgacggggatgatatccaactcgagttcgttaggatcgatcctttcgtccggaccttcctgaaaaagaagggcggaaagtactctgtacagtttaagttacctgatgtctacggcgtttttcagttcaaggttgactacaacagactcgggtacacccatctatactcttctactcaggtctctgtgagacctctgcagcacacacagtatgagcggttcattccaagcgcatacccctactatgcttccgcattctccatgatgcttggactgttcatcttctctattgtgttcttgcacatgaaggagaaggaaaagtcagattag

SEQ ID NO: 221150 - DNA, 1260 bp, synthetic construct
  misc_feature 1..1260: note = Description of Artificial Sequence: Synthetic coding sequence
  source 1..1260: mol_type = other DNA
atgggctattttcggtgcgcccgagccggatcattcgggcgaagacgcaagatggaaccatccacagcagctcgagcttgggccctgttctggctgctgcttcctcttttaggcgctgtatgcgcctccgggccacgaacgttagtgttactggataaccttaacgtaagagaaacacattctctcttcttcagatccctgaaagatttcggaggaaatatcaatgtggagaccatctctgcttttattgatgggggtggatctgtgctggtcgctgcatcgagtgacatcggcgatcctctacgcgagctcggatcagagtgcggtatcgaattcgatgaggaaaaaacagcggtaatagaccaccataactacgatattagcgaccttggtcaacacacacttatcgtggcagataccgagaatctgctcaaggcgccaaccatcgttggcaaaagctcgctcaatccaatcttattccgcggtgttgggatggttgccgaccctgacaaccccctcgtcctggacatcctgactggctcctctacgtcttactccttctttccagacaagccgatcacacagtaccctcacgccgtcgggaagaatactctcctgatcgcaggcctgcaggccaggaacaacgctcgcgtgatctttagcggcagcctcgactttttctcagactctttcttcaactctgctgtgcagaaggcagcaccgggaagtcaacgctattcacagacaggaaactacgagttggctgtcgcactctcccggtgggtctttaaagaagaaggtgttctgagggttggtccggttagccatcaccgcgtgggtgagacagccccacctaacgcctacacagtgaccgatctggtggaatactccatcgtgatacagcagctgagcaatgggaagtgggtccctttcgatggcgatgatatccagcttgagttcgtccgcattgaccctttcgtaaggacatttctgaagaaaaaggggggtaagtactcggtacagttcaaactgccggacgtgtatggggttttccagttcaaggttgactacaataggctgggctatacgcatctgtattcatccacgcaggtgtccgtgcgtcctctccagcacactcagtatgaacgcttcatccctagcgcctacccgtattacgcctctgctttcagcatgatgctcggcttgttcatcttcagcatagtcttcctgcacatgaaggaaaaggagaaatccgattag

SEQ ID NO: 221151 - DNA, 279 bp, synthetic construct
  misc_feature 1..279: note = Description of Artificial Sequence: Synthetic coding sequence
  source 1..279: mol_type = other DNA
atgacaaagctggcccaatggctgtggggtctggctatccttggaagcacgtgggtagcccttacaacaggggcattgggccttgaattgcctttgagctgtcaggaggtgctctggcctctccccgcttacctcctcgtgtccgcgggttgctatgccctaggtacagttggctatagggtggccacattccacgattgtgaggacgctgcgagagaacttcagtcccaaatccaagaagctagagccgatctggccaggcgcggactcagattttag

SEQ ID NO: 221152 - DNA, 369 bp, synthetic construct
  misc_feature 1..369: note = Description of Artificial Sequence: Synthetic coding sequence
  source 1..369: mol_type = other DNA
atgctgagtgttggagggctccgcttgagtttagtccgattctcattcctcttgctgagaggggctctactgccatcacttgccgttaccatgaccaaactggcgcagtggctctggggtctggccattctgggctctacatgggtggccctcactactggggctctggggttggaactacctctgagctgccaggaggtcctgtggcctttgcccgcatacctcctggtgtcagcgggatgttatgctctgggcaccgtggggtaccgggtagcaacttttcacgattgtgaagacgccgcaagggaactgcaatcccagattcaggaggcccgagccgatctagctcgcaggggccttcgattctag

SEQ ID NO: 221153 - DNA, 279 bp, synthetic construct
  misc_feature 1..279: note = Description of Artificial Sequence: Synthetic coding sequence
  source 1..279: mol_type = other DNA
atgacaaagctggcgcaatggctgtggggactcgccatccttgggtccacttgggtcgcactcacaactggtgccctcggattggaactgccgctctcatgccaagaagtgctctggcctctgcctgcatacctcctggtgagcgccggatgctacgccctgggaactgtgggataccgggtggctaccttccacgactgtgaagacgcagccagagagctccagagccagatacaagaggcgcgtgcggatcttgcgcgacgaggcctgaggttctag

SEQ ID NO: 221154 - DNA, 1191 bp, synthetic construct
  misc_feature 1..1191: note = Description of Artificial Sequence: Synthetic coding sequence
  source 1..1191: mol_type = other DNA
atggatcctcgtggcactaagaggggcgcagaaaaaacggaagttgctgagcctcgcaataaactgcccaggccagctccttcactccccacagacccagcactgtacagtggccctttcccattttacagacgcccttccgaacttggttgtttttcactggacgctcaacggcaataccacggagatgccagggcactgcgctactactctccaccgcctacaaacgggccaggcccaaatttcgatctgcgcgacggatatccagaccgataccagcctagagatgaagaagttcaggagcgcctggaccatctgctttgttggttgctggaacaccgagggagactcgaaggcggacctggctggctagccgaggctatcgtgacctggcggggtcatctgaccaagctactgactaccccctacgagaggcaggagggctggcagttggccgctagcaggttccagggaacactgtacttatccgaagtggaaacacccaacgccagagctcaaagattagcgcgtccacctttgctgcgtgagctaatgtacatgggatacaaattcgaacagtacatgtgcgccgacaaacccggaagctctccagatccttctggtgaagtcaataccaatgtggctttttgcagcgtgctgaggagccggctgggctcccatcccctcctcttctcaggtgaagtggactgtaccgatcctcaagctcccagtactcaaccgcctacctgctacgtggaattaaagacttcaaaggaaatgcattctcctggacagtggcgctcattttaccgacacaagctgctcaagtggtgggctcagtctttcctaccaggggtgcccaatgtcgtggccggttttcgcaaccctgatggctttgtgtcctcactgaagacctttcccaccatgaaaatgttcgaatacgtcagaaatgatcgtgacggttggaacccatcagtgtgtatgaacttctgtgcggcattcctgagtttcgcccagagcacagtagttcaagatgacccccgactggtgcatcttttctcctgggagcctggcggaccagttactgtttccgtccatcaggatgcgccatacgccttcctgcccatatggtatgtagaggctatgacacaggatcttcccagcccgcctaagactccctcaccaaaatag

SEQ ID NO: 221155 - DNA, 1191 bp, synthetic construct
  misc_feature 1..1191: note = Description of Artificial Sequence: Synthetic coding sequence
  source 1..1191: mol_type = other DNA
atggatcctagggggactaagagaggcgctgagaagactgaagtggccgagcctagaaataagctccctcgacctgctccaagcctgcccacagatccagcactgtactctggccctttccctttttatagacgcccatccgaactaggctgcttctccctcgacgctcagcggcagtaccatggcgatgcccgagcactgcgctactattcccccccaccaactaatgggcctggccctaacttcgatctgcgcgacggctatccagacagataccagccacgggatgaagaagtacaggagcgccttgaccatctgctgtgctggctgttggagcaccgaggaagacttgagggtggaccaggttggttggcagaggctattgtgacatggcggggtcacctgaccaaactgcttaccaccccctacgagcggcaagaggggtggcagctggcagcttctcgcttccaaggaaccctttacttgagcgaggtggaaaccccgaatgccagagcccagcggctggcaaggccacccctgctccgggagctgatgtatatgggatacaaattcgagcaatatatgtgtgcggacaaacctggctctagcccggacccaagcggggaagtgaatactaacgtggcattctgctctgtgctgaggtcacggcttgggtcacacccgctgctttttagcggcgaagtcgattgcacagacccacaagccccttctactcagccaccaacctgctacgtggagctgaaaacttccaaagagatgcactcgcccggacaatggagaagcttctatcgccacaaattacttaagtggtgggctcagagttttctgcccggagttcccaacgtggttgcaggattccgtaaccccgatggcttcgtctccagtctgaagacttttcctactatgaagatgttcgaatacgtaagaaacgaccgggatggctggaacccctctgtgtgtatgaatttctgtgcagcgttcttatcttttgcccagtctactgttgttcaagacgatccaagactcgtgcatctgttttcctgggagcccggtggccctgttaccgtcagcgtccaccaggacgctccatatgcgttcctaccaatctggtatgtcgaagcaatgacccaggatctgccgtcacctcctaagaccccctcacctaagtag

SEQ ID NO: 221156 - DNA, 1191 bp, synthetic construct
  misc_feature 1..1191: note = Description of Artificial Sequence: Synthetic coding sequence
  source 1..1191: mol_type = other DNA
atggatccacgtggcaccaagcgtggggctgagaagaccgaggttgcagaacccagaaacaagctgcccaggccagcccctagcctacccaccgaccccgcattatacagtgggcctttccctttctaccgtagaccaagcgagctagggtgctttagcctcgacgcacagcgtcagtaccatggagacgctcgggcactgcggtactactctcccccacccaccaacggtccaggtccgaatttcgatctgcgtgatggctatcctgacagatatcagcccagggacgaagaagtgcaggagcgtttagaccatttgctgtgttggttacttgaacatcgcggtcgtctagaagggggtccaggctggctggctgaggctattgtgacttggagaggccacctgaccaaactcctcactacaccctatgaacggcaagaaggatggcaactggccgcatcgaggttccagggaacgctctacctctcggaagtcgagacccctaatgccagagcacagagattggcaagaccccctctcctgcgggagctgatgtatatgggctacaaatttgaacaatacatgtgtgctgacaaacccggaagctcgccagaccccagtggagaggttaacacaaacgtcgcattctgttctgtcttgcggtcacgcctgggcagccaccccctcctcttttcgggtgaggtagactgcactgaccctcaagctccatctacccaaccccctacctgttatgttgagttaaaaacatctaaggaaatgcactctccgggacagtggcgctccttttatcggcacaagttgctcaagtggtgggcccagtctttccttcccggagtgccaaatgtggtggcgggatttcggaatcctgatggctttgtgtcctctctgaagactttccctactatgaagatgtttgagtacgtgcggaacgaccgagatggatggaacccctctgtctgcatgaatttctgtgccgcttttctctcttttgcccagagcaccgtggtgcaagatgacccgcgactcgtgcacttattcagttgggagcctggtggacctgtcacggtgtctgtccatcaggatgcaccatacgccttccttccaatctggtatgtggaggccatgacccaggatcttccatctccacccaaaacaccctctcccaaatag

SEQ ID NO: 221157 - DNA, 1191 bp, synthetic construct
  misc_feature 1..1191: note = Description of Artificial Sequence: Synthetic coding sequence
  source 1..1191: mol_type = other DNA
atggatccgagaggcaccaagcgcggagcggaaaaaaccgaggtcgctgaacccagaaataaactgcccaggccggcacctagcctcccaaccgacccggctctttactccggaccgttccctttctaccgcaggccttcagagctggggtgtttctcactggacgctcagagacagtaccacggagatgccagggctctgcgatactacagcccacccccaacgaacggccctggtccaaactttgatctgcgggatgggtacccagatcgataccaacctagggatgaggaagtgcaggaacgcttagaccacctgctgtgttggttattggaacacagaggcagactggaaggagggcctggatggctggcggaggcaattgtgacctggagaggtcatttgactaagctgctgaccaccccatatgagagacaggaaggatggcagctggcagcatctcggtttcagggaacattatatctcagtgaagtagagacccctaacgcaagagctcagaggctggctcgcccaccattgctccgggagctgatgtacatgggctataaattcgaacagtatatgtgcgcggataaacccggtagcagtccggacccctccggcgaggtcaacacaaatgtggcattctgtagtgtgcttcggtctcgccttggttcccacccactgctattctctggcgaagtggattgcacagacccgcaggccccatcaacgcagccacccacatgttatgtggaactgaaaacttcaaaagagatgcactcaccagggcagtggagaagtttctacagacataaactccttaagtggtgggcccagtccttcctgcccggagttcctaatgtggtcgcaggcttccgtaacccagacggattcgtgtccagcttaaagaccttccccacaatgaagatgttcgaatacgtgcgcaacgatcgggacgggtggaatcctagtgtgtgtatgaacttctgcgccgcatttttaagctttgctcaaagtacagtcgtccaagatgacccccgactggtgcatctgttttcttgggagccgggagggccagtgacggtttctgtacaccaggatgccccttacgctttcctgcctatctggtatgtggaagcaatgacacaggatctaccttcccccccaaaaacacctagtccaaagtag

SEQ ID NO: 221158 - DNA, 1191 bp, synthetic construct
  misc_feature 1..1191: note = Description of Artificial Sequence: Synthetic coding sequence
  source 1..1191: mol_type = other DNA
atggatccgcgtggaaccaaacggggagccgaaaaaacagaagtggcggagccacggaacaaattaccgagacccgcacccagcctgcccactgaccccgcactctactctggaccctttcctttttacaggcgtccctctgagttgggctgcttctctctggatgcacagagacaataccacggggatgcccgagctttaagatattattcacctccacccaccaatggccctgggccaaatttcgacctccgagacggttacccagatcgatatcaaccgcgagacgaggaagtgcaggaacggcttgatcatttactatgttggctgctggaacatcgtggtcgtctagagggcggacctggctggctggccgaagccattgtcacctggaggggtcacctgactaagctactgaccacaccctacgagcgccaggagggatggcaactcgctgcgtcccgatttcagggaaccttgtacctgagcgaggtggagaccccaaatgcgagagcccaaaggttggctcgacccccactcttgagagaattgatgtatatgggttataagttcgagcagtacatgtgcgcagacaagccaggtagctccccggatccctctggcgaggtaaacaccaatgtggcattttgctccgttctgcgcagtagactgggatctcatcctctgctctttagcggcgaggttgactgtaccgatccccaggccccaagtacccaacctccgacatgttacgtcgaactgaaaacctccaaagaaatgcacagccctggtcagtggcggtcattctaccgccataagctgttgaagtggtgggcccagagctttctgccaggggtaccaaatgtggtagcgggatttcggaatccagatggcttcgtatcctccctgaaaacttttccaaccatgaaaatgttcgagtatgtgcggaatgacagggacgggtggaatccatcagtgtgcatgaacttttgtgctgctttcttatcatttgctcagagcactgtcgtacaggacgacccaagactcgttcacctcttttcttgggagcccggtggaccagtgaccgtgtcggtacaccaagacgcaccctatgcgtttctacccatatggtatgtcgaggccatgacccaagatctgccatcgcctcccaagactccaagtcctaagtag

SEQ ID NO: 221159 - DNA, 1191 bp, synthetic construct
  misc_feature 1..1191: note = Description of Artificial Sequence: Synthetic coding sequence
  source 1..1191: mol_type = other DNA
atggaccctcgaggcaccaaacggggagctgagaagaccgaggtggcggagcctcgaaacaagctgcctaggccggctcctagtctgcccactgaccctgcactgtactccggcccttttccgttctatcgcaggccgagcgagctggggtgtttcagcctggacgctcagcgccagtaccacggggacgctcgcgcactccggtattacagcccaccccctaccaacggtcctggcccaaattttgatctcagagacgggtaccccgaccggtatcagcccagagacgaggaagtgcaggagagactggaccaccttttgtgctggcttctggagcaccgcggacgcctggaaggaggaccaggatggctcgccgaagccattgtcacgtggagagggcatctaaccaagctattgaccaccccatatgagcggcaggaaggttggcagctcgcagcaagcagatttcagggaacactgtatctgtcggaggttgagactccgaatgctcgggcacagagactcgcccgtccacctctgctcagggagcttatgtacatgggatataagtttgaacagtacatgtgcgccgacaagcctggatccagcccagacccatccggggaggtgaacacgaatgtcgcgttttgtagcgttcttagaagtagactcggttcccatcctctgctcttctctggcgaagtggattgcactgatccgcaagctccttccacccaaccgcctacctgctacgttgaactcaagacctcgaaagagatgcattctccaggccaatggcgctctttctaccgacataaactgctcaaatggtgggcccagagcttcctgcccggtgtcccaaacgtggttgcagggttccggaaccctgatgggtttgtctccagcttgaaaacctttccaaccatgaagatgttcgagtacgtaagaaacgacagagacgggtggaatcccagtgtgtgcatgaacttctgtgctgcatttctgagtttcgcacagagcacggtagtgcaggacgacccccgactcgtgcaccttttttcctgggagcccggaggccctgtcacagtcagcgtccatcaggacgccccatacgccttcctccccatatggtacgtggaggccatgacgcaggaccttccaagtccacccaaaactccctcccccaaatag

SEQ ID NO: 221160 - DNA, 1191 bp, synthetic construct
  misc_feature 1..1191: note = Description of Artificial Sequence: Synthetic coding sequence
  source 1..1191: mol_type = other DNA
atggatccaaggggaaccaaacggggtgcggagaagacggaggtggccgaaccacggaacaaactccccagacctgctccctcactgcccaccgatcccgcactttactccggtccctttcccttctataggcgcccatccgagctgggttgctttagtctcgacgcccagaggcaataccatggtgatgcccgagctctgagatattattcccctccccctaccaatggaccagggccaaactttgaccttagggacgggtatcccgacaggtatcaaccacgggacgaagaggtgcaggagaggctcgatcaccttttgtgctggcttttggagcacaggggtcgcctggagggaggacctggatggctggctgaagcgattgtgacttggagaggacacctcactaaactgcttaccactccgtatgagcgacaagaggggtggcagctggcagctagcaggtttcaaggcacactctatctcagcgaagtcgagactcctaacgctcgagcacagcggcttgcaagaccacctctgttacgagagttgatgtatatgggatacaaattcgaacagtatatgtgcgctgataaacctgggtctagtcccgacccatccggcgaagtaaatactaatgtggccttctgctccgtgctgcggtccagactgggctcccaccccctccttttcagcggggaggtcgactgcacggatccacaggccccatctactcagcctccgacatgctacgtcgaactaaagaccagtaaggaaatgcaatcacccggacaatggaggagcttctaccgccataaactattaaaatggtgggcccagtcttttctgccaggcgtcccgaatgtggtcgcgggttttcgaaaccccgatgggttcgtgagctcactcaagaccttccctactatgaaaatgttcgaatatgtacgaaacgaccgggacggctggaatccatcagtctgcatgaatttttgcgccgcatttttatcctttgctcagtcaacagttgtgcaagacgatccacgccttgtacacttgttttcatgggagcccggtggaccggttaccgtctccgttcaccaggacgccccttatgcatttctgcctatttggtacgttgaggctatgacacaagatttacccagccccccaaaaacacccagtcccaagtag

SEQ ID NO: 221161 - DNA, 1191 bp, synthetic construct
  misc_feature 1..1191: note = Description of Artificial Sequence: Synthetic coding sequence
  source 1..1191: mol_type = other DNA
atggatccacggggaactaagagaggcgctgagaaaacggaggtggctgaaccacgcaataaactcccgaggcccgctccttcactccctaccgatcctgccctgtatagtggacctttccctttctatagacgaccctcagaattaggatgcttctctctagacgcacaacgtcagtatcatggcgatgcacgcgcattgcggtattattcccctcctcccactaatggcccaggacccaatttcgacctaagagacggataccctgatagatatcagcctagagacgaggaagtccaagagcggctcgaccaccttctgtgttggcttttggaacatcggggacgtctagaaggaggacccggttggctcgcagaagccatagttacgtggcggggacacctgacaaagttgctgactacaccttatgaaagacaagaaggatggcaactagccgcttctcgtttccagggaactctctatctcagcgaggtggagacacccaacgccagggcgcaacgccttgccaggccaccgttgctgcgagagctaatgtacatggggtacaaattcgaacaatatatgtgtgcagacaaaccaggctccagccccgacccctcgggcgaggtgaataccaacgtggcgttctgttcagttcttcggagtagacttggctcacaccctctgctgttctccggcgaagtggattgcaccgaccctcaggccccaagtacccagcctcccacatgctatgtggagctcaagacatcgaaagagatgcactcacccggtcagtggaggagcttctaccgccataaattactgaaatggtgggcgcagtcatttctgcccggagttcctaatgtggttgcaggttttaggaatcccgatggatttgtgtcctctctgaaaaccttccccacaatgaaaatgtttgaatacgtgcgcaatgacagagatggctggaacccgtccgtatgtatgaacttctgcgctgctttcttgtcctttgcccagagtacagtagtccaggacgaccctcgcctagttcatttattcagttgggaacccggaggacccgtaactgtgagcgtccaccaggatgctccgtacgcctttctccctatctggtacgtggaggccatgacacaggacttgccatctcccccaaaaacaccatcgcccaaatag

SEQ ID NO: 221162 - DNA, 1191 bp, synthetic construct
  misc_feature 1..1191: note = Description of Artificial Sequence: Synthetic coding sequence
  source 1..1191: mol_type = other DNA
atggaccctagagggaccaagcgcggtgctgagaagactgaagttgctgagccaagaaacaagctccctcgtcccgctccttcgttgccaaccgacccggctctctattctggtccatttcctttctacagaaggccaagtgaacttggttgcttttcattggacgcccagagacaataccacggagacgccagagctctccgctactattcgccaccccctactaatgggccagggccaaattttgatctgagggacgggtacccagacaggtatcagccccgtgatgaggaggttcaggagcggttggaccaccttctgtgttggttgttagaacacagaggaagactcgaaggagggccaggttggctggccgaggcaatcgtaacctggagggggcacttgacaaagctcttgacgacaccatatgagcgccaggaaggttggcagctcgccgcttctaggttccagggtacactttatctgagtgaagtggagacccctaacgcaagggctcagcggcttgctcgcccaccgcttctgcgggagctgatgtatatgggctataaattcgagcagtacatgtgcgctgataaacccggaagcagccccgatccgtccggcgaggtaaacaccaacgttgcattctgctcagtacttcggagtagactgggaagccatccccttctgttcagcggggaggtcgactgtacagacccacaagcgccaagtacccagcctccgacttgttatgttgaactgaagacatctaaagaaatgcactccccaggacagtggcgatcattctatagacacaagttgctcaagtggtgggcccagagttttctcccgggtgtgccaaatgtggtcgccggtttccgtaatcccgacggtttcgtgtctagtctgaaaacattccccacgatgaaaatgttcgaatacgttcgaaatgatcgggatggttggaaccctagtgtctgcatgaacttctgcgctgctttcctctctttcgcacagtcgaccgtggttcaagacgatccgagactggtgcacctgttctcgtgggagccgggaggacctgtgaccgtgtccgtccaccaggatgccccttacgcattccttcctatttggtacgttgaggctatgactcaagacctcccttctccacccaaaacacccagccctaaatag

SEQ ID NO: 221163 - DNA, 1191 bp, synthetic construct
  misc_feature 1..1191: note = Description of Artificial Sequence: Synthetic coding sequence
  source 1..1191: mol_type = other DNA
atggaccctcgaggtaccaaacgaggcgcagaaaagaccgaggtcgctgaaccaagaaacaagttgccgaggccagcaccatcgcttccaacggacccggctctgtacagcgggccattcccattttataggcgtccctctgaactcggatgtttttctctagatgcacagaggcaatatcacggcgacgcaagggcccttaggtattattctccccctcctactaacgggccaggtccgaacttcgatttacgcgacggttacccggatcgctatcagccacgagatgaagaagtccaggaacgtctggatcatctattgtgctggctcctcgagcaccggggtcgcttagaagggggaccaggctggctcgccgaagccatagttacatggcggggacacctgaccaagttgctgactacaccttacgagagacaggaagggtggcagctggcagcaagcaggttccaaggcaccctgtatttatctgaagttgagacacccaatgccagagcccagcggctcgctcggcctcctttactcagggagctgatgtacatgggttacaagttcgagcagtacatgtgcgccgataaacctggctcaagcccagatccaagcggcgaggttaacacaaatgttgctttttgttccgtgcttcgatcaaggcttggatcacatcctctactgttttctggcgaggtcgattgcactgatccacaggcacccagcactcaaccgccaacgtgttatgtggagctgaagacttcaaaggagatgcacagcccaggacaatggaggagcttctatcgccacaaattactcaagtggtgggcccagagcttcctgcctggggtgccaaacgtggtggccggttttcggaatcctgatgggtttgtgtctagcttaaaaacatttcctacgatgaagatgttcgagtatgtgcgaaatgatcgggacggctggaacccatccgtgtgtatgaatttctgcgcagcctttctgagctttgcacaatctacggtcgtgcaggacgatccacggttagtgcacctctttagctgggaacctggcggaccagtgaccgtgtccgtgcatcaggacgcgccttacgcttttctcccaatctggtatgtagaggctatgacacaagatttacccagtccaccaaaaactcctagtcctaaatag

SEQ ID NO: 221164 - DNA, 1191 bp, synthetic construct
  misc_feature 1..1191: note = Description of Artificial Sequence: Synthetic coding sequence
  source 1..1191: mol_type = other DNA
atggacccacggggtacaaaacgcggagcagaaaagacagaggttgcggaacccagaaacaagcttccaagacctgccccatctctgcccacagaccctgctttgtattccggccctttcccattctatagacggccatccgagctagggtgtttctctctggatgcccaacgccaataccatggcgatgccagagcgctacgttactactccccaccacctaccaacgggcctggcccaaattttgacctgagggacggataccccgacagatatcaaccgcgagatgaggaagtgcaggagagactggaccatctcttgtgttggctccttgagcacagaggtcggctggaggggggacccggatggctggccgaagccatagtgacctggcgcggacacctgacaaagctgttgacaaccccttacgagcgccaggagggctggcagctggctgctagcaggttccagggcactctgtatctgtctgaagtcgaaactcccaacgcaagggctcagcgactggccaggcctccacttctcagagaactgatgtatatgggctacaaattcgaacagtacatgtgcgccgacaagcctggctctagtcctgatccctctggcgaggtaaacactaatgtagccttctgttcggtgctaaggagtagactgggctctcatcctctgttattctcaggtgaggtcgactgcaccgatccgcaggctccttctacccagccacctacctgctatgtggagttaaagacaagcaaggagatgcatagccccggacagtggcggagtttctacaggcacaagctgttgaagtggtgggcccagtcctttcttccaggtgtacccaacgttgtggccggattccgaaatccagacggcttcgtctcctccctgaaaacatttccaaccatgaaaatgttcgagtacgttcgaaacgacagggacggctggaatccaagtgtgtgtatgaacttttgcgcggctttccttagctttgcgcagtctacagtggtgcaggacgatccacgccttgtccatctgttcagctgggagcctggaggtccggtcacagtctcagtacaccaagacgctccctatgcattcctgccaatctggtacgttgaggccatgacccaggatttgccgagccctcctaagactccatcccccaaatag

SEQ ID NO: 221165 - DNA, 1191 bp, synthetic construct
  misc_feature 1..1191: note = Description of Artificial Sequence: Synthetic coding sequence
  source 1..1191: mol_type = other DNA
atggatccaaggggaacaaaacgcggtgcagaaaagaccgaagttgccgagcccagaaataagctgcctcgtcctgccccaagcttgcctacggatccagccctgtacagtggaccatttcccttctacaggcggccaagcgagttgggatgcttctcattagatgcccaaaggcagtatcatggggatgcgagagccctgaggtattacagccccccacccaccaacggtccaggaccaaattttgatctccgtgacgggtaccccgatcgctaccagcctagagacgaggaggtacaggagagacttgaccacctgctttgttggctgcttgagcatagggggcgattagaagggggacccggttggttagctgaagcaattgtcacttggcggggtcatctcacaaagctgctgacaaccccctacgaaagacaggaaggctggcagttagccgctagtcggtttcagggcactctctacttatccgaagtggagacacctaatgcaagggcccagcgtctcgcgagaccaccccttctcagagaactcatgtacatgggctacaaattcgaacagtatatgtgcgccgataagcccggaagttcaccggaccctagtggcgaagtgaacacaaatgtcgcgttttgttccgtgctgcgctcacgactaggctctcacccactgttatttagcggtgaggtagattgcaccgacccccaagctcccagtacccaacccccaacctgttacgtcgagctgaaaactagtaaagagatgcaatctccaggccagtggcgcagtttttatcgtcataaactgctgaagtggtgggcgcaatccttcctgccaggcgtcccaaacgtagttgccggattccgaaatcctgacgggtttgtatcatcactgaagactttccccacgatgaagatgttcgagtatgtgcggaatgatcgtgatggctggaatccaagcgtctgcatgaacttctgtgctgctttcctatcttttgctcagtcgacagtggtgcaggatgacccacgactagtacacttgttctcttgggagcccggtggccctgttaccgtgtcagtgcaccaggacgccccatatgcattccttcctatctggtacgtggaggcgatgactcaggatctgccctcgcccccaaagacaccctcccctaagtag

SEQ ID NO: 221166 - DNA, 1191 bp, synthetic construct
  misc_feature 1..1191: note = Description of Artificial Sequence: Synthetic coding sequence
  source 1..1191: mol_type = other DNA
atggacccccgtggcaccaaacgtggcgctgagaaaaccgaagtggcggagcccagaaataagttgccaagaccagccccttccttaccaaccgacccggcactgtactcgggtcccttcccattctacaggagacctagtgagctcgggtgtttcagtttagatgctcagaggcagtatcacggagacgcacgggctctgagatattattcaccccctcctactaacggacctgggcctaactttgacctacgagatgggtatccagaccgatatcagccacgagatgaggaggtccaggaacgactagatcatcttttatgctggcttttggagcaccgaggcaggctggaaggaggtccgggttggcttgcagaggccatcgttacctggagaggtcacttaacaaagctgctcactactccctacgaacggcaggaaggctggcagcttgccgcaagtaggtttcaggggaccctctacctcagtgaagtggagaccccaaacgccagggcccaacgtctggctagacctcctctgctgcgagaattaatgtatatggggtataaattcgaacagtacatgtgcgccgataagcccggatcaagccctgacccatctggtgaggtgaatactaacgtggccttctgctcagtgctgcgtagccgcctcgggtctcaccctctcttgttctcaggagaagtggactgcaccgacccacaggccccaagcacgcagccaccgacatgctatgtggaactcaagacatcgaaggaaatgcacagccccggtcaatggcggtctttttacagacacaagcttctgaagtggtgggctcagtcttttctgccgggtgtgcctaacgttgtggcagggtttcggaatcccgatggttttgtcagcagcttaaaaacatttcccactatgaaaatgtttgagtatgtgcgcaacgatcgagacggatggaatccttcagtctgtatgaacttctgcgcagcttttctgagctttgctcagtcaaccgttgtccaagatgacccacgactggtccacctcttcagctgggaaccaggcggaccagtgaccgtctcagtccatcaggacgccccttacgcgttcctgcccatttggtatgttgaggcaatgactcaggacttacctagcccccctaagacacccagtcctaaatag

SEQ ID NO: 221167 - DNA, 1191 bp, synthetic construct
  misc_feature 1..1191: note = Description of Artificial Sequence: Synthetic coding sequence
  source 1..1191: mol_type = other DNA
atggacccgaggggaaccaaacggggagccgagaagactgaggtcgcagaaccacgcaacaaactgcccagacccgcaccctcgttaccaactgaccccgcactgtactccgggccttttcctttctacagaagaccatctgaactgggatgctttagcctagatgctcaacgccaataccacggcgacgccagggcactgaggtactacagcccgcctcccacgaacggccctggcccaaacttcgacctcagagacgggtacccggacagatatcagccacgggacgaggaggtgcaggaaagattagatcatcttctttgttggcttttggagcaccggggacgcttggaaggagggccaggatggcttgccgaagcaattgttacgtggcggggtcacctcactaaactgttgaccactccatacgagagacaagaaggctggcaattagcggctagccgcttccaaggtacactgtacctgagcgaggtggagactccgaacgccagggcacagcgcctggctcgccctccattgttaagggagcttatgtatatgggctacaaattcgagcaatatatgtgtgcggacaagcccggatcaagtcccgacccctcaggcgaagtaaacacaaacgtggcattttgtagcgtgctgcgctcgcgccttggatctcacccgctgctgttctccggcgaggtggattgtacagatcctcaggccccttctactcagccccctacttgttacgtcgaactcaagacatccaaggaaatgcattcacccggacagtggcggagcttctaccggcacaaactattgaaatggtgggcccaatctttcctgccaggtgtgccgaatgttgttgcaggctttaggaaccctgatggcttcgtatcatccctgaagacatttcccaccatgaaaatgttcgaatacgtccgcaatgacagggatggttggaatccatcggtctgtatgaatttctgtgcagcatttcttagcttcgcccaatcaacagttgttcaggacgacccaagactggtgcatttgttttcttgggagccaggaggacccgtcacggtttcagtacaccaggacgccccttatgccttcctcccgatttggtatgtcgaagccatgacccaagaccttccgagcccgccaaaaacaccctctcccaagtag

SEQ ID NO: 221168 - DNA, 1191 bp, synthetic construct
  misc_feature 1..1191: note = Description of Artificial Sequence: Synthetic coding sequence
  source 1..1191: mol_type = other DNA
atggaccctcgcggaacaaagaggggagctgagaagaccgaggttgctgagcctcgcaacaagcttccaagacctgcaccctccctcccaaccgacccagcactgtattcaggtccatttcctttctacagaagaccatctgaattgggatgctttagtctcgatgctcagcgacagtaccatggggatgccagagctctgaggtactacagtccaccacctacaaacggaccaggccctaatttcgacctgcgcgacggatatcctgaccgatatcaacccagagatgaggaggtgcaggagcggctcgaccacctcctgtgctggctgctggagcatcgcggaagacttgaaggtggtcctggatggctggcagaggcgatcgtgacgtggcgcggtcacctcaccaagttgctcacaacaccttatgaaaggcaggaggggtggcaactggccgcttcccggttccagggaactctgtatctgtcggaggtcgaaacccctaacgcaagggcccagcgactggcacgccctcctctcttaagggaactcatgtatatgggctacaaattcgagcagtacatgtgtgccgacaagcctggatccagccctgatccgtctggcgaggtgaataccaacgtggcattttgctctgtcctgcgctctcgactgggcagtcatcccctcctgtttagcggtgaagtcgattgcaccgatcctcaggccccttctacgcagcctccaacctgctatgtagaactgaaaacaagcaaagaaatgcattcacccggtcagtggcgaagcttttatagacataagttgttgaagtggtgggcacaaagttttctgccgggtgtcccaaacgtggtagccggattccgaaaccccgatgggttcgtatcttctctgaagacatttcctacgatgaagatgtttgagtatgtacggaacgaccgggacggctggaacccctccgtgtgcatgaatttctgcgcagcttttctttcctttgcccaatctacagttgtgcaggacgatcctcgcctggtacacctgttcagctgggagccagggggtcccgttacagtgtcagtgcaccaggacgctccatacgcattcctgccaatctggtatgtggaagcaatgacacaagatcttccaagtccgcctaaaaccccctctcccaagtag

SEQ ID NO: 221169 - DNA, 1191 bp, synthetic construct
  misc_feature 1..1191: note = Description of Artificial Sequence: Synthetic coding sequence
  source 1..1191: mol_type = other DNA
atggatcctcgcggtaccaaacgcggtgccgaaaaaacagaggtggctgagcccagaaataaactgcctcgccctgcaccttccctccccaccgatccagccctgtattcaggccctttccctttttataggcgaccctccgagttgggctgcttctccctcgatgcccagcgacagtaccacggagatgccagggcactccggtactacagccctcctccaactaatggtccgggtccaaacttcgatctacgcgacggctaccctgacaggtatcagcctcgagacgaggaagttcaggagcgtctggatcaccttttatgttggctcttggaacacagggggagactcgaagggggtcccggttggctggcggaagccattgtcacgtggcgtgggcacctgaccaagcttttaacgaccccatacgaaagacaagaaggctggcaattggctgcctctaggttccagggtacactttacctctcagaagtcgaaacgccaaatgcccgagcccaacgcttggcgaggcccccactactcagagagctgatgtacatggggtataaatttgaacagtatatgtgcgccgataagcccggtagtagccctgacccctccggcgaggtcaacaccaacgtcgcattctgtagcgtccttaggtcacggctggggtctcaccctttactattctccggcgaggtcgattgtactgacccccaggcgccttcgacacagcctccaacctgttatgtggagctgaagacaagtaaagaaatgcacagccctggacagtggcgatccttctacagacacaaactgctgaagtggtgggcacagagttttctccccggtgtgccaaacgtggtagcaggttttcgcaaccccgatggcttcgtctctagcctgaaaactttccccacaatgaaaatgtttgagtacgtgaggaatgacagggacgggtggaatccttcagtgtgcatgaacttctgcgcagccttcctgtcgtttgcccaatccaccgtggtgcaggatgatcctagactggtgcatctcttcagctgggaacctggaggtcctgtgaccgtttccgtacatcaagacgctccttatgctttcctcccaatctggtatgttgaagccatgactcaggatctgccctcaccacctaaaacccccagcccaaagtag

SEQ ID NO: 221170 - DNA, 1191 bp, synthetic construct
  misc_feature 1..1191: note = Description of Artificial Sequence: Synthetic coding sequence
  source 1..1191: mol_type = other DNA
atggaccctcgcggtactaagaggggagccgagaagacagaagtagcagaacccaggaataagctgcctcggcctgccccttccttgcctacggaccctgccctatactctggaccttttccattctatcgacgcccttctgaactcggttgttttagtcttgatgcccagaggcaatatcatggagatgcccgagccctacgatattattctccaccccctacaaacggcccaggtcccaactttgacctccgcgacggataccccgatagataccagccacgggatgaggaagtgcaggaacgactggaccacttgctgtgttggctgcttgagcatcgcggaagactggagggcggtcctggatggcttgctgaggccattgttacatggaggggccatctgactaagctgctgaccacaccttatgaaaggcaggaagggtggcagctggccgctagtcgcttccagggcacgctttacctaagcgaagtggaaacccctaatgcccgagcccagcgccttgctcggcctcccctgctccgggaacttatgtacatggggtataaattcgagcaatacatgtgcgctgacaagccaggttccagtccagacccgagcggtgaggtgaacacaaatgttgccttctgcagtgtgctcagaagtagactcggctcccaccctttactgttttccggggaagtggattgcactgacccccaagccccaagcacccagccacccacatgctacgttgaactcaagacgagcaaggaaatgcactcgccagggcagtggcgatctttttatcgccacaaactcttgaaatggtgggctcagtcgtttctccccggagtgcccaacgtcgtagccggattcagaaatcctgacggatttgtgtcttcccttaaaacgtttcctaccatgaaaatgtttgagtatgtcagaaatgatcgggacggctggaaccccagcgtctgtatgaacttttgtgccgcttttctgagctttgctcagtccactgtcgtgcaggatgaccctcgtctggttcacctgtttagttgggagcccggaggcccagtgactgtatccgtacatcaagacgctccatatgcctttcttcccatttggtacgtcgaagccatgacacaggatctcccttctccaccgaaaactcccagtcctaagtag

SEQ ID NO: 221171 - DNA, 1191 bp, synthetic construct
  misc_feature 1..1191: note = Description of Artificial Sequence: Synthetic coding sequence
  source 1..1191: mol_type = other DNA
atggatcctagaggtaccaaaaggggcgcagaaaagactgaagtcgcggagccgagaaataaactaccacgaccagcgccttcgctgcccacagaccctgcactgtattccggccctttcccattctacagacggccatcagaactggggtgttttagcttagatgcccaaagacaatatcatggagatgccagagccctgagatattatagccctccacctactaacggacccggtcctaattttgacctgagggatggctatccagataggtatcagccccgtgacgaggaagtgcaggagcgcctggaccatctcctctgctggctactggaacatagaggaaggcttgaggggggtcccggttggctggctgaggctatcgtcacatggcgtggccacctgacaaaactgcttactacgccctacgagcgccaggaagggtggcagctggcggcatcgaggttccaagggacattgtacctctctgaggtcgaaactcccaatgctagggcccagagacttgcaagaccaccccttcttagggagcttatgtacatggggtataaatttgagcagtacatgtgtgcagacaagcccggttctagtccggatccatcaggcgaggtgaatacaaacgtcgcattttgctccgtgctccggtccagactcgggagtcatccactgctgttctccggagaggtggactgcactgacccccaggccccatccacccagcctcctacttgttacgtcgaacttaagacctctaaggaaatgcagtcccctgggcaatggcggagcttttaccggcacaaactccttaaatggtgggcacagtcttttctcccaggagtacccaacgtcgttgcgggtttcagaaatcctgacggctttgtatcttctctcaaaaccttcccgaccatgaaaatgttcgaatacgtcaggaacgacagagacggttggaatccttcagtgtgcatgaacttctgtgccgcattcttgagcttcgcacagagtacagtggtccaggacgacccgagacttgtgcatcttttctcgtgggagcccggaggcccagtcactgtgagcgtgcatcaggatgctccttatgcctttttacccatctggtacgtagaagccatgactcaagatttgccctcacctcccaagacgcctagcccaaagtag

SEQ ID NO: 221172 - DNA, 1443 bp, synthetic construct
  misc_feature 1..1443: note = Description of Artificial Sequence: Synthetic coding sequence
  source 1..1443: mol_type = other DNA
atgaacgcatcagaattccgaaggcggggaaaagagatggtggattacatggccaattatatggaggggatcgaaggaagacaagtgtaccccgacgtggagcccggatatctgcgtccacttatcccagccgcagcaccacaggaacctgacactttcgaggacataattaatgatgttgaaaaaatcattatgcctggcgtgactcactggcatagcccttacttctttgcctacttcccaaccgctagtagctatcctgctatgttagccgatatgctttgcggtgcaatcggttgtatcggcttctcctgggccgcatcacctgcttgcactgagctggagactgtgatgatggactggctgggaaagatgctggaattgcccaaagccttccttaacgaaaaggcaggcgagggaggtggggtgatccagggctccgcatctgaggccactctagttgccctgttggctgccaggaccaaggtcatccacagattacaggccgcatcaccggagctgacccaagccgctattatggaaaagctcgtggcttatagcagcgatcaggcccactcatctgttgagcgcgctgggttgatcgggggagtgaaactgaaggccattcctagcgacgggaatttcgctatgagggcgtcagcgctgcaggaagcactggagagagacaaagctgccggtctcattcccttcttcatggtcgctaccttggggacaacaacatgctgctcattcgacaatctgcttgaggtgggcccaatctgcaataaagaggacatttggctgcatgtggacgccgcttacgcagggtcggcctttatctgcccggaattcagacacttactgaatggggtagaattcgctgactcgttcaatttcaatccccataaatggcttttggttaatttcgattgcagcgccatgtgggtcaagaagcgcacagacttgaccggcgctttccgcttagatcccacctatctaaagcatagtcatcaagactccgggttaatcactgactaccgccactggcagatccccctaggcaggcgattccgatcccttaagatgtggttcgttttccgaatgtatggagtgaaaggtctgcaggcctatattaggaaacatgtacagctttcccatgaattcgaaagtctggtgaggcaggatccgaggttcgagatctgtgttgaagtcatcttaggtttagtatgcttcagactcaagggctccaataaggtgaacgaggcactactgcaacgtattaattcagctaaaaaaatccacctggtgccctgtcacctccgggacaagttcgtgctgcggttcgctatctgcagtaggactgtcgaaagcgctcacgttcagagggcatgggaacacatcaaggaacttgcagccgatgttctgcgggcagagcgggagtag

SEQ ID NO: 221173 - DNA, 96 bp, synthetic construct
  misc_feature 1..96: note = Description of Artificial Sequence: Synthetic coding sequence
  source 1..96: mol_type = other DNA
atgaacgccagcgaatttcgccgaagggggaaagagatggtggactatatggccaattacatggagggcatcgaggggcgacaagtctacccttag

SEQ ID NO: 221174 - DNA, 51 bp, synthetic construct
  misc_feature 1..51: note = Description of Artificial Sequence: Synthetic coding sequence
  source 1..51: mol_type = other DNA
atgaacgcatcagaattccgtagaaggggcaaggaaatggtggactactag

SEQ ID NO: 221175 - DNA, 1443 bp, synthetic construct
  misc_feature 1..1443: note = Description of Artificial Sequence: Synthetic coding sequence
  source 1..1443: mol_type = other DNA
atgaacgcaagcgagttccggagacgagggaaggagatggtggattatatggccaattacatggaagggattgaggggaggcaggtatacccagacgtggaacccggatatctccggccactcattccagctgcagctccccaggagcctgatacctttgaagatatcattaacgatgtggaaaagatcatcatgccaggggtgacccattggcattccccatatttcttcgcatactttccaaccgcctccagttatcccgcaatgctggctgatatgctctgcggtgctataggatgtatagggttttcctgggcagccagcccagcctgcaccgaactcgaaaccgtgatgatggattggttaggaaagatgctggaactccccaaggcctttctcaacgagaaggctggagaaggcggtggagtgatacaaggatcggcgtccgaggctacccttgtcgctcttctggctgctcgaactaaggtgatccatcggctacaggcagcatctcccgaactcactcaggccgcaataatggagaaactggtggcttacagcagtgaccaggcccactcaagcgttgagagggctggcctgatagggggtgtgaagttaaaagcaataccatccgacggtaatttcgctatgcgtgccagcgccctgcaggaggccctcgagcgcgacaaggcagctgggttgattccgttcttcatggtggccaccctcggtacgaccacttgttgctcattcgataacctgctcgaggtcgggccaatctgcaataaagaggacatctggctgcacgtagatgccgcttacgccggaagcgccttcatctgtcccgaattccgccatctcctcaacggagtggagtttgccgatagcttcaattttaatccccacaagtggttgctggttaatttcgactgtagcgcaatgtgggtaaaaaaacgcaccgatttaaccggagcatttcgcctggatccaacgtatctaaaacactcacaccaggattcagggctcatcactgactaccgccattggcaaataccactgggcaggcgattccgtagtctgaaaatgtggtttgtgtttagaatgtacggcgtgaaagggctgcaggcctatattagaaaacacgtgcaactaagccatgagttcgagtcgctggtacgacaggaccccaggttcgagatttgcgtggaagtcatcctgggactcgtgtgtttccggttaaagggttccaacaaggtgaatgaggcgctgttgcagcgaattaacagcgcaaaaaaaatccatcttgtgccctgtcacctcagagacaagtttgtgctaaggttcgcaatttgctcccggactgtggaaagcgcccacgtgcagcgtgcctgggagcacattaaggagctcgccgcagacgttttaagggccgagagggagtag

SEQ ID NO: 221176 - DNA, 1017 bp, synthetic construct
  misc_feature 1..1017: note = Description of Artificial Sequence: Synthetic coding sequence
  source 1..1017: mol_type = other DNA
atgaatgcctccgagtttcgaagaaggggcaaagaaatggttgattacatggctaattacatggaaggaatcgagggacgccaggtctatcccgatgtggaaccaggatacttgcgcccactcattcctgccgcagccccacaggaacctgatacattcgaggatattatcaacgatgttgaaaaaattatcatgcccggtgtgactcactggcactccccttattttttcgcctacttccctacagcatcctcctaccctgcaatgcttgctgacatgctgtgcggagctattgggtgtatcgggttttcttgggccgcttcccccgcttgtaccgagctggagaccgttatgatggattggctgggcaaaatgctcgaacttccaaaggcctttctaaacgaaaaagccggtgagggaggcggtgtgatccaggggtcagccagcgaagctacactggtggcgctgctcgcagccaggacaaaagtgatccatagattacaagccgcatctcctgagctgactcaggctgcaatcatggagaagctcgtggcgtacagttcagatcaggcccattcttcagttgaacgtgcaggacttattggcggtgttaagttgaaggcaattccaagcgatggcaatttcgccatgcgggcatcagccctccaggaggccctagagcgcgataaagccgcagggctcatcccgtttttcatggtggctaccctgggcacaaccacttgctgctctttcgacaacctgctggaggttggcccaatctgcaacaaggaggatatatggctgcacgtggatgcagcctacgctggatctgcctttatttgccccgaatttcgtcatctgctgaacggcgtggagtttgccgattcttttaattttaatccccacaaatggctactggttaatttcgattgtagtgctatgtggagtcgtcagcctgtgcggatgctacgcctgaaaaagacatgcctagtgtctgccgttgtccgcaggtcctag

SEQ ID NO: 221177 - DNA, 1209 bp, synthetic construct
  misc_feature 1..1209: note = Description of Artificial Sequence: Synthetic coding sequence
  source 1..1209: mol_type = other DNA
atgaatgcctccgagtttagacgacgcggaaaagagatggtagactacatggcaaactatatggaaggaatcgaaggacggcaggtgtatccagacgttgagcccggatatttgaggcctctcatccccgctgctgcccctcaggaacctgacacctttgaggacatcataaacgatgtggaaaaaatcattatgccaggcggttccgctagcgaagctacgctcgttgccttgctcgcagctaggacgaaggtgatccaccggctgcaggctgcttcacccgagttgacacaggcagccatcatggagaagctagtggcgtacagctcagatcaggcccactcctccgttgagagggccggactgataggaggagtgaagctgaaagcaattccaagcgacgggaatttcgccatgagagcatcagccttgcaggaggcgctcgaaagagataaggcagccggactcattccattttttatggtagccactttgggcaccacaacttgctgcagctttgacaacctgctggaggtcggaccaatctgcaacaaggaggacatttggttacacgtggacgcagcgtatgccggatcagcctttatctgcccagagtttcgtcacctgctcaatggcgtggaatttgctgattccttcaactttaacccccacaagtggctgctggtcaatttcgattgctcagcaatgtgggtcaaaaaaagaaccgatctaaccggcgctttcagactcgaccctacatatctcaaacacagccatcaggacagcgggttgatcaccgactaccggcactggcagatcccattaggaaggcggttccgcagtctgaaaatgtggttcgtcttccgtatgtatggagttaaaggcctgcaggcgtatatccggaagcatgtacagttgagccatgagttcgagtccctggtccggcaggatccacgcttcgaaatttgcgtggaggtcatacttggcctggtgtgttttcggctgaaggggagcaataaggtaaatgaagccttacttcaaagaataaattctgctaagaaaatccatctcgtgccctgccacttaagagataagttcgtgcttagattcgctatttgctctaggactgttgaatccgcacacgtgcagagagcctgggaacatataaaggaattagcagctgacgtcctcagagctgagcgcgagtag

SEQ ID NO: 221178 - DNA, 1164 bp, synthetic construct
  misc_feature 1..1164: note = Description of Artificial Sequence: Synthetic coding sequence
  source 1..1164: mol_type = other DNA
atgaatgcatctgaatttcgacgcaggggcaaagaaatggttgattacatggcaaattatatggaggggatcgaaggcaggcaagtttatcccgatgtggaacctggctatctacggcctctgatcccagctgctgccccacaagaacccgacacttttgaggacatcataaacgacgtcgagaaaatcataatgcccggagtaacacactggcacagcccatattttttcgcctattttccaaccgcttcatcgtatcccgcaatgctggccgatatgctgtgtggtgctatcggctgcatcggctttagctgggcagcatcccccgcatgcacagagctcgagacagtgatgatggactggttagggaagatgctcgagcttccgaaagcctttttgaacgagaaggccggtgaaggcggtggcgtgatccagatggtggccacgctagggaccactacatgttgctccttcgataatctcttggaggtaggcccaatctgtaacaaggaagacatctggttgcacgtagacgcagcttacgcaggctctgccttcatctgtcccgaatttcggcacctgctcaatggcgtggagttcgctgattcctttaatttcaaccctcacaaatggcttctcgttaacttcgattgttccgccatgtgggtgaaaaagcggaccgaccttaccggcgcttttcgcctagacccaacctacctcaaacattcccaccaggactctggattgatcactgactatcgccattggcagatccctctggggcgacggttccggtccttgaagatgtggttcgtatttagaatgtatggcgtgaaggggctccaggcttatataagaaagcacgttcagctgtcacatgagttcgagagtctggttcggcaagatccacgctttgaaatctgtgttgaggtgatattgggcctggtgtgtttccgcctcaaaggctccaataaggtgaatgaggccctgctccagaggattaattctgccaaaaagattcacttggtaccatgtcatctgagagataagtttgtgctccggttcgcgatctgcagtaggaccgtcgaaagcgctcatgtacagcgcgcatgggagcatatcaaagagttagccgctgacgtgcttagagccgagcgcgaatag

SEQ ID NO: 221179 - DNA, 735 bp, synthetic construct
  misc_feature 1..735: note = Description of Artificial Sequence: Synthetic coding sequence
  source 1..735: mol_type = other DNA
atgcgggaggccgcttttatgtatagcacagctgttgctatttttctggtcatccttgtggccgcattgcaagggagtgcgccaagagagagtccgctcccctaccatataccccttgacccagagggcagcctcgagctgagttggaacgtaagttacacccaggaggccatccactttcagctgttagtgcggagactaaaggctggcgtgctattcggcatgtctgatcggggtgaactagaaaatgctgacttagtcgtgctgtggaccgacggagacacagcctactttgccgatgggaccgtccatctggtctacggcattctcgaagagccatttcggtctctggaagctatcaatggttcaggtcttcagatgggtctccaacgcgtgcagctgctgaagccaaatatacctgagcccgaactacccagcgacgcgtgtacaatggaggttcaggccccaaatattcagatcccgtcccaggagaccacttactggtgttacattaaagagctgccaaagggattctcccgacatcatattattaaatatgaaccgatcgtaacaaaggggaatgaagccctcgttcaccatatggaagtttttcaatgtgcccctgaaatggacagtgttccacacttcagtggaccatgtgacagcaagatgaaacctgaccggctgaattattgtagacatgtcctggccgcttgggctctcggggcaaaatag

SEQ ID NO: 221180 - DNA, 1854 bp, synthetic construct
  misc_feature 1..1854: note = Description of Artificial Sequence: Synthetic coding sequence
  source 1..1854: mol_type = other DNA
atgcccgcactatcccggtgggccagcctcccaggaccctctatgcgtgaggctgcatttatgtacagcacggcagtcgccattttcctggtgatcctagtggccgcactgcagggtagcgcaccacgcgaatcccccctgccttaccacatcccactcgaccccgaaggctcccttgagttgtcctggaatgtcagttatactcaggaggccattcacttccagctgttggtccgcagattgaaagccggagtgctcttcggtatgtcagaccgaggggagcttgaaaatgctgatcttgtggtgctatggactgacggagacaccgcatacttcgccgacgcctggtccgatcagaaggggcaaatccatctggacccccagcaggattatcagctgttacaggtccagcgcaccccggaaggcctgaccctgctttttaaaaggccttttgggacttgtgaccctaaggattaccttatcgaagatggaaccgtgcatttggtgtacggaatactcgaagaaccgtttcgttcacttgaggctatcaacggcagcggattgcagatggggttacagcgtgtgcaattattaaaacccaacatacctgagccagagttgccttcagatgcttgtactatggaggtgcaggcccctaatatccagatcccaagccaagaaaccacatattggtgctatatcaaggaactgcctaagggattctctcgccaccacattatcaagtatgaacctattgtgactaagggcaacgaagctctagttcatcatatggaagtattccagtgtgctcctgagatggacagtgtaccgcatttctcaggaccgtgcgactcgaagatgaagccagatcgtctcaattattgcaggcacgtcctggcagcttgggctctaggcgctaaggcgttttactatcctgaggaggccggtcttgcctttgggggacctggctcctctcggtatctgaggctggaagtgcactatcacaaccccctcgtcatcgagggtcgaaacgactcgtccggtatccggctgtattacactgctaagctgcgaaggttcaatgccggtatcatggaactgggtttagtctatacccctgtgatggctattcctccccgtgaaaccgcatttatcctgactggatattgcactgataagtgcacgcagcttgcgctgcccccatctggcattcatatcttcgcctcacagctgcacacacacctcactggccgaaaggtagtgaccgtactggtgcgagacgggagagagtgggagatcgtgaaccaggataatcactactcccctcacttccaagagattagaatgttaaaaaaagtggtttccgtgcacccaggggacgtcctgatcacatcctgcacctataacacggaagatcgcgagctcgctactgtgggtggattcgggatcctcgaggagatgtgcgtcaactatgtacactactacccccagacacagctcgagctatgcaaaagcgcagtggacgcgggatttctgcaaaagtatttccacttgattaatcgatttaacaatgaagatgtgtgtacatgtcctcaggcctctgtctcacaacagttcactagtgtgccctggaacagctttaacagggatgtgctcaaggctctgtatagctttgctccaatctccatgcactgcaacaagtcatcggcagtgcggttccaaggagagtggaacttgcagccactgccgaaggtgatctctacgcttgaagagccgaccccccagtgtcctacctctcaggggcgatcccccgctggccctacagtagtcagtatcggcggaggtaaggggtag

SEQ ID NO: 221181 - DNA, 1341 bp, synthetic construct
  misc_feature 1..1341: note = Description of Artificial Sequence: Synthetic coding sequence
  source 1..1341: mol_type = other DNA
atgcgaacattaaatacctccgccatggacggaacaggattagtggtggaacgtgattttagcgtgaggatcctcacagcctgttttttgagccttttaatactgtctactcttctgggaaatacactcgtgtgtgccgctgtaatcagatttaggcacctcaggagtaaggtaacaaactttttcgtaatttctctggcagtcagcgacctgctagtggccgtgctggttatgccatggaaagccgttgcagaaattgctggattttggccgtttggctcattctgtaatatttgggtcgcatttgacataatgtgtagtacggcaagcatcctgaatttgtgtgtgatctcagtcgaccgctactgggcaatctcttccccatttagatacgaaagaaaaatgacgcccaaagcagcctttattttgatttccgtagcgtggacactatccgtgctgatttctttcattcccgtacagctgtcctggcacaaagccaaacctaccagccctagcgacggaaatgcgaccagcctggcagagacaatcgataattgtgatagttcgctgtcacggacctacgctatatcatcctccgttattagcttctacataccagtggccatcatgattgtcacgtatacaaggatttaccgaatagcacaaaaacagattaggcggattgcggcattagagcgagccgctgtgcacgccaaaaactgtcagaccacgactggaaatgggaagcctgttgagtgttcccaacctgaatcctcttttaagatgtcctttaagcgcgagactaaggtgttaaagactctcagcgttatcatgggggtgttcgtttgttgttggctgcccttcttcattctgaattgcatcctccccttttgcggcagtggggaaacacagcccttttgtatagattctaacacctttgatgtgtttgtgtggtttggatgggcgaacagcagcttgaaccctattatatatgcctttaatgcagattttcgcaaagcattttcgactctgctgggttgttaccgactatgcccagctactaataacgctatcgaaaccgttagcatcaataataatggggcagctatgttttccagtcaccacgaacctcgcggatcgatttcaaaggaatgtaatctggtgtacctgatacctcacgccgtgggtagctccgaagacctgaaaaaggaagaggctgccggtatcgcacgacctctcgaaaagctttctccagcactaagcgtgatccttgactacgataccgatgtatcgctggagaagatacaacctatcactcagaatgggcagcatcctacgtag

SEQ ID NO: 221182 - DNA, 1341 bp, synthetic construct
  misc_feature 1..1341: note = Description of Artificial Sequence: Synthetic coding sequence
  source 1..1341: mol_type = other DNA
atgcgcaccttgaatacttctgcaatggacggaactggcctggtcgtggaacgcgactttagcgtgcgtattctgacagcttgcttcctgtctctgctgatactgtctacacttctgggaaacactcttgtctgcgccgctgtgattcggttccggcacctgagaagcaaggtgactaacttcttcgtgataagtcttgctgtgtctgatttactggtggctgtcctggtgatgccctggaaggctgtagcagaaattgccggattctggccattcggctctttctgcaacatctgggtggctttcgacatcatgtgcagcaccgccagtatcctcaacctatgcgtgatcagtgtagacagatattgggcgatttcttccccatttcgatacgaacgcaaaatgaccccaaaggctgcattcattctaattagcgtggcctggacattgtcagtactgattagtttcatcccagtgcaacttagttggcacaaggctaagcctacctctccaagcgatggaaatgctactagcctcgcggagaccatcgataactgcgatagcagcctgagtaggacctatgcgatctcttcatccgtgatcagcttctatatcccggtcgcaattatgattgttacctacacccggatttaccggatcgctcagaagcaaatccgcagaatcgcagctttggagagagctgctgtgcacgctaagaactgtcagactaccactgggaacggcaagcctgttgaatgctctcagcccgagtcatctttcaaaatgtccttcaagagggagaccaaggtccttaaaacattaagcgtcattatgggcgtgtttgtctgctgctggcttcctttcttcatactgaattgcatcctgcccttctgtgggagtggcgaaactcaaccgttttgcatcgactccaacacctttgacgtgttcgtatggttcggttgggccaacagttctctcaacccgatcatttacgcgttcaatgccgacttcaggaaagcttttagcaccctcttaggatgctaccgactctgcccggctaccaataacgctattgaaaccgtgtcaataaataataacggcgcagcgatgtttagctcccaccacgagcctagggggagcatcagcaaagagtgcaacctggtctatctcatcccccatgcagttgggagtagtgaagacctgaaaaaggaagaagccgcaggaattgctaggcctctggagaagttgagcccggcactgagtgtgattctggactacgacaccgatgtgagccttgaaaaaattcagcctatcacacagaacggacaacatcctacgtag

SEQ ID NO: 221183 - DNA, 1245 bp, synthetic construct
  misc_feature 1..1245: note = Description of Artificial Sequence: Synthetic coding sequence
  source 1..1245: mol_type = other DNA
atggaccctttgaatttgtcttggtatgacgatgatcttgagaggcaaaattggtccaggccatttaacgggtccgacggcaaagccgataggccgcactataattactacgccacactcctcacacttttaatcgcggttatcgttttcggcaatgttttagtgtgcatggcggtcagtcgggagaaagcactgcagaccaccactaattacctgatcgtgtccctggcggtggcggacctgctcgtggcaactctggtgatgccctgggtcgtctacctggaggtagtgggagaatggaagttctcaaggattcactgcgatatctttgtaaccttggatgtaatgatgtgtacagcatcaattttgaatctctgtgcaataagcatcgataggtacacagcagtcgcaatgcctatgctttacaacactcgctatagttccaaacggcgagtcacagtgatgatctctattgtctgggttttgtcttttactattagttgtcccttactgttcgggctaaacaatgccgatcagaacgaatgcatcattgccaatcctgcctttgtggtgtatagttccattgtaagcttctatgttccattcatcgtgaccctgctggtctatataaaaatttatatcgtgctaaggagaagaagaaagcgtgtgaacactaaacggtcctctagagcattccgtgcgcacctccgggcacctctaaaagaggctgctagaagggcccaggagcttgaaatggagatgctatcctctacctcaccgcctgaaagaaccaggtactcccctatacctccctcccatcaccagctcacactgccggacccctcccatcatggcctccactccaccccggatagtcccgctaaacccgagaagaacgggcacgccaaggaccaccccaagatcgccaaaatctttgaaattcagaccatgcctaacggcaaaacaaggacaagcttaaaaacaatgtcccgtcgtaagcttagccagcagaaagagaagaaggccacacaaatgcttgccatcgtcctgggcgtgtttatcatctgctggctgcccttttttattacgcacatactgaatatccactgtgactgcaatatacccccagtcctgtattccgctttcacctggctgggctacgtgaattctgcggtgaatccaatcatctacacgacgttcaatatcgagttccgcaaggccttcctaaagatcttacactgctag

SEQ ID NO: 221184 - DNA, 1338 bp, synthetic construct
  misc_feature 1..1338: note = Description of Artificial Sequence: Synthetic coding sequence
  source 1..1338: mol_type = other DNA
atggaccccctgaacctcagttggtatgacgacgatctggagcggcagaactggtccaggccatttaacggatccgatggtaaagccgatcgaccccattataattactatgccactctattgactctcctgatcgccgtcatcgtctttggaaacgtgctggtttgtatggctgtgtcacgcgagaaggccctgcaaacaacaactaattatcttatcgtgagtctggcagtagccgacctgctagtggccactctggtaatgccttgggtggtttatctggaagttgtgggcgaatggaagttctcccgcattcactgcgatatttttgtgacactggatgtaatgatgtgtactgcctctatcctgaatctgtgcgctatcagtatcgacagatatacagcagtggcaatgccaatgctgtataatacacgttattcttcaaagaggcgagtgactgtgatgatctcaatcgtttgggtgctgtcttttacgatctcgtgtccactcttgtttgggctcaacaatgctgatcaaaacgagtgcataattgctaatcccgcattcgtcgtgtacagcagcatcgtcagcttttatgtgccctttatcgtgacactgctggtctacataaaaatctatatagtattgagacgcaggagaaagagggtgaatacaaaacgtagcagtcgggcattcagagcacatttgcgtgctccactaaagggtaactgcacacaccccgaggacatgaagctttgtaccgtcattatgaaatctaacggttcgttccccgtgaatcgacgccgagtcgtacaggaggcagcgaggcgggctcaggagctagagatggaaatgctgtcctcgacctccccccctgaacgcaccagatactctcccattccgcctagccaccatcaactgaccctcccagacccctcccatcatggcttacatagcacccctgattctcccgcaaagcccgaaaagaatggacatgcgaaggatcaccccaaaatagccaagattttcgagattcaaacaatgccgaatggaaaaacgaggactagtctgaaaacaatgagtcggaggaagctgtcacagcaaaaggaaaagaaagctacccagatgcttgccattgtcttgggtgtgttcatcatctgctggcttcccttctttatcacacacatccttaatattcactgtgactgcaatattccaccggtgttgtactcagcctttacgtggctgggttatgtaaactccgccgtcaatccaattatctacacgacctttaacatcgagtttcgtaaagcctttttgaagattctccattgttag

SEQ ID NO: 221185 - DNA, 1332 bp, synthetic construct
  misc_feature 1..1332: note = Description of Artificial Sequence: Synthetic coding sequence
  source 1..1332: mol_type = other DNA
atggaccctctcaatttgtcatggtatgacgatgacctggagcgccagaattggagtcgaccattcaacgggtcggacggaaaggctgataggcctcattacaactactatgccaccctgctgacactcctgatcgccgtcatcgtcttcgggaatgtcctagtttgtatggccgtcagtcgggagaaggctcttcaaaccacaaccaattatctgatcgtctcactggctgtagccgacctgcttgtggcgaccttggtaatgccctgggtggtgtaccttgaagtggttggcgagtggaaattttccaggattcactgcgacatcttcgtcaccttggatgtgatgatgtgtactgcttccattctaaacctctgcgccattagcattgacagatatactgccgtggccatgcctatgttgtataatactcgctatagcagcaagagaagggtcacagtgatgatatccatcgtctgggtgttaagtttcacaatctcctgcccacttttgttcgggctcaataatgcagatcagaacgaatgtatcatcgctaaccccgcattcgtcgtgtattcttccatcgtttctttctatgtgccgttcattgtgactctgctggtgtatattaaaatctacatcgtgttacgcaggcggagaaagcgggtgaataccaaaagatcaagccgggcattccgggctcacctgcgggcaccattgaagggcaactgcacccatcctgaggatatgaaactgtgcacggtcataatgaaatccaacggctcgtttcccgttaacagacgcagagttgaggccgcacggagggcacaagagttggagatggagatgctgtcatcaaccagtcccccagagcgcacgaggtactcgccaatcccaccctctcaccaccagctgactctgccagaccccagtcatcacggcctgcatagtacccccgattccccagccaaaccggaaaagaacggtcacgctaaggatcaccccaaaatagcaaagatattcgaaatccagaccatgcctaacggcaagacaagaaccagcctgaagacaatgtctcgcagaaagctgagccagcagaaagaaaaaaaagccacgcaaatgctcgctatcgtcttgggggtattcattatttgctggctccctttctttattacacacattctgaacattcactgtgattgcaacatccccccagtcctgtactccgcatttacatggctcggctatgtgaattcggccgtgaatcccattatctacacaacctttaatatcgaattcaggaaggcctttttgaaaatcttacactgttag

SEQ ID NO: 221186 - DNA, 1338 bp, synthetic construct
  misc_feature 1..1338: note = Description of Artificial Sequence: Synthetic coding sequence
  source 1..1338: mol_type = other DNA
atggaccccctcaatctttcttggtacgatgatgatctagaaaggcaaaactggtcccgcccatttaacggatccgatgggaaagccgataggcctcattacaattattacgccacgttgctgacattgctgattgccgttattgtcttcgggaacgtgttggtgtgtatggctgtgtcgcgggagaaagccctccagaccactacaaactacctgatcgtgtcactggctgtcgctgatcttctggtcgccacgttagtgatgccttgggtggtctaccttgaagtcgtgggcgaatggaaatttagccgcatccactgcgatatttttgtaactcttgatgtgatgatgtgcacggcttctatcctgaacctttgtgccatttccatcgaccggtataccgcagtggctatgcctatgctgtacaatactcgatattccagtaagaggcgcgtgacagtgatgatctccatcgtgtgggtactgtcttttaccatatcctgcccactgcttttcgggctgaataatgcagaccaaaacgagtgcattatcgctaaccctgcatttgtggtgtactccagcattgtgtcgttctacgttccttttattgtcaccctgctggtatacattaaaatctatattgtccttcgacgtcgcagaaagcgggtcaacacgaagcgctcgagccgtgcgttccgcgcacatttgcgcgctccccttaaagggaactgtacacaccctgaagacatgaagctctgcaccgttattatgaagtccaatggcagcttccccgtgaaccgcaggcgagtggtgcaggaagcagcaagaagagctcaggagcttgagatggaaatgttgtcttctactagtcccccagagcggacacgctacagtcccatccccccttcccaccaccagcttactttacccgacccatcccaccatggcctgcattccactcccgatagtccggctaaacccgaaaagaacggccatgccaaggatcatcccaagatcgcgaagatcttcgagattcagaccatgccaaatggtaagacaaggactagtctaaaaactatgtccaggcgcaagctctctcaacagaaggaaaagaaggccacccagatgctggccatcgtgctcggggtatttataatatgctggctgcccttttttatcacacatatcttgaatattcattgcgactgtaacatcccaccagttctctattctgcattcacctggttagggtatgtgaacagcgctgttaaccccatcatctatactacctttaacatcgagttcagaaaagctttcttgaagatattgcactgctag

SEQ ID NO: 221187 - DNA, 24 bp, synthetic construct
  misc_feature 1..24: note = Description of Artificial Sequence: Synthetic coding sequence
  source 1..24: mol_type = other DNA
atggaccctctcaatctctcctag

SEQ ID NO: 221188 - DNA, 1332 bp, synthetic construct
  misc_feature 1..1332: note = Description of Artificial Sequence: Synthetic coding sequence
  source 1..1332: mol_type = other DNA
atggacccacttaatctgtcttggtatgacgatgacctggagaggcagaactggtccagaccttttaatggcagtgacgggaaggcagatcgaccgcactacaattattatgccaccctgctgaccctgctgatcgcggtcatcgtgttcgggaacgtgctggtttgtatggccgtaagtagggagaaagccctgcagaccacaacgaactatctcatcgtgtcattggccgtggcagacctgctggtagccactttggtgatgccatgggtggtgtacctcgaggtcgttggtgagtggaagtttagtaggatacactgtgatatctttgtcaccctcgacgtaatgatgtgcaccgcgtccattctaaatttgtgtgcgatttcgattgatcggtataccgcagtggcaatgcccatgctgtacaacacacggtactcctcaaaacgcagagtcactgtgatgatttcaatagtgtgggtgctgagttttacaatcagctgcccactactgttcggtttgaacaatgcggaccaaaatgaatgcatcatagctaatcccgctttcgtggtttattcctctatcgtgagcttttatgtcccttttatagtcacgcttttggtttatatcaagatttacattgttctgcgacgtcgccgtaagcgggtgaatacaaaacggtcttctagagcatttcgggcacatcttcgggcaccccttaaagggaattgcactcacccagaggatatgaaactgtgtaccgtgatcatgaagtcaaacggttcatttcccgtaaaccgcagacgtgtagaggctgccaggcgcgcacaagaactggagatggagatgctatcctccacttctcccccagaaaggacccggtactctccaattcctccctcacaccaccagcttaccttacctgatccctcacaccacggcttacactccacacctgatagtccggctaaaccggaaaagaacgggcacgccaaggatcaccctaaaatcgccaagatattcgagattcagactatgcccaatggaaaaactcgcaccagcctcaaaacaatgagcaggcggaagctgtcccagcaaaaggaaaagaaagccacgcagatgctcgccatcgtgctcggggtctttatcatctgttggcttcccttcttcattacacacatactgaacatccactgcgactgtaacattccccctgttctgtattcagcattcacctggcttggttacgtgaatagcgctgttaaccccatcatctacactacgttcaacatcgaatttcgcaaagccttcctcaaaatcctgcattgttag

SEQ ID NO: 221189 - DNA, 534 bp, synthetic construct
  misc_feature 1..534: note = Description of Artificial Sequence: Synthetic coding sequence
  source 1..534: mol_type = other DNA
atggacccgttgaacctgagctggtacgacgacgacttggaaaggcaaaactggtcccggccatttaacggtagcgacggcaaggccgatcggccacactataattactatgccaccctgctcacactgctgattgcagtgattgtcttcgggaacgtgttggtgtgtatggcggtgagtcgagagaaagccttgcagacaaccaccaactacctgattgtgagcctcgcagtggcagatctccttgttgctactctggtgatgccatgggtcgtgtaccttgaggtcgtgggtgaatggaaatttagcagaatacactgcgatattttcgtaactttggatgtcatgatgtgtactgcttccatcctaaacctatgcgccatttcgattgacagatataccgctgttgcaatgcctatgttatacaacacccgttactcctcaaaaagacgcgtgacagtgatgatttcaattgtctgggtgctttcattcacaatctcttgccctctcctatttggactgaacaacgcctag

SEQ ID NO: 221190 - DNA, 1329 bp, synthetic construct
  misc_feature 1..1329: note = Description of Artificial Sequence: Synthetic coding sequence
  source 1..1329: mol_type = other DNA
atggacccactcaacttgagttggtacgatgacgatttagagaggcagaactggtctcggccttttaacggctctgatggaaaggccgatcgaccccactacaattactatgccactctacttaccctcctgattgctgtaatcgtgttcgggaacgttctggtatgtatggcagtttccagggagaaagcactgcagaccacaaccaactacctgatcgtgtctctggccgtggccgatctgttagtggctactttagtgatgccatgggtggtgtacctggaggtgggagagtggaagttttctaggatccattgcgacatctttgttactcttgatgtaatgatgtgtaccgcgtccatactgaacctctgcgccatctctattgacagatataccgccgtggccatgccaatgctgtataacacacgatacagctcgaaacgacgggttactgtgatgataagcatcgtgtgggtgctgagctttaccatttcctgcccactgcttttcggactgaataatgcagatcagaacgaatgcataatcgctaacccagcattcgtcgtttacagcagcattgtgtcgttctatgtgccattcattgttactctcctggtgtacattaagatctatatcgttctgagaagacggaggaagagagtgaacaccaaacggtcctcacgcgcttttcgcgcacacctaagggccccactgaaaggcaattgcacacatccagaggacatgaagctttgtaccgtcattatgaaatcaaacgggtcattcccagtaaaccgacgcagagtggaggccgctcgtagagctcaggagttggaaatggaaatgctctccagtacatccccccctgagcgcacacgatacagccctattcccccttcacaccaccagctgactctccctgacccaagccaccatggtttgcacagtacacctgatagtccagccaagcctgagaagaatggacacgccaaagatcacccaaagatcgctaaaatctttgagattcagacaatgccaaatggaaaaacaagaaccagcttaaagactatgtccaggagaaaactgtcccaacaaaaggagaagaaggcgactcagatgctggccatagtcctgggcgtcttcataatttgctggcttcctttcttcatcacacatatcttaaacattcactgcgattgtaacattcctcccgtgctgtatagtgccttcacctggttgggatatgtaaacagcgctgttaatcccattatttacaccaccttcaatatcgaatttcggaaggcattcctcaagattctgcattgctag

SEQ ID NO: 221191 - DNA, 1029 bp, synthetic construct
  misc_feature 1..1029: note = Description of Artificial Sequence: Synthetic coding sequence
  source 1..1029: mol_type = other DNA
atggcctccctgtcgcagctatcagggcacctaaactatacatgtggcgcagagaactcaaccggtgcttcacaggctaggccccacgcttactacgccctgtcctactgtgccctgatcctggcaatcgtttttgggaatggccttgtgtgcatggcagtcctgaaagagagggcacttcagaccactacgaactatctggtagtgagtttggccgttgccgacctgcttgtggccacactggttatgccctgggtggtgtatctagaggtgaccggcggagtttggaatttttcgagaatttgctgcgatgtctttgtgactctggacgtgatgatgtgtaccgcttcaatcttgaacctttgtgctataagtatcgaccgatacaccgcggttgtaatgcccgtgcactaccagcacggcaccgggcaaagcagttgtcgcagagtggccttgatgataactgcagtatgggtgttggccttcgccgtctcatgcccacttctgtttggcttcaacacaacaggcgatcccaccgtctgcagcatcagcaacccagacttcgtgatctatagtagtgtagttagcttttacctaccgttcggagtaactgtgctggtatacgccagaatatacgtggtgctcaaacaacggaggagaaaacgtatccttaccaggcagaattctcagtgtaactccgtgcggcctggctttccccagcaaacactcagtcctgaccctgctcatctcgagctcaaaaggtactactccatttgccaggataccgccctgggaggcccaggctttcaggagcgcggtggtgagcttaaacgcgaagaaaaaactagaaattccctgtcagctaccagtggcgaggaaggaaatcctaatggaggccattgcgcttggggattgcactgcctcctggctgcattactgttggatccatgtagccagtatccccttccagatatgcccagggtgccccgagccctccagtgtcacgacatggccggactgagggaatag

SEQ ID NO: 221192 - DNA, 1104 bp, synthetic construct
  misc_feature 1..1104: note = Description of Artificial Sequence: Synthetic coding sequence
  source 1..1104: mol_type = other DNA
atggcttcactgtcccagctgtcggggcatctgaactatacttgtggcgcagagaactccaccggagcatcccaggctcgaccccatgcatattatgcattatcctattgcgcactgatccttgccatcgtgttcgggaatggtttagtgtgcatggcagtccttaaagagcgagcattacagaccaccacaaactacctggtagtgtcgttggcggtggcagaccttctagtggctacattagtgatgccctgggttgtatacttagaagtgaccggaggtgtatggaatttcagccgcatttgttgtgacgtgtttgtgactcttgacgttatgatgtgtactgcaagcatcctcaatctctgcgctatatccatcgacaggtatacagcagtcgtcatgcccgtccattaccaacatggaaccgggcagtccagttgccgacgagtcgccttaatgatcaccgccgtatgggttctggcctttgccgtatcttgcccactcttgtttggattcaacaccaccggggatcctaccgtctgctctataagtaatccagatttcgtgatctattcttctgtagtgtcattctatttgccttttggtgtcactgtgcttgtttacgctcgtatctacgtggtccttaaacagagaagacggaaacgcatcctcacacgacagaatagccaatgcaatagcgtacggcctggattcccccagcagacactgtctccagacccagctcatctggagctaaaacggtattatagcatttgtcaggacacagccttaggtggacctggcttccaggagagggggggagagttaaagcgggaggaaaagacccgaaatagcctcatgcctcttcgggagaaaaaggcaacgcagatggtggcaattgtcttaggcgcattcatagtctgctggctcccattcttccttacgcatgtgttgaacacgcactgccagacctgccatgtttctcccgaattatatagcgccacgacttggctgggatatgttaactccgccctgaacccagttatatatacaacattcaacatcgagttccgtaaggcatttcttaaaatacttagctgttag

SEQ ID NO: 221193 - DNA, 1203 bp, synthetic construct
  misc_feature 1..1203: note = Description of Artificial Sequence: Synthetic coding sequence
  source 1..1203: mol_type = other DNA
atggcctcgttatctcagctgtccggccacctgaattacacctgtggagccgaaaattccaccggagcctcccaggccagaccacatgcatattatgcgctttcttattgcgcgctaattctagcgatcgttttcggtaacgggctcgtttgtatggccgtcctaaaggaaagagcactccaaacgacgaccaattacctggttgtgtctctcgcagtcgccgatctgctggttgctacacttgtgatgccgtgggtcgtgtacctggaggttactggaggagtatggaacttctcacgtatctgctgtgatgtcttcgttacattggacgttatgatgtgcaccgcttcaattcttaacctctgtgccatttcaatcgaccggtacacagctgtggtgatgccggtgcactaccaacatggaactgggcaaagcagttgcagacgcgtggcgctgatgattactgccgtctgggtgctggccttcgctgtgtcgtgccccttgctctttggttttaatacaaccggcgatccaactgtttgctctattagcaacccagattttgtgatctattcgtccgtggtgtctttctatctgccttttggggtaaccgtgctggtttatgctagaatttacgtggtgcttaaacaacgacgccgtaagagaattctgactaggcagaatagccagtgtaatagtgtacggccaggatttccgcaacaaaccttgtcacctgaccctgctcatctcgagctgaagcgctattactccatctgccaggatactgcactcggcggtcccggattccaggagcgcggaggcgagctcaaacgcgaagagaaaacaaggaatagtctctctccaaccattgccccaaaattatcactagaggttcggaaactgtccaatggccgactcagtacgtctctgaagctgggccctctgcagccccgtggagtcccactgcgcgagaaaaaggccacacaaatggtggctatcgtgcttggagccttcattgtctgttggctgcccttttttctgacccatgtgttgaatacacattgtcagacctgccacgtcagcccagaattgtacagtgcaacgacttggctgggttatgtgaactccgctctcaaccctgttatttacacgacctttaatattgaattcagaaaagcattcctgaaaattttatcgtgttag

SEQ ID NO: 221194 - DNA, 1203 bp, synthetic construct
  misc_feature 1..1203: note = Description of Artificial Sequence: Synthetic coding sequence
  source 1..1203: mol_type = other DNA
atggcgtccctcagccagctgagcggacacctcaattatacctgtggggctgagaatagtacaggcgcatctcaggcgaggccccacgcctactacgccctgtcgtattgtgccctgatcctagctatcgtctttgggaatggtctggtgtgcatggccgttctgaaagagagagcccttcagaccacgaccaactacctggtggtgagtctggccgtggcggacctgcttgtggcaactttggtgatgccctgggtcgtttatttggaggtcactggaggtgtatggaatttctcccgaatttgctgtgacgtcttcgtgacattggacgtgatgatgtgtaccgctagcatcctgaatctttgtgccatttcaatcgatcgatacacagccgtagtgatgcctgtgcattaccagcatggcaccgggcaaagcagctgccggagagtagcattgatgataactgccgtgtgggtgctggcctttgcagtatcctgccctctgctcttcgggtttaatacaacaggagaccctactgtgtgtagtattagtaacccggacttcgtcatctactcgtccgtcgtgagcttctacctgcctttcggcgtcaccgtactcgtgtatgctcgtatttacgtggtgttaaagcagagaaggagaaagaggatcctcacccggcagaatagtcagtgtaacagcgtaaggcctggctttcctcagcaaaccctgtctccggatcctgcgcacctggagctgaaaagatactacagcatctgtcaggacaccgcactggggggacccggattccaggagcgcggaggcgaactgaagagggaggaaaagaccagaaacagcctctctcccactatcgcgcctaaactgtccctcgaggtcaggaagcttagtaatggcagactgtcaaccagcctgaagttgggaccgctccagccacggggagtgcctctgagggagaagaaggctacccagatggtagccatcgtgctgggagctttcatagtgtgctggctgcccttcttccttacacacgtcctgaacacccactgccagacatgtcacgtcagccctgagctttacagtgccacaacctggttagggtatgtgaattccgccctgaatccagtgatctatacaacgttcaatatagaatttaggaaggctttcttaaagatcctgtcctgctag

SEQ ID NO: 221195 - DNA, 1203 bp, synthetic construct
  misc_feature 1..1203: note = Description of Artificial Sequence: Synthetic coding sequence
  source 1..1203: mol_type = other DNA
atggccagtctcagccagctgtcagggcacctgaactacacttgcggtgctgaaaactctacaggagcgagccaggccaggccccatgcttattatgctctgtcttattgcgctctcatcttggccatagtttttgggaacggacttgtgtgcatggctgttctaaaagagagggctctgcagactacgacaaattatctcgtggtttcccttgccgtcgctgacctgctcgtggcaactctggtcatgccttgggttgtatatttggaagttaccggcggtgtctggaatttttctcggatctgttgtgatgtgtttgtgactctggatgtaatgatgtgcacggcctctatcctgaatctgtgcgccataagtattgatcgatacacagccgttgtcatgcctgtgcactatcagcatggaacgggacagtcctcttgtcggagggtggctctgatgatcacagctgtgtgggtactggctttcgcagtaagttgtccgctactgttcggcttcaacactaccggcgaccccacagtgtgctctatatccaatccagattttgtgatctattcctctgtggtgtctttctacttaccattcggcgttacagtgcttgtgtacgcacgtatctacgtcgtgctgaaacagcgcagaagaaagagaattctgactaggcagaactcacagtgcaattctgttcgaccgggtttcccacagcaaaccttatctccggaccctgcgcacctcgaactcaagcggtactattcgatatgtcaagacactgccctgggaggaccgggattccaagaacgcggtggcgagctaaagagagaggagaagactaggaattccctgagccctaccattgctccgaaactgtccctggaggttcgaaagctgtccaacgggaggctgtcaacttcactaaaactggggcctctccagccacgcggagtgccactccgagaaaagaaggcaactcagatggtggcaatcgttttaggagcttttatcgtttgttggctaccgttttttctgactcacgtactcaatacccattgccagacctgccacgtttcccctgaactgtattccgctacaacatggctgggctacgtgaactcagctcttaaccccgtgatttacaccaccttcaacatcgaattccggaaggcctttcttaagatactgagctgttag

SEQ ID NO: 221196 - DNA, 1260 bp, synthetic construct
  misc_feature 1..1260: note = Description of Artificial Sequence: Synthetic coding sequence
  source 1..1260: mol_type = other DNA
atgggaaatcgctctaccgcagacgcagatggactgctggcgggacgcggtccagccgctggcgctagcgccggagccagtgcaggacttgcaggccaaggggcagctgctttggtgggcggtgtgttgcttatcggtgccgtgctggctggaaattcgttggtctgcgtgtctgtagcgacagagcgagccctgcagactcctacaaactcttttattgtttctctagcagcggcagatttactcttggccctactggttttgcctctgttcgtgtacagtgaggtacaggggggagcatggctgctgtcacccaggctctgcgatgccctgatggccatggacgtaatgctttgtacagcatcaatcttcaatctgtgcgccattagtgtggaccggtttgtggctgttgccgtgcccttgaggtacaacaggcaggggggttcgcgtagacagcttctgctgataggggcaacttggctgctcagtgccgctgtggccgcacctgtcctgtgtggacttaacgacgtcagaggtagagaccccgctgtttgtcggttggaagatagagattacgttgtttactctagcgtctgtagcttcttcctaccatgcccccttatgctgctgctgtactgggccacctttcggggtcttcagaggtgggaagttgccagaagggcaaaattgcatggcagagctccaaggagaccctcaggcccagggcctccatccccaacaccgcctgccccaagattacctcaggacccctgcggacctgactgtgctccacctgcgccaggactgcccaggggcccttgtggtccagattgcgcccctgccgctcccagtctgcctcaggacccctgcgggcctgactgtgcccctcccgctcctgggttgccccctgacccttgtggcagcaattgcgcaccgcctgacgccgtgagggccgcagccttgccccctcaaacgccccctcagacgagacggagacgtcgtgcaaagataaccggcagagagcggaaggctatgcgggtcctgcctgtggtcgtgggtgcattcctgctgtgttggaccccgttcttcgtcgtgcatatcactcaagccctctgtcctgcctgctctgtgcccccacgtctggtctccgccgtcacctggctgggctacgtcaattctgccctgaaccctgttatctacaccgtctttaatgcagagttcagaaacgtcttccgaaaggccctgcgggcatgttgctag

SEQ ID NO: 221197 - DNA, 1434 bp, synthetic construct
  misc_feature 1..1434: note = Description of Artificial Sequence: Synthetic coding sequence
  source 1..1434: mol_type = other DNA
atgctgccccctggatcaaatggaactgcatatcccggacaattcgccctgtatcaacagttggcccaaggaaacgctgtcggtggcagcgccggagcgcctcccttgggaccttcacaagtggtgaccgcgtgtctgctgaccctcttgatcatttggactctgctcgggaatgtactggtgtgcgccgctatagtcaggtcccgtcacctgcgggctaacatgacaaatgtttttattgtgtctctcgctgtatccgacctgtttgtagcccttttagtcatgccttggaaggcggtagccgaagtcgccggatattggccttttggtgccttttgtgacgtttgggtcgccttcgacatcatgtgctccacagcttccatcttgaatctgtgtgtcattagcgtagaccgatattgggctatctcgcgaccgttccgctacaagcgtaagatgactcagcggatggccctggtgatggtgggtctagcatggacacttagcattctgatctcctttattcctgtgcaactcaattggcatcgtgaccaggccgcttcttggggcggattggatctcccaaacaaccttgccaactggaccccttgggaggaggatttttgggaaccggacgtgaatgctgaaaattgtgattcaagtttaaatcgcacatatgccataagttcttcgctgatttccttttacatccctgtagctataatgattgtcacctacactcgtatctatcgaatcgcacaggtgcagattcgacgtatatcctcactggagagggccgctgaacacgcccagtcttgccgctcaagtgctgcatgtgctccagacacgagcctaagggcaagcatcaaaaaagagaccaaagttctcaaaacactgtctgtgatcatgggtgtttttgtatgttgttggctgcctttctttattcttaattgtatggtgcccttctgcagtggccaccccgaggggcctcctgcgggattcccctgcgtctccgagacaacctttgatgtatttgtgtggttcggctgggcgaactcctctttgaaccctgttatttatgcattcaacgctgattttcagaaggtattcgctcaattacttggttgctctcacttctgttctagaacgccagtcgagaccgtcaacattagcaatgagctgatttcctataaccaagatatcgtgttccataaggagatcgctgcagcttatatccatatgatgcctaacgctgttactccgggtaatcgtgaagtcgataacgacgaggaggaagggccatttgaccggatgtttcagatctaccagacctcaccagatggggatcctgtcgcagagagcgtgtgggagttggactgtgaaggggagatctcactggataagattacaccctttacacccaatggcttccactag

SEQ ID NO: 221198 - DNA, 438 bp, synthetic construct
  misc_feature 1..438: note = Description of Artificial Sequence: Synthetic coding sequence
  source 1..438: mol_type = other DNA
atggaccctgaagaacaggagctactcaacgattaccgctatagatcgtactcaagcgtcatcgagaaagcactcagaaattttgagtccagctctgagtgggcagatctcatcagtagcctgggaaagctcaacaaggccctccagtcaaacctgcgctattccttactgcccagacggttgttgatctccaagcgactcgctcagtgcctacatcccgctctcccaagtggggtccaccttaaagcactggaaacgtacgagatcattttcaagatagtggggacaaagtggctggcaaaggacctgtttttgtattcctgcgggctctttccgttattagcccacgctgccgtgtccgtgcgccctgtcttgcttactctgtatgagaagtactttctgccactgcaaaagttgttactgccctccctccagtag

SEQ ID NO: 221199 - DNA, 6896 bp, synthetic construct
  misc_feature 1..6896: note = Description of Artificial Sequence: Synthetic coding sequence
  source 1..6896: mol_type = other DNA
atggacccagaagagcaggagctgctgaacgactacaggtataggagctactcctccgtaattgaaaaagctcttcgaaacttcgagtcctcttccgagtgggccgatctcatcagcagtttgggaaaactgaacaaggccctgcagtctaatttaagatactcgttattaccccgacgactgctcattagcaagcggctggctcagtgtctccacccagctctcccatccggcgttcacctcaaggcacttgagacatatgagatcatttttaagatcgtgggcacgaagtggctggcgaaagacttatttctctacagctgtgggctgtttcctctactggcacacgcggcagtaagcgtccgtcccgtgctgctgactctttacgagaagtattttctgccattgcagaaattgctgctaccatccctccaggcgtttatcgtggggcttctgcccggtctcgaagagggctctgaaataagcgatcgcacggacgccctcctccttaggctgagcctggtagtcggcaaggaagtcttctacacagctctgtggggtagtgttctggccagccctagtattaggctgcccgctagcgtgttcgtagttggtcacattaaccgcgatgcccctgggagagaacaaaagtacatgctgggaacaaaccaccagcttaccgttaaatctctccgggcttcgcttctggacagcaacgtcttagtccaaaggaataacctggaaatcgtgcttttcttttttccattctatacttgcctcgacagcaacgaacgcgcaattccactgctgcgttcagatatcgttcggatcttgagtgcagccacacagaccttgctccggagggacatgtcactgaataggaggctttacgcatggctgctgggcagtgatattaaaggcaacactgtggttccggagtccgagatttcgaatagctacgaggatcaaagctcctacttttttgaaaaatactcaaaggacctgctagtggaagggctcgcagagatcttgcatcaaaagttcattgacgcggacgtggaggagcggcaccacgcgtacctcaagccattccgggtcctaattagtctgctcgacaagccagagatcggtccccaggtggtaggcaatctgttccttgaagtgatcagggccttttacagctattgtagggatgcattaggctccgatctgaagctgagttatacacagtcgggtaatagcctcatctccgcaataaaagagaatcgtaatgcctcggagatcgtgaaaaccgtgaaccttctaatcacttcattgagtacagactttctgtgggactacatgacgcgctgcttcgaagaatgcttccgccctgtcaaacagcggtattccgttcgcaattccgtttccccaccgcctactgtcagtgagctctgcgctctgttggtgttcctgctcgatgtaatcccactggaactctacagtgaggtgcagactcagtatttgccccaggtgctaggctgcctggtgcagccactcgctgaagatatggaagcacttagcctgcctgagcttactcacgcactaaaaacctgctttaaggttctgtcaaaggtgcagatgccaccatcctacttagacaccgagtccacttcagggacgtcctcccccgtgaaaggggaaaacggtaaaatcattctggaaactaaagcagtcatcccaggtgacgaggacgccagtttccctcccctgaaaagtgaagacagtgggatcggactctctgcctcaagccctgagctttccgagcacctgcgggtacccagggtatccctggaaagggatgatgtttggaaaaaaggtgggtccatgcagcggacattcctctgcattcaggagttaatcgcaaacttcgcctccaagaatattttcggggtccagctgacggcttccggtgaagaatcaaagagtgaagagcccgctgggaagcgtgacagggatggcacccagagtctagccgcaaacgattcatcaaggaaaaactcctgggagcccaaaccaattaccgtccctcagttcaaacagatgctgtcagatctcttcaccgctcgaggctctcctttcaagactaagtcctcagagtctccctctagctccccatcgtcccccgctagaaaaaatggcggagaatgggacgtcgagaaagtggttatcgacctgggcggttcacgcgaggagcggagggaagctttcgctgccgcttgccacctcttactcgattgtgctaccttccctgtttatctttctgaagaggagacggaacagctgtgcgcgacactgttccagctcccaggcgctggagatagttcattcccaagctggctcaagtcactgatgactatttgctgttgcgtcactgactgttacctccaaaacgtcgccatcagtacacttttagaggtgatcaaccattcccagagtctcgcactggtaatagaggataagatgaagcggtataagtctagcggacacaaccccttctttgggaaattacaaatggtgacggtacccccaatcgccccaggtattctgaaagtgatcgctgaaaaaaccgacttctaccagcgggtggcaagggtgctctggaaccaattaaataaggaaacccgcgaacaccatgtgacctgtgtggagctgttttaccggctgcactgtttggcacctacggctaatatttgtgaggacatcatttgccacgcgctcttggatcctgacaaaggaacaaggctggaggccctctttcggttctccgttatttggcaccttactcgcgaaatacaaggttcaagggtaaccagccataatcgatccttcgatcgctccctgtttgtggtgctggattcgctggcgtgtaccgatggtgccataggcgctgccgctcagggctggctggttcgagccctgagtttgggggatgtggctcgcatcctggaaccagtgctcctgctccttctccagccgaagacccagcgcaccagcatccattgtttgaagcaagaaaacagtgcggacgatcttcatcgctggttcaatagaaaaaagaccagtttccgggaagcttgtgcagtgccagagcctcaggagtcgggcagcgaggaacatctacctttgtcacagttcaccacggtggatagagaggctatctgggcagaggtcgagaaggaacccgagaaatacccactgcggggagaacttagtgaagaagaactaccgtactatgttgaattgcccgatagaacagcccatggggctcccgactccagtgaacacaccgagtcagcagacacttcctcctgccataccgatagtgagaatacatccagtttctctagcccttcgcacgacctccaagagctatctaatgaggagaattgttgcgccccaatccctatgggaggaagagcgtatcccaaaaggtctgctctgttggcggcttttcaaagtgagtcctttaaggcaggggctaagctgagcttagttagagttgattcagacaagacgcaggcctccgaatcattttctagcgacgaagaagcggacctggagcttcaagccctcaccacatccaggctgctcaagcaacagcgcgagaggcaggaagcggtggaggccttattcaaacatatcttgctgtacttgcaaccatacgactctaggagggtcctgtatgcgttcagcgtgcttgaggccgtccttaaaactaatccaaaggagtttatcgaggcggtgagcagaacctccatggacacatcatcaaccgcccacctcaacctgataagcaatcttttggctagacaccaggaggcattgatcggccagagtttctatggcaaactccagacacaggtacctaatgtctgccctcacagtttgttgcttgagctgctgacctatctttgtctgtctttccttagaagttattacccttgctatttaaaagtttctcacagagacatcttggggaacagggatgtgcaggtaaaaagtgtggaggtgctaattaggatcatgatgcaattggtgtctgttgccaagtcaagcgaaggtaaaaatgtagagttcattcatagtcttctgcaacggtgtaaagtccaggaattcgtgctgttgtcgctgtcagcctcaatgtacacgtcacagaaaaggtatgggctcgctaccgcgcaccatgggagggctctacccgaggactctctatttgaggagagtctgataaatctcgggcaggaccagatctggagtgagcatcccctacagatcgaactgctgaaactgctgcaggtcctcatagtgcttgagcatcacctaggtagggcccacgaggaagctgagaatcagccggatttaagcagggaatggcagcgcgcactgaactttcagcaggcaatctccgcactgcagtacgtacaacctcatccactgacaagccaagggctccttgttagtgccgtggttcggggactccagccagcctacggatacggcatgcaccccgcatgggtcagcctcgttacacatagtctgccgtacttcgggaaatcgttgggatggacagtcactccttttgtggtccaaatctgcaagaacttggacgatctggtaaaacagtacgaatcagagagtgtcaagctctctgtcagcaccacctctaaaagagagaacattagcccagattatcccctgactcttcttgaaggcttgactactatttctcatttctgcctattggaacaggcaaatcagaacaagaagaccatggccgcaggggacccagcaaatctgcggaatgccagaaatgccatactggaagagctgccacgcacagtgaacacaatggcactgctatggaatgttctgcggaaagaggaaacgcagaagcggccagttgacctgctgggcgcaactaaaggatcatctagcgtttacttcaaaaccactaagaccattcgccaaaagattctggacttcctcaaccccctgactgcccacctgggtgtgcaactgaccgcagccgtcgcagcagtgtggagcagaaaaaaggctcagaggcacagcaagatgaaaatcatacctaccgcaagtgcctcccagctgacactggtagatctggtttgcgctctctctactctgcaaaccgatacgctcctacacctggttaaagaagtggtcaagcgccctccccaagtgaaggggggagatgaaaaatcacccctcgtggacatccccgtgctccaattctgctacgcgttcttgcaacgcctacccgttcccgctctgcaggagaacttcagctctcttctgggtgttcttaaggagtcagtccagctgaacctggcccctcctggttatttcctccttctcagcatgctcaatgacttcgtgaccagaacaccaaaccttgaaaataaaaaggaccagaaagacctgcaggagataacacagaaaatcttggaagctgtgggtaacatcgccggatcttcactggagcaaacaagttggctgagtagaaatctagaagtcaaagcccagcctcaggcctccctggaggaaagtgatgcagaagaagatttatatgacgcggctgcagcgtcagctatggttagttctagtgccccttctgtgtattccgtgcaggctctatcactgttggctgaggtgctcgccagcttgcttgatatggtgtaccgctctgacgagaaagagaaagcagttccccttattagtcgtctcctgtactacgtctttccttatcttagaaatcattctgcctacaacgctccgagctttagggctggcgctcaactactgagtagcctgtctggatatgcctacacaaagcgggcatggcgaaaagaggttctcgagctgttcttagatcccgcatttttccaaatggatacatcttgcgtgcattggaaatccatcatagaccatttgctcactcacgagaagacaatgttcaaagatctcatgaatatgcagtccagttctctgaagcttttttcttcattcgagcagaaggccatgcttcttaagaggcaggcttttgccgtattttcaggcgaattggaccagtatcacctgtatctgcccctgatccaggaaaggttgacggacaaccttagagttggacagacatcaatcgtagctgcccagatgttcctgttctttcgcgttttacttctcagaatctccccacagcacttaacaagcctgtggcccatcatggtgagcgagttgattcagacctttacccagctcgaagaagatcttaaagatgaggacgagtctcttcgctctaccaacaaggtgaaccggacaaaggtgtcagtgcccgacgcaaatggcccatccgtaggggagattcctcagtccgagttgatcctgtacctatctgcctgtaagtttctggacacagccttatcctttccccctgataagatgccactgttccaaatctaccggtgggctttcatccctgaggttgacacagaggggcctgcctttctgtcagacgtggaggagaaccaccaggaatgtaaaccccatacggtccgaatccttgagcttctgaagcttaaattcggagagatctccagtagcgacgaaatcactatgaagtccgaatttccactgctgcggcagcatagcgtgagtagcatcagacaactcatgccattcttcatgacattgaatggcgcttttaaaacccaacggcagcttccagcagattcgccaggaaccccatttctggattttccagtgaccgactctcccaggatcttgaagcagctagaggagtgtatcgagtacgactttctcgaacacccagagtgtta

SEQ ID NO: 221200 - DNA, 792 bp, synthetic construct
  misc_feature 1..792: note = Description of Artificial Sequence: Synthetic coding sequence
  source 1..792: mol_type = other DNA
atgttttattttcactgtccccctcagctggagggaacagcaacatttggaaaccacagcagcggtgactttgacgacgggttcctgcgccgaaaacagcggaggaatcggacgacattcacacttcaacagctcgaggctttagaagccgtcttcgcacagactcactatcctgacgtgttcacaagagaggaattggccatgaaaattaacctaacagaagcaagggtgcaagtttggttccagaaccgtcgcgcaaagtggaggaaaactgagcgtggagcatcagaccaagagcctggcgctaaggagccaatggcagaagttactccccctcccgtgcgcaacataaattctcctccccctggcgaccaggctcggtcgaagaaggaggcgctggaagctcagcaaagtctaggccgtaccgtggggccagccggtcctttctttccttcctgtttaccaggtactcttctcaacaccgccacctacgctcaggcactgagtcacgtcgcctcattaaaagggggacccttatgcagctgctgtgttccagatccgatgggactgtccttcctgccgacgtatggatgccagagtaatcgtaccgcttcggttgccacgctcagaatgaaggcccgtgagcattccgaggccgtgttacaaagcgccaatttattgccatcaacctcttcgagtcctggccctgttgcgaagcctgccccaccagacggtagtcaggaaaaaacgtcccccaccaaagagcagagcgaggccgaaaagtcagtgtag

SEQ ID NO: 221201 - DNA, 807 bp, synthetic construct
  misc_feature 1..807: note = Description of Artificial Sequence: Synthetic coding sequence
  source 1..807: mol_type = other DNA
atggtcctgatgagctgcgaccagcgactcatcagtctccttctggtcgggaccgctacatttgggaatcactccagtggcgatttcgacgacggattcctcagacggaaacagcggaggaacaggaccacgttcacattacagcagcttgaggctctggaggccgtgtttgcccagacacactaccccgatgtctttacacgagaggaactcgcaatgaagatcaacctaactgaagcaagggtgcaggtttggttccagaatagacgtgctaagtggagaaagacagagcgcggtgcttctgaccaagagccgggtgccaaggaaccaatggctgaggtaacacctcccccagttcggaatatcaattcaccccctccaggagatcaggcgaggtctaagaaggaggcactggaggcccagcagagtctcggacgcactgtaggacctgcgggtccattcttccctagttgcctcccgggtacactgctgaacacggcaacctatgctcaggcactctcccacgtggctagcctcaagggtgggccactgtgctcatgttgtgttcccgaccccatgggcctgtcctttctcccgacctacggctgtcagagcaaccggaccgcctccgtggcaactttacgtatgaaagctagggagcacagtgaagctgttcttcagtctgcgaatttgctaccctccactagctcatcgccgggacctgtggctaagcccgctccgccagatggcagccaagagaagacctctcccacgaaagaacagtccgaagctgaaaagagcgtctag

SEQ ID NO: 221202 - DNA, 384 bp, synthetic construct
  misc_feature 1..384: note = Description of Artificial Sequence: Synthetic coding sequence
  source 1..384: mol_type = other DNA
atgaagcttaatgtggatgggcttctagtgtactttccttacgattacatttatcctgagcagttcagctacatgcgcgagttgaagcgaactctggatgctaaaggccatggggtgcttgaaatgcctagcgggacaggaaaaaccgtctcacttttagccctgataatggcctatcagcgcgcataccctctcgaagtgacgaaactcatttattgttccagaactgtgcctgagattgagaaagtgatagaggaactacgcaagctactgaacttctatgaaaagcaggaaggtgagaagctgcccttcctgggcctggcgctcagctctcgaaagaatctctgcatccatcctgaaacaaccagcgcaagcacaccatag

SEQ ID NO: 221203 - DNA, 4614 bp, synthetic construct
  misc_feature 1..4614: note = Description of Artificial Sequence: Synthetic coding sequence
  source 1..4614: mol_type = other DNA
atgggagagaagctggagcttaggcttaaatcgccggtcggcgcagaacctgccgtgtacccatggcccctgcccgtatatgataaacaccacgacgcagcacatgagattattgagaccatcaggtgggtttgtgaagagatcccagacctcaagcttgctatggagaattatgtcttaattgattacgataccaagagcttcgagagcatgcagaggctctgtgacaagtacaatagagcaattgattccatccatcagctgtggaaaggtaccacgcagccaatgaaactaaatactaggccaagtacagggctactcaggcacattttgcaacaagtttataatcactcagttactgatcctgagaaattgaacaactatgaacccttttctccagaagtatatggtgaaacttctttcgatttggttgcccagatgattgacgagatcaagatgacagatgatgatttgttcgttgacctcgggtccggcgtcgggcaggtcgtcctacaggtcgccgctgctacaaactgcaagcatcactacggcgttgaaaaagccgatatccctgccaaatacgccgaaactatggatcgggaatttaggaagtggatgaagtggtatggcaagaagcacgctgaatacacgctggagcgtggggatttcctcagcgaagagtggagagagcgtatcgcaaatacaagtgtcatttttgtcaataactttgcttttggcccagaggtggatcatcagctcaaggaacgctttgctaatatgaaggaaggtggccgaatcgtatcctctaagccatttgccccattgaacttcaggattaattctcgaaatctgagcgacattggtacaataatgagggttgtggaactttccccacttaaaggctctgtgtcttggactggtaaaccagtgtcttattaccttcacactatcgacaggacgattttagagaactacttttcgagtctgaagaaccccaagctgagagaagagcaggaggctgccagaagaagacaacagagggagtcaaagtcaaacgccgctacacctactaaagggcctgaggggaaagtagccggacctgcagatgctcccatggattcaggcgctgaagaagagaaggctggtgccgcaactgtaaaaaagccgagcccaagcaaggctcggaagaaaaaactcaacaagaaaggccgaaaaatggcaggtaggaagagggggaggccaaaaaaaatgaacacagctaatccggaaaggaagccaaagaaaaatcagactgccctagacgcccttcatgcccaaacggtttcccagactgccgcttcttccccccaggacgcctatagaagcccacatagccctttttatcagctgcccccatctgtgcagcggcatagccccaatccactccttgtcgctccaaccccacctgctctgcaaaagctgctcgagtcatttaagatacagtaccttcagttcctggcctatactaagacacctcagtacaaagcgtctttacaagaactgctaggacaagaaaaagaaaagaacgctcagctcctgggggctgcccagcagctgctgagtcactgtcaggcgcagaaagaggagatacggaggctgttccagcagaaacttgacgaactaggagtgaaagcactcacatacaacgatctaatccaagcccagaaggaaattagtgcccataatcagcaactgagggaacagtccgagcaactggagcaggacaacagggccctacgaggccaatctctgcaattattgaaggccaggtgcgaagagttgcagctggattgggcaaccctctctctcgaaaagttattgaaggagaaacaggctttaaagtcgcagatttccgaaaaacagcgccactgtcttgaactgcagatttcaattgtggagctggaaaaatcccagagacagcaggagctattacagcttaagtcttgcgtgcctccggatgatgcactgagcctccacttgagaggaaagggcgctcttggcagagagttagagcctgatgcatctcggctgcacctggagctggattgtaccaaattttctctaccccatttgtctagcatgtctcctgagttgagcatgaacggacaggcagccggatatgagctttgtggggttctgtctcgcccttcttcgaaacagaacactccgcagtatttggcttcccccctagaccaagaggtggtcccctgcacaccgtctcatgtcgggaggccacggttagaaaagctgtccggactggccgctcctgactacacccgactgagccctgcgaaaatcgtgcttagacgccaccttagccaggaccataccgtgcctggccgacctgcggcttctgaactgcacagccgcgctgaacacactaaggagaacggacttccataccagtccccttcggtgcctggtagcatgaagctgtccccacaggacccaagaccactgagtcctggggctctgcaacttgctggagaaaagagcagcgaaaaaggactgcgggaacgggcatacggaagcagcggcgagctcattacaagcctcccaatcagcatcccgctttcaacagtgcagcctaataagcttccagtgtccatccccctggcatccgtggtgctcccctccagagcggagagggccaggagcacgccttctccagtactgcaaccacgggacccttcatcgaccttggagaaacagataggcgctaacgcccacggggcagggagccgttctcttgctctggctccagccggtttctcgtacgctggcagcgtggcaatttccggtgccctagccggatcgccagcctccctgacacccggagctgagcctgctacactggacgagagctcctcatccggaagtctctttgccactgtcggcagtcgatcttctaccccacaacatccactgctcctggcccaaccaagaaattcactgccggcatctcctgcacatcagctgtctagtagcccccgtctagggggagccgctcagggtccactcccagaagctagcaagggagacttaccatccgactccggcttctctgatccggaatcagaagcaaagaggcggattgtgtttacaataaccactggcgctggaagtgccaagcagagccccagttccaaacactctcctctgaccgctagcgctcgcggagattgtgtgccaagccatgggcaagattctagaaggaggggcaggcgtaaaagggcaagtgccggaaccccatccctttcagccggagtctccccaaagagacgggctctacctagcgtagctggactctttacacagccttcagggagccccctgaacttaaatagcatggtctcaaacataaaccaaccactcgagattacagcaatctcctcccccgaaacttctttgaagtcttccccggtaccctatcaggatcacgaccagccaccagtgttgaagaaggagagaccattgagccagacaaacggcgcacattatagccccctgacttccgacgaggaaccaggaagtgaggacgaaccctcctctgctcggatcgaacggaaaatagccacgatctctctggagagcaagagcccacctaagaccttggagaatggcggagggcttgccggacgcaaacctgccccagccggtgaacctgtgaactcatctaaatggaaatctacgttcagccctataagcgatattgggctcgccaagagcgccgattcccccctgcaggcctcttccgccttgtctcagaactctttgtttacctttcgaccagcacttgaggaaccctctgctgacgccaaactggccgcacacccacggaagggcttccctgggtcacttagcggagcggatggtctgagcccgggtacaaacccagcaaatgggtgtacctttggcggtggactggcagctgacctgtcgctgcattcattcagcgacggcgcttcactgccccataaaggacctgaggccgctgggctctcttcgcctctgtcctttccgagccagagggggaaagagggctccgatgctaatccttttctttccaaaaggcagctggacgggctcgctggcctcaagggggaggggtctcgcggaaaggaagccggtgagggcggtcttcctctgtgcgggccaaccgacaagacaccactcctgagcggaaaggcagccaaggccagggatagagaagtggacctgaagaacgggcataacctcttcattagcgcagccgctgttccccctggatctctgctctctgggcctgggctggctccagctgcgtcgtctgcaggcggagccgcatctagcgcacagacacacaggtcctttctggggccttttccaccaggtccacagttcgcactgggtcctatgagcttgcaagctaacctgggctccgtggccggatctagcgtcttacaatcgttgtttagcagcgtgcccgctgcagctggcctggttcatgtgagctcagctgcaacccgcttaactaattcccacgcgatgggctccttctcaggggtggccggtgggacggttggaggaaattag

SEQ ID NO: 221204 - DNA, 1203 bp, synthetic construct
  misc_feature 1..1203: note = Description of Artificial Sequence: Synthetic coding sequence
  source 1..1203: mol_type = other DNA
atgcgcggacgcaggggtgaccgaatgactataaacattcaggaacatatggccattaacgtatgccctggaccaattcgccctatcaggcagatttcagactacttccccagaggacccggtcctgaaggtgggggtggaggaggcggagaagctcccgctcaccttgttccgctagctctggctccccctgctgcgctgctgggagccactaccccagaagatggggctgaggtggacagctatgatagtgatgacgcaacagctctgggcaccctggaattcgatctgctctatgacagggcgtcttgcacgctgcactgcagcattctgcgcgctaagggcttgaagccaatggactttaacggcctggcagacccgtacgtcaagctgcacctactgcccggagcttgcaaggcgaacaagctcaagactaaaacgcaacgcaataccctgaaccccgtgtggaatgaagatctgacttacagcgggatcaccgacgatgatattacgcacaaggtgttacggattgcagtgtgcgatgaagacaaactcagccacaacgaatttatcggagagattcgcgtccctctccggcgattaaaaccgtcccagaagaagcatttcaacatctgtttggaaagacaagtccccctcgctagtccatcttcaatgtccgctgcacttagaggcatcagctgttatttaaaagaacttgaacaagccgagcagggccagggtctgctggaagagagaggacgcatactcctctctctcagctatagctctcgcagacggggactcctcgtcggtatcctgcgatgcgctcacctggcggctatggacgttaatgggtacagcgatccctacgtgaaaacctatctgagaccggacgtcgacaaaaagtctaaacacaagacgtgtgtaaagaaaaagactctgaacccggaattcaatgaggaattcttctacgaaatagagctctcaactttagccactaagaccctggaggttacagtctgggattacgatattggaaagtccaatgattttattggaggagtttctcttggtcctggggcacgaggtgaggccaggaagcattggagcgattgtctccaacagccagacgcagccctcgaacgttggcacaccttgactagcgaacttccaccggctgccggtgcactgagctcagcctag

SEQ ID NO: 221205 - DNA, 927 bp, synthetic construct
  misc_feature 1..927: note = Description of Artificial Sequence: Synthetic coding sequence
  source 1..927: mol_type = other DNA
atgaccctcagacggagaggggagaaagccactattagtatacaggaacacatggccattgatgtctgcccagggcctatacggccaatcaagcagatctctgactacttccccagatttccgagaggcttgcccccagatgccggtcctcgggctgccgcaccaccggatgccccagctcggcctgcggtggccggagccggaagacggtccccaagtgatggggcacgcgaagacgatgaggatgtggatcagttgttcggcgcttacgggagctcccccggaccttcacccggtccaagcccggctcgcccacctgccaaacctccagaagatgagcccgacgcagacggttacgaatccgacgactgtaccgccctcggcaccctcgatttctcactgctgtacgaccaagagaataacgcgcttcactgtacaatcacgaaagctaagggcttgaaaccaatggatcacaatgggctagctgacccgtatgtgaagttgcacctgctgccaggggctagtaaagcaaacaagttacgcacaaagactctgaggaatacactgaatcccacttggaacgagacgctaacctattacggaatcactgatgaagacatgattcgcaaaaccctcaggatatcagtttgcgacgaggataaattcagacataacgagttcattggcgaaacccgggtgcccctaaaaaaactgaagcctaaccatactaagactttctcaatttgtctggagaagcagttgcccgtcgacaaaacagaggataagagtctggaggagcgtggaaggatactgatttctctgaaatacagtagtcaaaagcagggcctgttagtcggcattgtccgctgtgcacacctggctgccatggatgccaacggttatagcgacccctatgtcaaaacgtag

SEQ ID NO: 221206 - DNA, 927 bp, synthetic construct
  misc_feature 1..927: note = Description of Artificial Sequence: Synthetic coding sequence
  source 1..927: mol_type = other DNA
atgacccttcgacgcagaggtgagaaggcaacaatctccatccaggaacacatggccatcgatgtatgcccgggtcctatcagaccgattaagcaaataagtgattatttcccccgatttccgaggggcctgccaccagatgccggaccaagagcagccgcacctccagacgcaccagcacggcctgccgtggccggagcaggacgcaggagcccatcggatggggctagagaagatgacgaagacgtcgaccagttgttcggggcttacggctcatcccccggacccagtccaggccctagtccagcccgtccaccagcaaaaccgccagaagatgagccagacgccgacggctatgagtctgatgattgcacagctcttggcacgctggatttctccctgttatatgatcaggagaataacgccctccactgcactatcacaaaggccaagggcctaaaacccatggaccataacggcctcgcagatccctacgtcaagctgcacctgttacctggcgcatcgaaggccaataaattgaggaccaaaactctgcgtaacacattgaacccaacttggaatgaaaccctcacatactacggaatcacggatgaggacatgatcaggaagaccttacgcatatccgtctgtgatgaagacaaattccggcacaacgagttcattggagagaccagggtcccattaaaaaaactcaagccgaaccatacgaagacattttcaatttgtcttgagaagcaactcccggtagataaaacagaggataagagcctcgaggaaagaggcagaatactgataagcctgaaatatagctctcaaaagcaggggctgctggtcggtattgtccgttgcgcacatttggcagccatggacgcaaacggctactccgatccctacgtcaaaacgtag

SEQ ID NO: 221207 - DNA, 1275 bp, synthetic construct
  misc_feature 1..1275: note = Description of Artificial Sequence: Synthetic coding sequence
  source 1..1275: mol_type = other DNA
atggcactgccaacacctagtgattcgactctccccgctgaggctaggggacgtggtcggagacgtagactcgtctggaccccaagccagagcgaagcgttacgcgcttgcttcgaaaggaatccgtaccctggcattgctacgagagagcgcctcgcccaggcaatcgggattcctgagccaagagtccagatttggtttcaaaacgaaagaagccggcagctaaggcagcaccggagggagtcgcgaccttggccgggtcggaggggcccacctgagggcagaaggaagagaaccgccgtgaccggctcccagactgcacttctgctccgagcttttgaaaaggataggttcccaggaatcgctgctcgcgaagagctggctcgtgagactggtctccccgaaagccgcatccagatctggtttcaaaataggcgggctaggcaccccggacagggaggtcgcgctcctgcacaagctgggggactctgctctgccgctcccggtgggggacacccggctccaagttgggtcgcgttcgcccataccggcgcatggggcactggcctccctgcccctcacgtgccttgtgctcccggagcacttccccagggagcctttgtgagtcaggcggcacgcgctgccccagcgttgcagccttcacaggccgcacctgccgagggggtttcacagcctgctccagccagaggagactttgcctatgcagctcccgctccacccgacggagccctttctcatccccaagcacctcgctggcctccacaccccggtaaatcccgggaagatagggaccctcagcgggatggactgccgggaccatgcgcagtggctcagcctggaccagcccaggccggaccccagggccagggtgtgctggcgccacccacttctcaaggatctccgtggtggggctggggtcggggaccccaggtggcaggggcagcctgggagcctcaagccggagccgcaccacctccgcagccggctccacccgatgcaagcgcctctgctaggcaagggcagatgcaagggatcccagcgcctagccaggctctccaggagcctgcaccgtggagcgccctcccctgtggactcctcttggacgagctcctcgctagtcccgagtttctgcagcaggcgcagcctctgttggaaaccgaggccccaggagagctggaagcctctgaggaagccgctagtctcgaggctcccctgagcgaggaagaatatagagcccttctggaggaattatag

SEQ ID NO: 221208 - DNA, 1458 bp, synthetic construct
  misc_feature 1..1458: note = Description of Artificial Sequence: Synthetic coding sequence
  source 1..1458: mol_type = other DNA
atgaaaggctggtcactgccagcttgcgggcctttgcagggcagactggctggttggctggccgtccgcgcagggctgctcgccgcaccggcagctgtgcacagtccggctgaggtgcatggttcaccccctgcttctttgtgtccaagacccagtgttaagttcagacccggtctgactgctatggccttgcccacgccaagcgatagtacactcccagccgaagccaggggtagggggaggcgcaggagattagtgtggacacccagccagtccgaagcccttcgcgcttgctttgagcggaatccatatcccggaatcgcgacccgggaaagactcgcccaggccataggaatccccgagcctcgagtgcagatttggttccaaaatgagaggtcacggcagctgcgccagcaccgcagggaatctcgcccttggccaggaaggcgcggtcctcctgaaggacgtcgcaaacgcacggctgtgaccggatctcagacagcgctcctgctcagagcctttgagaaagacaggtttcctggaattgccgcaagggaggagctcgccagagagaccggcctgccggagagcaggatccagatctggtttcagaataggagggctagacaccctggccaaggcggacgggcaccagcccaggctggcggactttgttccgcagcgccaggcggtggtcatcctgccccttcgtgggttgcattcgcccacaccggggcttgggggacaggcctgcccgctcctcacgtgccatgcgcccctggggctctcccacagggggctttcgtcagccaggctgccagagctgcccctgctcttcagccatctcaagccgcaccggctgaaggcgtcagccagcccgcacccgctcgcggagactttgcatacgccgcacccgctcctccagacggcgcactaagtcacccacaggctccgaggtggcctcctcatcctggtaaatctagagaggacagagatccccagcgagatggactcccagggccttgcgccgttgcacagcctggtccagcccaggccggtccccagggccagggcgtcctggcaccgccaactagccaaggcagcccttggtggggatggggacggggaccgcaggtggccggtgccgcatgggaaccacaggcgggtgctgcaccacctcctcagccggcacccccagacgccagcgcatctgccaggcagggacaaatgcagggtatccccgctccctcccaagctcttcaggagcccgcaccatggagtgctctgccatgtggtctccttctcgacgagctcctggcatcacccgaattcctgcagcaggcccaaccactgctggagaccgaagctcccggagagctcgaagcgtcggaagaggccgcaagcctcgaggctcctcttagcgaggaggaataccgagctctcctggaggaactgtag

SEQ ID NO: 221209 - DNA, 1326 bp, synthetic construct
  misc_feature 1..1326: note = Description of Artificial Sequence: Synthetic coding sequence
  source 1..1326: mol_type = other DNA
atgaagacccttcctctgcatagccattgcacagaaatgcagcgtctgcttccaaagctcgagatgttaactcttggctcttcgttttgctccctgcaaggtgaattctgccaggctatggattcctttaccaccgtgtcacacgttggtatgtgcgaagagacagacgcatcatttaatgtgttttcccccaagttccaattcgaccggtcccactgtcagtccctccgcttccaccaaaatatggagctggactttggacatttcgacgagcgggacaaaacttcaagaaacatgagagggtcacgtatgaacgggctgccatcacctactcacagcgctcactgcagtttttaccgcacgcgcacattgcaggccctatccaatgaaaagaaagcgaaaaaggtgaggttctataggaatggagatcggtactttaaaggcatcgtctatgccgttagcagcgatcgatttagatcctttgatgcgcttctggctgatttgacacggagcctttcagataacatcaacctgccccagggtgttaggtatatttacacaatcgacggctccaggaagattgggagtatggacgaactggaggagggcgaatcctacgtctgctctagcgacaacttcttcaagaaggtagagtacacaaagaacgttaatccaaactggtccgtgaacgtcaagacttccgcaaatatgaaggcaccccaaagtctcgcaagtagcaatagcgcacaagctcgagaaaataaagattttgtaagacccaagttggtcacaattattcgaagtggggtgaaacctaggaaggcggtgcgcgttctcttgaataaaaagacagcccactcttttgaacaggtattaactgacattaccgaggcaatcaaactggaaacaggcgtggtcaaaaaactgtacactctcgacggaaaacaagtgacttgtctgcacgatttttttggcgatgatgatgtgtttattgcctgtggccctgagaagttccgttacgctcaggatgatttctcactagacgagaatgagtgccgcgtaatgaagggcaatcccagcgcaacagccggtcctaaagccagcccgactccgcagaagaccagcgcaaaatctccaggacctatgaggcgctctaagtctccggctgacagtgccaacggaacctcatcctcgcaactctcgacacccaagtccaaacagtctcctatatccacgcctacctccccgggaagcttgcgaaagcataaagatctgtatctccctctcagtcttgatgattctgacagtcttggtgattccatgtag

SEQ ID NO: 221210 - DNA, 1098 bp, synthetic construct
  misc_feature 1..1098: note = Description of Artificial Sequence: Synthetic coding sequence
  source 1..1098: mol_type = other DNA
atggaacttgactttgggcactttgatgagcgggacaaaacgagcaggaatatgcggggaagcaggatgaatgggttgccctctcctacccatagtgcgcactgttcgttctatcgtaccagaaccctccaagcactcagtaacgagaaaaaagccaagaaggttagattttatcgaaacggtgatcgctatttcaaggggatagtatacgcagtatcatctgatagatttaggtcattcgatgcactcctggcagacctgaccagatcactgtccgataatatcaatttaccacagggagtccgctatatatacaccattgatggcagtagaaaaatcggatctatggatgaacttgaggagggggaatcttacgtgtgttcctcggataacttttttaaaaaagttgagtatacgaagaatgtcaatccaaactggagcgtaaatgtcaagacgtccgcaaacatgaaggcgccacaatctctcgcaagttctaattctgcgcaggctcgcgaaaataaggatttcgtgcgacccaagcttgtgactattatcagatctggagtgaagcctagaaaagctgttcgggtgctgctgaacaagaagacggcgcactccttcgagcaggtgctgaccgacataaccgaggcaattaagctcgagacgggggtcgttaaaaaactatatacgcttgacggcaaacaggtcacctgtcttcatgacttcttcggagacgacgatgtgtttattgcttgcggccctgagaagtttcggtatgcgcaggatgacttctcactggatgagaatgagtgtcgagtgatgaagggtaatccttctgctaccgccggtcctaaggcctcgcccacaccccaaaaaacatcggccaaaagccctggtccaatgaggaggagcaagtcccctgcggacagtgggaacgatcaggacgcgaatggcacttccagcagtcagctgagcacacctaaaagcaaacagtcccccatctccacccccacatcccccggttctctgcgcaaacataaggacttatacctgcctctctctctggatgattcagactctttgggcgatagcatgtag

SEQ ID NO: 221211 - DNA, 1098 bp, synthetic construct
  misc_feature 1..1098: note = Description of Artificial Sequence: Synthetic coding sequence
  source 1..1098: mol_type = other DNA
atggagttggactttggccactttgacgagcgagataaaacgagtcgaaatatgaggggctctcgaatgaacggcttaccctccccaactcacagtgctcactgctctttctatagaaccaggaccctgcaggctttgagcaacgaaaagaaagcaaagaaggttcgtttctaccgcaacggcgaccgctattttaaggggatcgtgtatgcagtctctagcgatagattccgctctttcgacgctctgttagctgatctgactcgcagtcttagtgacaatattaacctgccccagggtgtgcgctacatctatacaattgatggcagccggaagatcggttcaatggacgagttagaagaaggggaatcctatgtctgttcctctgacaatttttttaaaaaagtggagtacaccaagaatgtgaacccaaactggtctgtgaacgtgaaaacgtcggccaatatgaaagcccctcagtctcttgccagctctaatagtgcccaggccagggaaaataaggactttgttcggcctaagctggtgaccatcatccggtctggcgtgaagcctcggaaggcagtccgtgtcctcctcaataagaaaacggcacatagtttcgagcaggtgctcactgatatcacagaagccatcaaacttgaaaccggcgtagtcaagaagctgtataccctagacgggaagcaagtgacctgcctacacgactttttcggagatgatgacgtcttcatcgcctgtggaccggagaagtttcggtatgctcaggatgatttctccctcgacgagaatgagtgtagagtgatgaagggaaacccgtcagccacggctggtcctaaggcgagtccgaccccacagaaaactagcgccaagagccccggtccaatgagacgcagcaaaagccctgcagactcaggcaatgaccaggacgctaatggcacttcatcgagtcaacttagcacacccaagagcaagcagtcaccgataagtaccccgaccagccctggctcactgcgcaaacacaaagacctgtatctaccccttagcctggatgattccgactcattgggggactccatgtag

SEQ ID NO: 221212 - DNA, 1317 bp, synthetic construct
  misc_feature 1..1317: note = Description of Artificial Sequence: Synthetic coding sequence
  source 1..1317: mol_type = other DNA
tgatgtactgaaatgcagaggctgcttccaaagctggaaatgctgacgcttgggagcagcttttgttctcttcagggagagttctgccaagccatggattcctttaccactgtctcccacgtggggatgtgcgaagaaactgacgccagcttcaacgtctttagtcctaagttccaattcgacagaagccactgccaaagcctccgcttccatcagaacatggagctcgactttgggcactttgatgaacgtgataagaccagccgcaacatgaggggcagcaggatgaacggtctgccaagccctacacacagtgcacattgcagtttctatcgtactcggaccctccaggccctctctaacgagaagaaggcaaagaaggtgaggttttatcggaacggcgatcgatactttaagggcattgtctacgccgtgtctagcgaccggttccggtccttcgacgcactgctcgccgacctgactcgaagtctgtctgataatataaatctcccgcaaggcgtgcgctacatttatacaatcgacgggagcagaaagattggcagtatggacgagctcgaggagggcgagtcctacgtctgtagcagcgataacttctttaagaaagtcgaatacaccaagaatgtcaaccccaactggtcagtgaatgtcaagacgagtgctaacatgaaggctccccagagcttagcttcaagcaactctgcccaggccagggaaaataaggacttcgtaagacctaagctggtgacaattattagatccggggtaaagccccgtaaagccgtgagggtgcttctgaacaagaaaacagctcacagtttcgagcaagttctgactgatatcacagaggctatcaagctggagacaggggtggtcaaaaaactctatactctagacggtaagcaggttacatgcctgcacgacttcttcggggatgacgacgtgttcatcgcgtgtgggccagagaaattccggtatgcgcaggacgacttctcgctcgatgagaatgagtgtagagtcatgaaaggcaacccttctgcaaccgctggccctaaggctagcccaacccctcaaaagacgtctgctaaatctccaggcccaatgcgacggtcgaagagccctgctgatagcgggaatgatcaggacgctaacgggacgagcagctcccagctcagtacacccaaatctaaacagtctccaataagcaccccaacatctcccggatcactgcgaaagcataaggatttgtatttaccactctcattagatgactccgactcactgggcgactccatgtag

SEQ ID NO: 221213 - DNA, 1083 bp, synthetic construct
  misc_feature 1..1083: note = Description of Artificial Sequence: Synthetic coding sequence
  source 1..1083: mol_type = other DNA
atggagttggactttggacattttgacgaacgagataaaacgagtagaaatatgagagggtctcgaatgaatggcttgccttctccgacccactccgcacactgttctttctaccgtacaagaaccctccaggcgctgagtaatgaaaagaaagctaagaaggtgaggttctacagaaacggcgaccgttacttcaaaggtatcgtttatgccgtgtcatccgatcgctttcggtccttcgatgcactgctggccgatttgacccgatcactatctgataatattaaccttcctcaaggcgtgagatatatctatactatcgacggctcaaggaagatcggctccatggatgaactggaggaaggggagagttacgtctgctcaagtgacaacttctttaagaaagtggagtataccaagaacgtgaaccctaattggagcgtgaatgtgaagacttccgccaatatgaaggcaccccaatcgcttgcctcatctaattccgctcaagcacgtgaaaacaaagacttcgtccggcctaaactggtaacaatcattcggtctggcgtgaaaccgcgtaaggctgtaagagtactattgaacaagaagacagcacattcctttgagcaggtgcttaccgatatcacggaggccataaaactggagaccggtgtcgtgaaaaaactttacacgctggatgggaagcaggtgacttgcttacacgactttttcggggacgacgatgtatttatagcctgcgggccagagaagtttaggtacgcgcaagacgatttctctctggatgaaaatgaatgccgggtgatgaaaggaaatccctccgccacagccggaccaaaagcatctcccacgccccagaagacatcagccaaatctcctggcccaatgaggcgctctaagagtccggcagacagcgctaatggcacttcaagttcacagctgtctacgcccaaaagcaaacagtctccaatcagcacccctacttcccctggctctctgcggaagcataaggacctttatctccctctctccctcgatgactccgatagccttggcgacagcatgtag

SEQ ID NO: 221214 - DNA, 342 bp, synthetic construct
  misc_feature 1..342: note = Description of Artificial Sequence: Synthetic coding sequence
  source 1..342: mol_type = other DNA
atggagctggactttggccactttgatgagcgtgacaagacaagtagaaacatgcggggatccaggatgaatggtttgccctcccctacccactcagcgcattgttccttttaccgcacaagaactctgcaggctcttagcaatgaaaagaaagccaagaaagtacggttctatcgaaacggcgaccgatactttaagggtattgtttacgctgtgtcttccgacagatttcggtcgtttgacgccttgctcgccgatttgacaagaagcctgtccgacaatattaacctcccgcagggcgtgaggtacatctacactatcgacggttctcggaagatttag

SEQ ID NO: 221215 - DNA, 1083 bp, synthetic construct
  misc_feature 1..1083: note = Description of Artificial Sequence: Synthetic coding sequence
  source 1..1083: mol_type = other DNA
atggaactggatttcgggcactttgatgaacgggacaagacctcccggaatatgcgcggttctcgcatgaatgggcttccttcccctactcactctgcccactgtagcttctatcggacacggactctccaggcccttagcaacgagaagaaagccaaaaaagtcagattctaccgaaacggagataggtatttcaaaggcatcgtgtacgctgtgtctagtgaccgcttcaggtctttcgatgccttattggctgaccttactagatcactctccgacaatataaatctcccgcaaggggtgcgctatatttacacgatagacgggtcccgcaaaatcgggagtatggatgaactggaggaaggagaatcctacgtatgctcatcggataattttttcaagaaagtcgagtatactaaaaacgttaatccgaactggagtgtaaatgtgaaaacttctgccaacatgaaggccccacaatccttggcgtccagcaactctgcgcaggctcgcgaaaacaaagacttcgtcaggcccaagttggtgaccatcatcagaagcggcgtgaaaccacggaaagctgtgcgcgttctgctcaacaaaaaaacagcccattcctttgagcaggtgctaaccgatataactgaagccatcaaactggagacaggggtggttaaaaagctgtatactctcgatggcaagcaggtcacatgcctgcatgacttcttcggcgacgatgacgtgttcattgcttgtggccctgaaaaattccggtatgcccaggatgattttagcttggatgaaaatgaatgcagagtgatgaaaggcaacccttccgccacggccggacccaaagcttccccgacaccgcagaagaccagcgctaaatcgcctggaccgatgcggaggtccaagagtcccgctgactctgcgaatggtaccagctcctcacaactgtccactccaaaatcaaagcagagtcccatttctacaccaacttctccaggttcactacgtaagcacaaagacctttacctccctctttcccttgatgattcagactcactgggcgattccatgtag

SEQ ID NO: 221216 - DNA, 1065 bp, synthetic construct
  misc_feature 1..1065: note = Description of Artificial Sequence: Synthetic coding sequence
  source 1..1065: mol_type = other DNA
atggctaaaactggcgcagaggatcaccgcgaagccctgtcacagtctagtctctccttgctgacagaggccatggaggtgctccaacagtcttcaccagagggaacactcgatggcaatacggtcaacccaatatacaagtacattttgaacgatctccctagagagttcatgtctagtcaggctaaggccgtgatcaagactactgatgattatttacagtctcagttcggccctaacagactcgtacactccgctgcggtgagcgagggcagcggtctccaggattgcagcacccatcaaacggcatcagaccattcccatgacgagatttccgatttggactcgtataagtccaatagcaaaaacaattcctgttccattagcgccagcaagagaaatcggcctgtctcagcacctgtcggccagctcagggtggccgagttctcatctctgaaattccaaagcgcaaggaattggcagaaactgtcccagcggcataaactgcaaccaagggtgatcaaggttacagcctataaaaatgggagcagaacagtgttcgccagagtcacagtgccaaccattaccttattgctcgaagaatgcacagagaagctgaatctcaacatggcggcaagacgtgtgtttctggcagacggcaaggaagctctcgagcctgaagatatccctcatgaggcggatgtatacgtgagtaccggggagccgttcctgaacccctttaagaaaatcaaagaccaccttctgcttataaaaaaggtaacttggacgatgaacggtcttatgctgcctactgatatcaagcgtagaaaaactaagcctgtgctgtcgataagaatgaaaaaactgaccgagcggacttccgtcagaatccttttctttaagaatggtatggggcaggatggacacgagatcactgtgggcaaagaaacaatgaagaaagtgttggatacatgcacgatccggatgaacctaaacctgcctgctaggtatttttatgacctgtatggacggaaaattgaggatataagcaaaggcaagcattag

SEQ ID NO: 221217 - DNA, 690 bp, synthetic construct
  misc_feature 1..690: note = Description of Artificial Sequence: Synthetic coding sequence
  source 1..690: mol_type = other DNA
atgaaaatgtggaacaattgggggtggtgcgggggtcggcgtcgcggatgtactaagattctgagcaccaaaaaaggcatacagatgagcattaagaacaagcacctgatcgtaattcctgctttcagccatacgatgtcccagctagatttcgattttcactgtgtgtttgtgagcattgacgaagggatttttaaggccggagctgaacggtcagaaacccgaggcgcagccgaagtccaggaggacgaagacacacaggttgaggtaccagtcgatcaacggccagccgagattgtcgatgaagaggaggatggcgagaaggcaaataaagacgccgagcagaaggaggacttctcaggaatgaatggcgacttggaggaggagggcggacgtgaagcaaccgatgcacccgagcaggtagaagaaatcctcgaccactccgaacagcaggccaggcctgctagggtgaacggcggtacggatgaggaaaacggcgaggaactgcaacaggttaataacgagctgcagctagtgttagacaaagagagaaagagtcagggtgcgggatcagggcaggacgaagctgatgtggacccacagaggcctccacgccctgaggtgaagatcaccagccccgaggaaaacgaaaataatcaacaaaataaggactacgctgccgtggcctag

SEQ ID NO: 221218 - DNA, 1431 bp, synthetic construct
  misc_feature 1..1431: note = Description of Artificial Sequence: Synthetic coding sequence
  source 1..1431: mol_type = other DNA
atgagcggcagtagcgccagatcttctcacctcagtcagcccgtggtaaaaagtgtgctggtttacagaaacggtgacccattctatgcagggaggcgtgtggtcattcatgaaaagaaggtgtcaagtttcgaggtgttcctgaaggaagtgacaggcggtgtgcaggctcctttcggggcagtaaggaacatctataccccccgaacagggcacaggattcggaagcttgatcagatccaaagcggtgggaactacgttgctggcggtcaagaggcttttaagaagctaaattaccttgacatcggcgaaatcaagaaacgccctatggaggttgtgaacactgaagtgaaacccgttattcacagcaggattaatgtgtccgccagatttagaaagcccctgcaggagccttgcactattttcctgattgccaacggcgatctgattaatcctgcctctcggctgctgattcccagaaaaactctgaatcaatgggaccacgttctccagatggtaactgaaaaaattactttgcgttctggcgctgtacataggttatatacattagaggggaaactcgtggagtctggtgcggaacttgaaaatggccagttttacgtcgcagtagggagggataaatttaaaaaactcccctatagtgaactgctctttgacaaatctaccatgaggcggcctttcggccagaaggcaagctcactgccaccgattgttggtagtcgaaaaagtaaggggagcggaaatgaccgacatagtaagagcacagtcggatcaagcgacaactcaagccctcagcccttgaagcggaaaggaaagaaggaagatgtgaattctgagaagttaacaaagttgaaacagaatgtgaagttaaaaaatagtcaggagactattccgaattccgatgagggaatttttaaagctggtgctgaacgatccgaaacaagaggcgctgcggaagtgcaggaagatgaagatacccaggttgaagttcccgtcgaccagaggccagccgagatagtggatgaagaggaggacggcgaaaaagcaaacaaagatgcggaacagaaagaagacttctctggaatgaacggcgatctggaggaggaaggtggtcgggaggctactgacgctccagagcaggtagaggagatcctggatcacagtgagcagcaggctcggccagctcgcgtcaatggcggaactgacgaggagaatggcgaggaactccagcaggttaacaacgaacttcagttggtcctggataaagagcgaaagagccagggggcagggtcaggacaggatgaagctgatgttgatcctcagcgtccgcctaggcctgaggtgaagattaccagccctgaggagaacgaaaacaatcagcagaacaaggactacgcagccgtcgcttag

SEQ ID NO: 221219 - DNA, 267 bp, synthetic construct
  misc_feature 1..267: note = Description of Artificial Sequence: Synthetic coding sequence
  source 1..267: mol_type = other DNA
tgagtggtcatacatgagaagaaggtgtcgtccttcgaagtcttcctgaaagaagtgactgggggagtacaagcccctttcggggctgtgagaaacatttacactcccaggacaggacatcggatccggaagctggaccaaatccagtctggagggaattacgtggccggaggacaggaggcttttaagaaactcaattacttagacatcggcgagattaagaagcggcctatggaggtggtgaacacagagctgcatgtgctttag

SEQ ID NO: 221220 - DNA, 363 bp, synthetic construct
  misc_feature 1..363: note = Description of Artificial Sequence: Synthetic coding sequence
  source 1..363: mol_type = other DNA
atgtcggggtcatctgctaggtctagtcacctgagccagcctgtggttaaatccgttctggtataccgtaatggtgatcccttttatgctggcagaagagttgtaattcatgagaaaaaggtctcttcttttgaagtgttcctcaaagaagtaaccggcggagtgcaggcccctttcggagccgtgagaaacatttataccccccgtacgggccaccgcattagaaagttggatcaaatacaatcgggcggaaactacgttgccggaggacaggaggcattcaaaaaactgaactacctggatatcggggagatcaaaaaacgccctatggaggtcgtcaatactgagttgcacgtgctgtag

SEQ ID NO: 221221 - DNA, 1947 bp, synthetic construct
  misc_feature 1..1947: note = Description of Artificial Sequence: Synthetic coding sequence
  source 1..1947: mol_type = other DNA
atgaagaaacccatctgcaaaactactgagccctatgccccagttagactgagagtcctccaaaacggggaaaagaacaagaatcggagtgtcacaatcctcggccctgatatatcccccggtcgcaagacccagtgcacggaaattctgaacctgccttctgccgcacggagactgtacaacgaaaaaggcaaagagatcttcgccctgaaggatctgcagagagacgaactggtgtatgtgagttgcggcgagctctggataaaccctgacctctcaattgcccagcagaaaaagcagatattcctgcggaatcttgagtctgatattgccaagattcagattttctgctcaacgcacaaaatcgaggccttggttttggaagtccagtccgacatcgtatccgggagcaagctggccgttcacaaaccggtcgccatttttggagaggagaaacaagtaactgaacccgaggagaagcaaatgcaggaggaccccctcactaccgagaatgcctcctcggagattctcgactctcatgttcgggcacacttaagaatgaaagcctgccacaccctgccgaggtacgcgtggcaagagacatctcacgattttgacgaagatgacagtttacccaagaaaactgagaaaggcttgtttgaaaatgtggaacctcaaaagaagcacagctgctctccgaaacactcgaaactacacaaacactgtcatcaacagttcgaatatagggacggtcagataattagccacgctgcacctcagctggtgctgggggttcagggcccaaaccttcgaagtgggatggaagtcgtcctggtggagaaaaaatctgacggatctcaccaaaggtggattcatcaggaagacagtcgtaccttccacctggtttctaaccccgatttggtactggctgtcagcatgaccaaaacaagaaacgaggtgtgtgggtatcccgtcattgtccagaaatataagccgtataacaatggcgcagctaatcagaaatggcactatatgaagaatattaaggcactcgtcgcttttcatagtactgccttggacaaggagatcaccagcgctaactacgctggtgtctgcacctcgagcgtgattaaggaggaaaacatcgatcagcccggttactgctatttaagccctgacggcaagcgaaagacaatgttgtgcttggcttgtggtcagtctatgcgcacagaaaaggggctcaagcaactcctgccaggcgtgccctttttgtgtattagtgggaccaagacgcagaaacctttcctccaggggcctttcaaggtgatctccgtcgctgaagtcgatcttagctgtgacaaagccgaaaagacgctgagctattaccaggcgagactcctgtccctgaggatgaagacctgcacccaggcagcgtcacactccggcatggccgctacgcatcaaaaggcagttaaaatcatcgcttataagaacggtgacgggtacagaaacggtaaactgattgtggcaggaactttccccatgcttcttactgaatgcaccgaacaactgggccttgccagggctgccagcaaggtgtacaccaaagacgggactccgatctttacacttagagatttggtgttatgggccttggacgagagtttcctacagcgagattctgagaagcagaagcaggatgccgcacccgtgggcaaagaacaaattattgtcgaaaagaaccctcgcatgaaagtgaagaacaggctgtttgccaaatccgttacgtcagacagtctcgacggcattgataagagcctgctaactctcatccttaggaacccaatcgcaatttgggtctcctgcggagaacccttcttgccgcctaacgagtcacggaaaattcgcgaaactgagctggcgaaaaaagggcaaaactttggctag

SEQ ID NO: 221222 - DNA, 1365 bp, synthetic construct
  misc_feature 1..1365: note = Description of Artificial Sequence: Synthetic coding sequence
  source 1..1365: mol_type = other DNA
atgaagaacatcaaagcacttgtggcctttcactctacagccctggacaaggagattacatctgccaactacgctggggtgtgcacaagctcagttataaaagaagagaatattgaccaacctggttactgctatctgagtccggacggtaagcgcaaaaccatgttatgtctggcctgtggccagtcaatgcggacggagaagggactcaaacaactgctaccgggagtgcccttcctttgcattagtggcactaaaactcaaaagccattccttcaagggccttttaaggtcatctctgtcgctgaggtggacttgtcatgcgataaggcggagaaaacactgtcgtactaccaggcccgactgctgagcctgaggatgaagacgtgcacccaggccgcttcccatagcggcatggcagccacgcaccagaaagcggtgaaaattatcgcctacaaaaatggagatggctacaggaatggcaaactgatcgtagccggtaccttccctatgctgctaaccgaatgcacagaacagttggggttagcgagggccgcaagcaaggtgtatacaaaggatggcactcccatctttacccttagagacctagtgctctgggctctggatgagtcattcctgcagcgagatagcgagaaacagaaacaagacgcagcacccgtgggaaaggagcagataattgtcgagagcatggaagaaaaccctagaatgaaggtcaagaacagactatttgctaaatcggtcacatcagatagtctagacggaattgacaaaagtctcctgacactcattctacgcaaccctattgccatctgggtgtcctgcggggagcctttcttgcctcctaacgcactgcagaaggctgaaaaattggagaagcagaactggctgaaaaaggaccgaatcttggctgacctagatacaatgcggcacaagatgaggcaattgaagggcagacgcgtggcggcttgccagcccgcaaccatggttcctactaaaagcccggttcaacctgtggtcgtcgagggtggatggactgagcaaacccagcaggaaatcaaacttatggagctgatccgacacacagaagcacacctgtctgagattcaggaaatggagtcaaaaattaatttcccaatagccactaaacggatagcggtaaagcccagcaacctgtacaaacaacccaacaccaagcgcgtgtggatttacctcaatgggggacgccctgaagacggcacctatgcatggggaaaaaccatctctgaggtgagcctcctgtatttgaagacatggatttttatatggagccggaaggtgttcttttacttcctgattacggcctag

SEQ ID NO: 221223 - DNA, 2190 bp, synthetic construct
  misc_feature 1..2190: note = Description of Artificial Sequence: Synthetic coding sequence
  source 1..2190: mol_type = other DNA
atgtcttttggaagggatatggagcttgagcactttgatgagagagataaagctcaacgatacagcagagggagccgagtgaacgggctaccctcccctacacactctgctcattgctctttttatcgcacccggactctgcagaccctgtcctctgaaaagaaagccaagaaggttaggttctatagaaatggagacaggtacttcaaggggatcgtctacgcaatctcccccgatcgctttaggagcttcgaggccttgcttgccgatctcacgagaacactttcggacaacgtgaaccttccccagggcgttaggactatttacacaatagacgggctcaaaaagatatcctccttagatcagttagtggagggagaaagttacgtgtgtggcagtattgagccctttaaaaagctggagtacaccaaaaacgtgaatcccaactggtcggtgaatgtcaagaccaccagtgccagccgggctgtaagcagtctggctaccgccaagggcagcccatccgaggtgagagagaataaagacttcattaggccaaaactggtgacaatcatacgctcaggggtgaaacccaggaaagctgtgcggatcttgctgaacaagaagacagcccattcttttgagcaggtcctcaccgatattacggatgcaattaagctggattccggggtggttaaacggctttatacattagacgggaagcaggtgatgtgcttgcaggacttctttggtgatgatgatatcttcattgcatgtggcccagaaaagttccgctatcaagatgattttctacttgatgagtccgagtgcagagtggtgaagtctacgagttatacgaagatcgcttcttcatcaaggcgctctactaccaagtcacccggacccagtcgtaggtctaaatccccagcctccacctcgtccgtgaatgggaccccagggtcacagttgtcaactcctcggtccggaaaatccccaagtccctcacccacttcccctggttcgcttcggaaacaacgttccagccaacatggagggagtagcacatccctggcgtcgacaaaagtctgttcttctatggatgaaaacgatggccctggtgaagaggttagtgaagaaggtttccagatcccagccaccataaccgaacgctacaaagttgggaggacgatcggggacggtaatttcgccgttgtgaaggagtgtgtagaaaggtcaactgcacgcgaatacgccttaaagattatcaagaagagcaaatgcagaggaaaagaacatatgattcagaacgaagtctccatactccggagggtgaaacaccctaacatcgtcctgcttattgaggaaatggacgtgccgaccgaactgtatcttgtgatggaactggtgaagggaggcgacctgttcgacgccatcacgtctaccaacaagtatacagagcgtgatgcgtccggcatgctgtataatctcgccagcgcaattaagtacttacacagtcttaacattgttcatagggacatcaaacctgaaaacctactggtgtatgagcaccaggacggcagcaagagtctgaagctgggtgactttggattagctacaattgtggacggccctctctatacagtgtgtggtactccaacatacgttgctcccgaaatcatcgccgaaacaggctacggccttaaggtggatatctgggcggcaggggtgattacctacattctcctctgtgggttcccaccatttcgcggaagcggtgatgatcaggaggtactgttcgaccaaattctgatgggccaggtggattttccatctccgtactgggacaacgtaagtgattctgcaaaggagctcatcaccatgatgctcctcgtcgatgtggaccagagattctccgccgtgcaggtgctggaacacccatgggtgaatgacgacggcctgcccgagaacgagcatcagctcagcgtggccggaaagatcaagaagcatttcaacacaggtcccaagcccaattccactgctgcaggggtgtccgtaatcgctttggatcatggattcaccatcaaacgaagtggaagtctggattattaccagcagccaggcatgtattggatacgaccaccactgttaattcgtcgcggtaggtttagcgacgaggatgcgacgcggatgtag

SEQ ID NO: 221224 - DNA, 2223 bp, synthetic construct
  misc_feature 1..2223: note = Description of Artificial Sequence: Synthetic coding sequence
  source 1..2223: mol_type = other DNA
atgtcatttggccgagacatggagttagagcacttcgacgagcgggacaaagcccaacggtattcacgcggaagccgggtgaacggcctgcccagcccgacgcactcagcgcactgctctttttatagaacacgcacattgcagactctctcatctgaaaagaaagcgaagaaggttaggttctatagaaacggcgatagatattttaagggaatcgtgtatgccatcagtcccgaccgttttcgaagttttgaagcccttctggctgacctgacacggacccttagcgacaacgttaatcttccgcagggcgtgaggacaatttacacaatcgatggccttaagaagattagcagcctagaccagctggtggagggcgaaagttacgtgtgtggctccattgaacctttcaagaagctggagtacaccaagaatgtaaacccgaattggtcggtcaacgtgaaaactaccagcgccagccgtgccgtctcctcgcttgccaccgctaaggggagccctagcgaggtaagagagaacaaggacttcattagacccaagctagtgacaatcatacgtagtggggtgaagccccgaaaggcggtcagaatactgctcaataaaaaaactgcacacagtttcgaacaggtcctgaccgatatcacagatgcgatcaagctcgacagcggagtggtcaagagactgtacacgctagacggaaagcaagtgatgtgtctccaagacttctttggggatgatgacatcttcatcgcttgtgggcctgaaaagttccggtaccaggatgactttttgctggatgaatctgaatgccgagtggtcaaaagcacttcttataccaagatcgcctcttcctctcgtaggtccacaaccaagagtcccggtccaagcagaaggtcgaaaagtcccgcaagcacctcttccgttaatggaacaccgggatcacaactgtcaactcctagaagcggcaagtcacccagcccctctccgacctcacccggtagtctgagaaagcaacggagctcccaacatggcggttcatctacatctctggccagcactaaggtgtgtagtagtatggacgagaacgatggccctggtgaggaggtatccgaagaaggcttccagatccctgctacgatcacagaacggtataaagttgggagaactattggcgatgggaacttcgccgttgttaaagaatgcgttgaacgttcaaccgcgagagagtacgccctgaagattatcaagaagtcaaaatgtcggggtaaagagcatatgatacagaatgaggtgagtatcctgagaagggtcaaacatcccaatattgtcctgctgatcgaagagatggatgtcccaacggaactgtacctggtcatggagctggttaaagggggtgacctctttgatgccatcacctctacaaataagtacacggagcgggacgcctcgggaatgctctacaatctggcatctgcaataaagtatctgcatagtctcaatatcgtgcaccgcgatataaagcccgaaaacttgctggtttatgagcaccaagacggttccaaaagcctgaaacttggtgatttcggcctggccactattgtcgacggccctctatacacagtttgcggtacccccacctacgtggcaccagagatcatcgccgagaccgggtacggcctgaaggttgacatttgggccgctggggtcattacgtacattcttctgtgcggtttcccgccttttcgcggtagcggcgatgaccaagaagtgctgtttgatcagattctcatggggcaggtggattttccaagtccgtattgggacaacgtctcggattccgctaaagagctaatcaccatgatgctgttggtggacgttgaccaacgtttcagcgctgttcaggtccttgagcatccctgggtcaacgatgacgggctccctgagaacgaacaccagctgagcgtcgccggaaagatcaagaaacatttcaatactggccctaaaccaaatagcacagctgccggtgtgtctgtgatcgctacgactgcactcgataaagagaggcaggtgtttcgcaggcggagaaaccaggacgttagaagtcgatataaagctcagccggcaccacctgaactcaattctgagtccgaagactattcaccatcttcctcagagacagtccgatctcctaactcccccttctag

SEQ ID NO: 221225 - DNA, 1092 bp, synthetic construct
  misc_feature 1..1092: note = Description of Artificial Sequence: Synthetic coding sequence
  source 1..1092: mol_type = other DNA
atgagttttggtagggatatggagctggagcacttcgatgagcgtgacaaggctcagcgctattcgagaggcagccgagtgaatggtctgccctcgcctactcactcggcccattgtagcttctacaggacacgcactctccagaccctctcctctgagaaaaaggcaaagaaggttaggttttatcgtaacggcgacagatacttcaagggaatagtgtacgccatttctccagaccggttccgcagctttgaagccctgctcgccgacctgacgcgcaccctgtctgacaacgtaaacctgcctcagggagtcagaaccatttatacgatagatggtctgaagaagataagttccctggatcagcttgtcgagggcgagagttatgtgtgcggctcaatcgaaccattcaaaaagctggaatacactaagaacgtaaaccctaattggtcagtgaacgtcaagactaccagcgccagccgtgccgtctcatctctggccactgccaaaggttccccgagcgaggtcagagagaataaggatttcatcagaccaaaacttgtgactattatacgaagcggcgtgaaacccagaaaagccgtccgcatcctgctcaacaagaaaacggctcacagttttgaacaggtactgacagatatcacagacgccatcaagcttgatagtggcgttgtgaaaagactttacaccctcgacgggaaacaggtcatgtgcctgcaggatttcttcggggatgatgatatttttattgcatgtggacccgagaagttcaggtatcaagacgatttcttactggacgaatcggaatgccgtgtggtcaagtccaccagctacaccaagatcgcatccagttcaaggcggagtaccacaaaatcccctggaccaagtagacgctccaagtcgccagccagcacgtcctctgtgaatggcacacccggatctcagctgtctaccccgcgatccggcaaatcaccaagcccttcccccacatcacccggatctctcagaaaacagcgggacttgtaccggccactgagctcggacgaccttgattcagttggagacagcgtgtag

SEQ ID NO: 221226 - DNA, 1302 bp, synthetic construct
  misc_feature 1..1302: note = Description of Artificial Sequence: Synthetic coding sequence
  source 1..1302: mol_type = other DNA
atgcttgagctgatcgaggtgaacggtaccccaggatctcaactttctacaccccgatccggcaagtcacctagcccctcgcctactagccccggatccttgagaaagcagaggagcagccagcacggtgggtctagcacgtcactcgcatccaccaaagtgtgctctagcatggatgaaaatgatggccctggtgaggaagtgtctgaggaggggttccagatccccgcaaccattaccgagcggtacaaagtcgggcgaaccattggcgatggtaacttcgccgttgtcaaagagtgcgtagagcggagtactgccagagaatatgcccttaagatcatcaagaagtctaagtgtcggggtaaggagcatatgatacagaacgaggtgagcattctcagaagagtgaagcaccctaatatcgttctgctcattgaggagatggacgttccgactgaactgtacttagtgatggagttagtcaaggggggtgatctgttcgatgcaattaccagcaccaacaagtatactgagcgtgatgcaagcggcatgctgtacaacctggccagcgccattaagtacctgcatagcctcaacatagtccatcgggacatcaagccagagaacctgctggtatacgagcatcaggacgggtctaaaagccttaagctcggtgacttcggccttgccactatagtggatggacctctgtacaccgtgtgtggaacgccaacctatgtggcccctgagatcattgctgaaaccggatacgggttaaaagtggatatatgggccgcaggcgtaataacttatatcttgctgtgtggcttcccgcctttccgcggttctggcgacgatcaggaagtgctcttcgatcagattcttatgggccaggtcgacttcccaagcccgtactgggataacgtcagcgactcggccaaagagctgataaccatgatgctgctggtggatgtggaccaaaggttttctgcagtccaggttttggaacatccctgggtgaatgacgacgggttgcccgagaatgagcaccagctgtcagttgctggcaaaataaaaaagcacttcaacacaggtcctaaacctaattctactgcagctggggtgtctgtgatcgcaacaaccgcattagataaggagcgccaagtcttccgccgtagaagaaatcaagatgtgcgatcccggtacaaggcgcagcccgcaccacccgagcttaactctgagtccgaggactactctccttccagcagcgaaaccgtgcgtagccccaattccccgttttag

SEQ ID NO: 221227 - DNA, 1266 bp, synthetic construct
  misc_feature 1..1266: note = Description of Artificial Sequence: Synthetic coding sequence
  source 1..1266: mol_type = other DNA
ctgagccttataaaattcaatggtacacccggaagtcagcttagtacacccagaagcggcaagagcccttctccgagtccaacgtctcccggttcgcttcgtaagcagcgttcctctcaacacggcggatcctcaacttctctggcatccacaaaggtatgctcatcaatggatgagaacgacggacctggggaagaggtttccgaggagggattccaaatacctgcgaccatcacagagagatataaggtgggcaggaccattggggatggtaacttcgctgtggtgaaggaatgcgtcgaacggtcaactgctcgcgaatatgccctgaagataatcaagaaaagcaagtgtcgaggcaaggaacacatgatccagaatgaagtgtctattttgcgaagagtgaagcatcctaacatcgtgctcctcattgaagaaatggacgtgcccacggaactttatctagtcatggaattggtgaagggcggtgatttgtttgatgcaataacaagtactaacaagtacaccgagagagatgcaagcggtatgttgtacaatttagcttcggcaattaaatacctgcacagcctgaatatcgtgcacagagatattaaaccagagaaccttctggtgtacgagcatcaggatggctccaaatcactcaagctcggggacttcggccttgccactattgtggatgggcctctatataccgtgtgtggtacccccacttatgtggcgcctgaaatcattgctgagactggctacgggctcaaagtagacatttgggccgctggtgtcatcacctacatactgttgtgtggttttccgcctttcagaggctcaggggatgatcaggaagtcctgtttgatcagattttgatgggtcaagtggactttcccagtccttactgggataatgtttccgattccgctaaggagctgattacaatgatgctgctggttgacgtagatcagcgcttttcagccgtgcaggtccttgaacatccatgggtcaacgacgatggcctgccagagaacgaacaccagctgagcgtcgccggtaagatcaagaagcattttaacactggcccaaagcctaactctacagccgcaggcgtgtccgttatcgcactggaccatgggtttacaatcaagagatccgggtctttggactattaccagcagcctgggatgtactggattcgccctccattactcattcgcagaggcagattttctgatgaagacgcaacccggatgtag

SEQ ID NO: 221228 - DNA, 1860 bp, synthetic construct
  misc_feature 1..1860: note = Description of Artificial Sequence: Synthetic coding sequence
  source 1..1860: mol_type = other DNA
atgtccttcggacgggacatggagttagagcatttcgacgagcgtgacaaagcacaaaggtacagtaggggtagcagggtgaacggcctaccttcacccactcactcagctcattgttccttctacagaacccgtaccttgcagacattgagctccgagaaaaaagctaagaaagtacgattctataggaacggcgatcgatacttcaaagggatcgtgtacgccattagtcctgatcgcttccgaagcttcgaggctttgctggcggatctgacccggacgttgtccgataacgtgaatctgccgcagggcgtgcgcacaatatataccatcgatggcttgaagaagattagctccttggatcagctggtggagggcgagagttacgtgtgcgggagcatagagcccttcaagaagcttgaatataccaaaaatgtgaatcccaactggagcgttaacgtcaagacaacatccgcaagcagggcggtgtcttcactggccacagctaaaggtagtccttcggaggtccgagaaaataaggatttcattcgtccaaagctagttaccattataaggtcaggagtcaagccaaggaaggctgtccgtatcttgttgaataagaagactgcacattcattcgaacaggtgctgactgatatcaccgacgctataaaacttgacagtggagtcgtgaaaaggttatacacattggacgggaaacaggtcatgtgcctgcaggacttctttggcgatgacgacatctttattgcctgcggtcctgaaaaattcagataccaagacgactttctgctggacgagtccgaatgcagggtggtcaagtcaacctcctacactaagatcgcaagctcctctaggcgctccaccaccaagtcaccgggtccctccaggagaagcaaatcaccagctagcaccagctctgtcaacggtacccctggctcgcagctatccacgccacgatccggcaaatcaccaagccccagcccaacttcccccggttccctaaggaagcagaggtctagccagcatggcggaagctctacaagcctggcatccaccaaagtatgcagttcaatggacgagaatgatggcccaggtgaggaagtgtctgaggagggcttccagattcctgccacaataacggagcgctacaaagtgggccgaaccataggggacgggaatttcgcagtagtgaaggaatgcgtggagcgttcaactgctagggagtacgctcttaaaatcattaaaaagagtaagtgtagaggtaaagagcatatgatccaaaatgaagtgtcaatcctgcggagggtcaagcaccccaacatcgtgttactaatcgaagaaatggacgtgcccacggaactctatttggttatggagctggttaaaggtggggacctgttcgatgccattaccagtaccaacaagtacctgcattcccttaatattgtgcacagggacatcaagcccgaaaacctgctggtttatgagcaccaagatggaagcaaatctcttaagttgggcgacttcgggctggcaactatagttgatgggccactgtatactgtttgtggaacgcctacttacgtcgcaccggaaatcattgctgagacagggtatggactcaaggtagacatctgggccgcaggagtgattacatacattctgttgtgcggatttcctccgttcaggggatccggggacgatcaagaggttctctttgaccagattttgatggggcaagtggacttcccttcaccgtattgggataacgtgtcggactctgccaaggaactgattacaatgatggcaagtcagaagatgaacatctcttgtcagtag

SEQ ID NO: 221229 - DNA, 2301 bp, synthetic construct
  misc_feature 1..2301: note = Description of Artificial Sequence: Synthetic coding sequence
  source 1..2301: mol_type = other DNA
atggctagcacaaggtcaattgaacttgagcacttcgaggagcgcgataaacgcccacggcctggttcccgccgtggggctcctagttctagtgggggttcgtcatcaagtggaccaaagggaaatggactgattccaagccccgcacactcagcccattgctccttttaccgcacacgcacattgcaggctctgagctctgagaagaaggctaagaaagcccgattttaccggaatggggacagatacttcaagggacttgttttcgctattagctccgaccggtttaggtccttcgatgctcttctgattgagctcacgaggtcactcagcgacaatgtaaacctgccccagggcgttcgcaccatctacacgattgacggatctcgcaaggtgacaagcctggatgagctcctcgagggggagagctacgtgtgtgcttccaacgaacctttcagaaaggtggattataccaagaatataaatcccaattggtccgtgaacatcaagggcggtacaagccgggctctcgcggctgcctccagcgtcaagagcgaagtcaaggagagtaaagacttcatcaagccaaagctcgtcaccgtgatcagatctggggtgaagcctaggaaagcagtccgtatacttctgaacaagaagaccgcccattccttcgagcaggtcctgactgacatcacggaggccatcaagctcgatagcggggtggtgaagagactgtgtacactggatggtaagcaggttacgtgtctgcaggactttttcggtgatgatgacgtatttattgcatgcggtccagagaaatttcggtatgctcaagatgatttcgtgctagaccactcggagtgccgagtgttgaagtccagctactcccggagcagtgcggtgaagtattctggttccaagagtcctggcccttcacgtcggagcaagtccccagcctctgtgaacggcacaccctcaagccaactgagtaccccgaagtcaacaaagtcttcatcatcctctccgacttcccctggctcttttcgcggactgaaacagatcagtgcacatgggagatccagttccaacgtcaacggcggtccagagctggatagatgtattagccctgaaggggtgaatggtaataggtgctccgagtcttccactctcctggaaaagtacaaaatcggcaaggtcattggagatgggaattttgctgtcgtcaaggaatgtattgaccgtagtaccggcaaggaattcgccctgaagatcattgacaaggccaagtgctgcgggaaggagcacctgattgaaaatgaagtcagcattttgcgcagagtgaaacaccctaatataatcatgctggtcgaggaaatggagaccgcaaccgagctgttcctcgttatggaactcgtaaagggaggggatttgtttgatgccataacgagctctacaaagtacacagaacgagacggttctgccatggtgtacaaccttgccaatgctctaaggtacctccatggcctgtcaatcgtgcaccgggacataaagccggaaaacctgctagtgtgcgaatatcccgacggcactaagtctctaaagctgggagacttcggactggctactgtggtagaaggccctctctataccgtgtgtggcacccctacgtacgtcgcacctgaaataattgctgaaacgggctatgggttgaaagttgatatatgggccgcaggagtgatcacttacatattgctctgtgggttccctccattcagaagcgaaaacaatcttcaggaggacctgtttgatcagattctggccggaaagcttgaattcccagctccttactgggataacatcacagactcggccaaagaactgatctcccaaatgctccaagtaaacgtggaagctagatgtaccgccggacagatcttgtcacacccctgggtcagcgatgatgcctcacaggagaataacatgcaggccgaggttacaggcaaactgaagcagcactttaacaacgctttgcctaagcagaattccacaaccacaggggtctctgtcataatgaatactgccttggacaaggagggacagatattctgctcgaagcactgccaggacagtggcaggccaggtatggagcccatatcccccgttccccctagtgtagaggagattcctgtgcctggtgaggctgtccctgcacccacaccccctgaatctccaactcctcacccaccccctgccgctccaggcggtgaacgcgctggaacctggaggcgtcaccgtgactag

SEQ ID NO: 221230 - DNA, 2352 bp, synthetic construct
  misc_feature 1..2352: note = Description of Artificial Sequence: Synthetic coding sequence
  source 1..2352: mol_type = other DNA
atggcgtccactcgttccattgaactggagcattttgaggagcgagataagaggccacgaccaggctcccgaagaggcgctccctcatccagtggtggatcctcaagctccggtccaaaaggaaacggactaatcccttcaccagctcacagtgctcactgctcattctataggacccgcacactgcaggccctgtcttctgaaaagaaggccaaaaaagctaggttctacagaaatggtgatcgatattttaaagggttggtctttgctattagctccgatcgcttcaggtcttttgacgcgctgctcatcgagttaactaggtccctctcagacaatgtcaacctgccacagggcgtgcggacgatttacaccatcgatggttccaggaaagtcacaagtcttgatgagcttctagaaggcgaatcttacgtctgcgctagcaacgagccgttccgaaaggtcgattacactaagaacatcaatcctaattggtcggtcaatatcaagggtggaacctcacgggcattagcagctgcatcctccgtaaaatctgaagtgaaagagtccaaggacttcatcaaacctaagctcgtaacggttattcgcagtggggtgaaaccaagaaaagctgtgagaatcttacttaacaaaaaaacagctcactcatttgagcaggtgctgaccgatatcaccgaagcgattaaactcgattctggagtagtgaaacgactgtgtacccttgacggaaaacaagttacatgcttgcaagatttttttggcgacgacgatgtttttattgcgtgcggccctgaaaagttcaggtacgcccaagatgacttcgtcttggaccatagcgagtgtcgagtcctcaagtctagttacagtcgaagttccgccgtcaaatatagcgggtccaaatccccgggacctagccgacgctcgaaatcgcctgcatctgtgaagagaggaggacactattcctctgcctacagtacagccaagtcacccgtaaatgggactcctagctctcagctaagtacacccaagtccaccaagtcgtcaagcagcagtcccacctcaccgggttcgttcagaggacttaaacagatttccgcgcatgggcgatcttccagcaacgtgaacggcggtcccgaattggatagatgtattagcccagagggcgtcaacgggaatcggtgctccgaatcctccactctactcgagaagtataagatcggtaaagttatcggcgatggcaactttgctgtggtcaaggagtgcatcgaccgttccacgggaaaagagtttgctctaaaaatcattgacaaggctaagtgttgcggcaaggagcaccttattgaaaacgaagttagtatcttgcgccgagtgaagcatcctaatattatcatgctggtcgaagaaatggagacagccacagaactttttctagtgatggaactcgtgaaaggaggcgacctattcgatgcaataacatcctccacaaaatatacggaacgcgacggctctgccatggtgtataacctggctaatgccctccgctatctccatggactgtctatcgtccatagggacatcaagcccgagaaccttctcgtatgcgagtacccggacggtacaaaaagcctgaagttgggagattttgggcttgcaactgtcgtggagggcccactgtatactgtttgtggcactcctacgtatgtggctccagagattatagcagagacgggctatggactgaaagtagacatttgggccgcaggggtaatcacatacatcctcctgtgcggttttcccccattcagatctgagaacaacctccaagaggatctgttcgatcagatcctggccggtaaactggaatttccagcgccttactgggacaacatcacagatagcgcaaaagaactgatttcacagatgctacaggttaacgtggaagcacgatgtacagcaggacagatactgtcccacccctgggtatcagatgacgcctctcaagagaataacatgcaggccgaagtaacgggcaagctcaaacagcactttaataatgcgcttcctaaacaaaatagtacgaccacgggagtgagtgtgataatgaataccgcactggacaaggaaggacagattttttgtagcaagcactgtcaggactccggccgtcccggtatggagccaatctccccagtccctcccagcgtagaagaaatacccgtgcctggcgaggcagtcccagctccaacaccacctgagagcccgaccccacacccaccacccgctgctccagggggagagagggccggtacgtggcgaaggcatagagactag

SEQ ID NO: 221231 - DNA, 2298 bp, synthetic construct
  misc_feature 1..2298: note = Description of Artificial Sequence: Synthetic coding sequence
  source 1..2298: mol_type = other DNA
atggccagtacacggtctattgagctcgagcatttcgaggagcgtgataaaaggcccagaccaggatcaagacgtggagctccaagctcctccggtggctccagctcatccggtcccaagggaaacggactaatcccgtcccccgcacactcagcccactgctcattttaccgcacccggacacttcaagcacttagtagcgagaaaaaagctaagaaagctcggttctacagaaacggggaccgctacttcaaggggctggtcttcgccatttcaagcgaccgctttcggagcttcgacgctctcctgatcgagcttactcgctctctgagcgacaatgttaacctgccacagggggttcgaaccatatatacaattgatggctcaagaaaagtaacatcgttagatgagctgctggagggcgagtcttacgtctgcgctagcaatgaaccattccggaaagtggactacaccaaaaacataaacccaaactggtcagtgaatatcaagggaggcacctcacgagcgcttgccgcagccagctccgtgaagtccgaggttaaagagtcgaaagactttattaagccaaagctcgtcactgtgataagatccggggtaaagccacgaaaggcagtgcgcatactgctgaataaaaagactgctcactcattcgaacaggtcctcacagatattactgaggccataaagctggattctggggttgtgaagcgcctttgcacgctagacggtaaacaggttacttgcctgcaggacttcttcggagatgacgacgtgtttattgcctgcggtcccgagaagtttcggtatgctcaggacgattttgtcctcgatcactctgaatgcagggtgctgaaaagttcatactcccgttcttctgctgtcaaatattctgggtctaaaagtccaggaccatctagacgatcgaaatctcctgctagtgtcaacggcacacccagcagtcagctgagtactccaaagtcaaccaagagttcctctagcagtcctacctcgcctgggtctttcaggggactaaagatcagcgctcacggcaggtcttctagcaacgtcaatggcggacccgagctggaccgctgtatctcccctgaaggcgtcaacggaaaccggtgctccgagagctccaccctactggagaaatacaaaatcggtaaagtcatcggagacggaaatttcgccgttgtgaaagagtgcattgacagatcgacaggaaaggagtttgcccttaaaattatcgacaaagccaagtgctgcgggaaggagcacctgattgagaacgaggtgagcatcttaagacgagtaaaacatcccaacatcataatgttggtggaggaaatggaaaccgcgactgagctttttctggtaatggagctcgtaaaggggggagacctgtttgatgccattaccagctccaccaagtacaccgagagggacggttctgcaatggtctacaacctcgcgaacgctctgaggtatttgcacggcttaagtattgtgcaccgggatataaagcctgagaacctattggtgtgcgagtaccctgacggcacgaaatccctaaagctgggcgactttggcctcgcaacagttgtggaaggcccattgtatacggtctgcggaactcctacgtatgtggcacccgagatcattgccgagacaggatacgggctcaaggtcgacatctgggccgcaggtgtcatcacctacatcctgctgtgcgggtttcccccattcagaagcgaaaacaacctacaggaggatctgtttgaccaaattctggcaggtaagctggagttcccagctccttattgggacaatattaccgacagcgctaaggaattaattagccaaatgcttcaggtcaacgtggaagccagatgcacagcgggtcagattctatcacacccgtgggtctctgacgatgcttcacaagagaacaacatgcaagccgaggtaaccggtaagttgaaacaacattttaataatgccctccccaagcagaattcgactacgaccggcgtaagtgttattatgaacactgcactggataaggaaggccagatcttttgcagcaagcactgccaggatagcgggcgacctggaatggagcctattagcccagtgccgccttctgtcgaggagatccccgtccccggagaggctgtgccagccccaacacctccagaaagtccaactccccatcctccaccagcagcaccaggcggtgagagagcgggaacctggcgcaggcacagagattag

SEQ ID NO: 221232 - DNA, 1947 bp, synthetic construct
  misc_feature 1..1947: note = Description of Artificial Sequence: Synthetic coding sequence
  source 1..1947: mol_type = other DNA
atggggaaagagcccctgactctgaagtccatccaggtcgctgttgaggagctgtaccctaacaaggctcgagccctcacactggcccagcactcaagggcaccttccccgaggctgcggtcacgtctctttagcaaagctctcaaaggtgaccaccggtgtggagagactgaaacacccaaatcttgctctgaagtggcgggatgcaaagcggcaatgcggcaccaaggaaagattccagaggagctttccctggatgatcgagctcgcacccagaagaaatgggggagaggcaagtgggaacctgaaccttcctcaaagcctcccagggaagcaactctggaggaaaggcacgctagaggcgaaaagcaccttggcgtagaaatagagaagaccagcggagagattatccggtgcgaaaagtgcaaacgagaacgcgagctgcagcagagcctggaacgtgagagactgagcctcggaacgagcgagctcgacatgggcaaggggccaatgtatgacgtggagaaactggtcagaaccaggagctgcagaaggagcccagaggcaaatcccgcttccggcgaagagggatggaagggagattcacacagaagctctccacgaaacccaacacaggagttacgcaggcctagcaagtcaatggacaaaaaagaagaccgcggacctgaggaccaggagagtcatgcgcaaggcgcagccaaagctaagaaggatctggtcgaggtcttgcctgtgactgaggagggcctaagggaggtcaagaaggacacccgcccaatgtctaggtcaaagcacgggggatggctgttgcgggagcatcaggcagggttcgagaagctgcgccgtacaaggggcgaggaaaaggaagcagagaaagagaagaaaccttgtatgtcggggggtaggaggatgactctgagagatgaccagccggctaaactggagaaagaacctaaaacccggcctgaggagaacaagcctgaacgcccttccggaaggaaaccacgcccaatgggcataatcgctgctaacgtagagaagcactatgaaaccggtagagtcatcggggacgggaatttcgcagtggtgaaggagtgtcggcaccgggaaaccagacaggcctacgcaatgaagattatagacaagagtagattgaaaggtaaggaagatatggtggattcagaaatcctgatcattcagtccctgtcacaccctaacattgtgaaactgcacgaagtgtatgagacagatatggagatatacctgatcctggagtacgttcagggtggcgacctgttcgacgccatcatcgaatcagtgaagttcccggaaccagatgcggctctcatgatcatggacctatgtaaggcgctcgtgcacatgcatgacaagtctatcgttcatcgcgacctcaaacctgaaaatctgctagtacagcgcaacgaggataaaagtaccacactgaaactcgctgattttggactggcaaaacatgtggttcgtcccattttcactgtctgcggcaccccaacctatgtcgcgccagagatactttcagagaagggttacggcctggaagtggacatgtgggccgctggggtgatactctatatcctgttatgcggatttccaccctttaggtcccctgagcgggaccaggacgagctttttaatatcatccagctgggccattttgaatttctacccccatattgggacaacatttctgacgccgctaaggaccttgttagccggttactggttgttgacccgaaaaaacgatatactgcccaccaggtgctgcaacacccctggatcgaaaccgctggtaagaccaatactgtgaagcggcagaaacaagtctccccatcttcagaaggacactttcgatcacagcataagcgtgtagtcgagcaagtatcatag

SEQ ID NO: 221233 - DNA, 1122 bp, synthetic construct
  misc_feature 1..1122: note = Description of Artificial Sequence: Synthetic coding sequence
  source 1..1122: mol_type = other DNA
atgcccaatgacgaagcctttagtaagccatctaccccctctgaagcccctcatgcaccgggtgtgccaccacagggaagggcagggggatttggcaaagcaagcggcgctttggtgggcgctgcctccgggtcttcagccggaggttcctcacgtggtgggggtagcggtagtggcgcttcagacctgggagccggtagtaaaaagtccccacggctgccaaagtgcgctcgctgtaggaatcacggctatgcatcccctctaaagggacataagcggttttgtatgtggagagactgccagtgtaagaagtgcaacctcattgccgaacgccagagggttatggccgctcaggtggccctgcggcgtcagcaggcacaagaagaagaactcggtatctcccaccccatcccactgccgtctgccgctgagcttctggtgaagcgcgagaataacggaagtaatccatgtctgatgactgagtgctctggaacatcccagccccctccggcaagcgtccctactaccgctgccagcgagggacggatggtgatccaggacatccctgcagtgacaagtagaggacacgttgagaatacaccagatctcgtgagcgatagtacatactacagcagcttctaccagccatcgctcttcccctactacaataacctttataattgtccacagtacagtatggctttagccgctgattctgcttctggcgaggtagggaatcctcttgggggttcccctgtgaagaatagtctccgtggactgcctggcccatacgtgcccggacaaactggcaatcaatggcagatgaagaacatggaaaaccgccatgctatgtcttctcagtacagaatgcattcttattatcccccaccaagttacctgggacagagtgttccccaattctttacattcgaggatgcacctagctaccccgaagcccgtgcatctgtgttctccccaccatcttctcaggactcgggtctggtgtccttgtctagttcctcccctatctccaataagagcactaaagccgtgctagagtgcgaacctgctagcgagccctcatccttcactgttacgccagtgatcgaggaggacgaatag

SEQ ID NO: 221234 - DNA, 525 bp, synthetic construct
  misc_feature 1..525: note = Description of Artificial Sequence: Synthetic coding sequence
  source 1..525: mol_type = other DNA
atgccaaatgacgaagctttctctaaaccatcgaccccatccgaagctccccacgccccaggcgttccccctcagggccgagccggtggctttggtaaagcgtctggtgcattagtgggtgcagctagcgggagcagcgcaggcggatcttcaagaggtgggggttcgggaagcggagcttccgacttgggagcaggcagtaaaaagagtccccgactccctaagtgcgccagatgcagaaaccatggttacgcttctccactgaaagggcataagcggttttgtatgtggcgggactgccaatgtaaaaagtgcaacttaatcgctgaacgtcagcgcgtgatggcggcacaggtcggagccggtgttagggagcctggattctcactctcttttttttttttcttctttttcaggtggagcctggctagattacccagactgcagtgttctggggctatcctggctcactgtaactctgcctcccgagttcaggccattctgctgccccagcccccaaaatag

SEQ ID NO: 221235 - DNA, 681 bp, synthetic construct
  misc_feature 1..681: note = Description of Artificial Sequence: Synthetic coding sequence
  source 1..681: mol_type = other DNA
atggcagatccacaagccggtagcgctgcaggcgattgggagattgatgtcgagtcacttgagctagaggaggacgtgtgtggagctccccgatctacacctccgggaccgtctccgccaccggctgacggcgattgcgaggatgatgaagatgatgacggggtggatgaggacgctgaggaagaaggtgatggagaggaagccggagccagtccaggaatgccagggcagccagaacagcgcggtggcccacagccacgaccaccacttgcgccacaggcttcccctgccggaacaggccctagggagagatgcacccccgctggcggaggtgccgaaccccgaaagctgtcccgaacgccgaaatgcgccagatgtcgtaaccacggcgtggtctcatgtttaaagggtcacaagcggttttgcagatggcgcgattgccagtgcgctaactgcctattggtggtagagcgccaacgagttatggctgcacaggtggcactccgacgacagcaggccaccgaagataagaagggactttctggcaagcagaataacttcgaaaggaaagccgtgtatcagcgccaggtgagggccccaagtctgttggccaagtccattctggaggtgttgcttggattattctactcttattacgtctacatcatgaatcacctgtag

SEQ ID NO: 221236 - DNA, 1686 bp, synthetic construct
  misc_feature 1..1686: note = Description of Artificial Sequence: Synthetic coding sequence
  source 1..1686: mol_type = other DNA
atggctgatcctcaagcagggagcgccgctggggactgggagattgatgtcgagtcattggaattagaagaggacgtctgcggcgctcctcgcagcacacctccgggaccctcaccgcctcctgcagacggagattgtgaagacgacgaggatgatgacggagtggacgaggacgctgaagaagagggggatggcgaggaggcaggtgccagtcccggaatgcccggtcagcctgaacagcgcggaggacctcagccgcgacccccactcgccccacaagcatcacctgccggaactgggcctcgcgagcggtgcacacctgctggaggaggagctgagcccagaaagttgagtaggacaccaaagtgtgcgcgttgtagaaatcacggggtcgtgtcttgcttgaagggccacaagagattttgtcgttggagggattgccagtgcgccaactgtctcctcgtcgtggaaaggcagcgcgtgatggccgcacaggtggccctccgaaggcaacaggctacagaggataagaaaggcctgtcggggaagcagaataatttcgaaaggaaggctgtgtaccagcgccaggtgcgggcaccttcactcttagccaaaagcatactggaggggtatcgcccaatcccagctgaaacatacgttggcggtacctttcccctaccccctcccgtgagcgacaggatgcgcaaacggcgtgcattcgctgacaaggaactggaaaatataatgcttgaaagagaatacaaggaaagggaaatgctcgagacttcccaggctgccgcactcttcctgccaaaccgcatggtgcccggacctgattacaattcgtataagagcgcctacagcccaagccctgtggaacccccttcaaaggatttctgtaatttcctgcccacttgtctagacttaaccatgcagtattctgggtctgggaacatggaactgatctcttccaatgtgtctgtggcgaccacttataggcaatatccgttaagcagcaggttcctcgtctggcccaagtgcgggcctatcagcgacacactgttgtaccagcagtgccttttgaacgcgaccacatcagtccaggccctgaaacccggagcctcgtgggatctcaagggtgcgagagtgcaggacggcctgagcgcagaacaagacatgatgccatcgaagttggagggctctttagtgctgcctcacacacccgagatccagaccacaaggtccgatctgcaggggcaccaggctgtgccggaacgcagcgccttcagcccacctcgcagaaacttttcccctatagttgatacagatagcctggccgcacaaggtcacgttcttaccaagattagtaaggaaaacacaaggcacccactccctctcaggcacaatcccttccactccttgttccagcaaaccctgaccgataagtctggaccagagctgaaaacaccttttgtcaaggaggcttttgaagagacgccaaaaaagcatcgtgagtgcctggtaaaggacaatcagaaatacacatttaccattgatcgctgcgccaaagacctcttcgttgcaaaacaggttggtactaagctctccgttaatgagcctctgtcttttagcgttgagagcattctgaagcgtccttcttccgctatcactagagttagtcagtag

SEQ ID NO: 221237 - DNA, 1686 bp, synthetic construct
  misc_feature 1..1686: note = Description of Artificial Sequence: Synthetic coding sequence
  source 1..1686: mol_type = other DNA
atggctgacccccaagctgggagcgctgctggagactgggagatagatgttgaatcacttgaactggaggaggacgtgtgcggggcacctcgtagtaccccaccgggaccttccccccctcccgctgacggggactgcgaggatgacgaggacgatgacggcgtcgatgaagacgccgaagaagagggagatggtgaagaggctggagcctcccctggaatgcctggacagccagaacagcgcggaggtccccagcctcgccctccgctggccccacaggcctcaccagcgggtactggccctcgcgagcgctgcacaccagcaggcggaggggcagaaccaagaaagctctcccggaccccgaaatgcgcccgatgccggaaccacggggtcgtcagttgcttgaagggccacaagcggttctgtcggtggcgcgactgtcagtgtgcgaattgtttgctggtggtggagcgccagagggtcatggcagctcaggttgccctgcggcgtcagcaggccaccgaggataaaaagggcctgtcggggaaacagaataacttcgagaggaaggccgtgtaccagcgtcaggtccgggctccatctctgctggctaaaagcattctcgaaggctatcgtcccattcctgccgaaacctacgtgggtggcactttcccacttcctccccctgtgtctgacagaatgagaaagcgccgagcattcgcagataaagagttagagaatatcatgttagagcgggagtataaagagcgggagatgctagagacgagtcaagctgcagcactatttctacccaatagaatggtgcccggtcccgactacaacagttacaagagcgcatactcccctagcccagtcgaacctccgtcaaaagacttttgcaacttcttgccaacatgcctcgatcttaccatgcagtacagtggatcgggcaacatggagcttatctcctctaacgtctcggtggctaccacgtataggcagtacccactctcatctagattcctcgtttggccaaagtgcgggcctatctcagacacactgctttatcagcagtgtttgttgaacgctaccaccagcgtgcaggctcttaaaccaggagcctcctgggatctgaaaggagccagagttcaagacggcctgtctgcagagcaggatatgatgcctagcaaactcgaaggctcattggtgttacctcacaccccagagatccagaccaccaggtccgaccttcagggccatcaggccgttcctgagcgatcagcgtttagtcctcctagaagaaacttctctcctatcgtcgacaccgactccttagcagcccagggtcatgttctgacaaagatttctaaggagaacacacggcaccctctgcctcttcgccacaacccatttcactcccttttccagcagactttgactgataagtccgggccagaactcaagacaccattcgtgaaggaagcttttgaggagacgccgaaaaagcaccgcgagtgcttggtgaaggacaatcagaagtataccttcaccattgaccgatgtgctaaagacttgttcgttgccaaacaggtgggtacaaaactgtccgtcaacgagccactgtcttttagcgtcgaaagcatccttaaacgaccctcatccgctatcaccagggtttcccaatag

SEQ ID NO: 221238 - DNA, 1686 bp, synthetic construct
  misc_feature 1..1686: note = Description of Artificial Sequence: Synthetic coding sequence
  source 1..1686: mol_type = other DNA
atggccgatccgcaagccggaagcgcagcaggagattgggagatcgatgtagaaagcctggaactggaagaggacgtgtgcggggcaccacgttccaccccacccggaccgtcgcctcctcccgcagacggagactgtgaagacgacgaagatgacgacggcgtggatgaggatgccgaggaggagggggacggagaggaagccggagccagccctggcatgccgggtcagccagaacaacgtgggggacctcagcccagacctcccctagctccccaggcttcacctgccggaactggtccacgggaacgctgcaccccggcaggcggaggcgctgaaccccgaaagttgtcccgcactccaaagtgtgccaggtgtcgcaaccacggcgtggttagctgcctcaagggccacaagcgattctgtcgctggcgtgattgtcaatgtgctaactgcttattagttgtcgagagacagagggtgatggccgctcaggtggcgctccggcgacagcaggccaccgaagacaaaaaagggctgtcagggaagcagaataatttcgagagaaaagccgtgtaccagagacaggtaagggcaccatcacttctggccaagtccatacttgagggttacaggccaatacctgccgagacttacgtgggaggtacgttccctctgccccctcccgtgtctgaccgaatgaggaagagaagggcctttgctgataaggaactggagaatattatgctggaaagagaatacaaggagagggaaatgctagaaaccagtcaggcagcggctctcttcttaccaaacagaatggtgcccggtcccgattacaactcttataaaagcgcatattcacccagcccagtcgaaccacccagcaaggacttctgcaattttctgcccacctgccttgatttgacaatgcaatattccggaagcggcaacatggagctgattagtagcaatgtatcagttgccaccacgtataggcagtacccattgagctctagattcctggtgtggcccaagtgcggacccatatccgacaccctgttgtaccaacaatgcctgctgaacgccactacatccgttcaggccctgaagccaggcgcttcctgggacttgaagggcgcaagagtgcaagatgggctgagcgccgaacaggatatgatgccctccaaattagaagggtccctagttctgccacacacgcctgaaatccagacaactaggtccgatctgcaggggcaccaggccgtccctgaaaggtccgcttttagcccccctcgtcgaaattttagcccaatagtcgacactgacagtctggccgcacagggtcacgtgctcacaaaaatatcaaaggaaaataccagacacccccttccactgagacacaatccattccacagcttattccaacaaacgttaactgacaagagtggtcccgagctgaagacaccatttgtcaaggaggcttttgaggagacgcccaagaaacatagggagtgtctggttaaagacaatcagaagtatacatttaccatcgacaggtgcgcgaaggatttgttcgtggctaagcaggtgggaacaaagctgagtgtgaatgaacctttatctttcagcgtggagtccatcctgaaaaggccctccagtgcgattaccagggtgagccaatag

SEQ ID NO: 221239 - DNA, 681 bp, synthetic construct
  misc_feature 1..681: note = Description of Artificial Sequence: Synthetic coding sequence
  source 1..681: mol_type = other DNA
atggccgaccctcaagccggatcagccgcaggagactgggaaatcgacgtggaatcgttagaattggaggaggatgtttgtggcgcaccccgtagcacaccaccaggtcctagccctcccccagccgacggggactgcgaagacgatgaagacgatgacggcgtcgacgaagacgccgaggaggagggcgacggagaagaggcaggcgcatctcctgggatgcctggccagccggaacaacgtgggggaccccagcctcgcccaccactcgctccacaagcttcaccggcaggcacagggccacgcgaaaggtgcacccctgcaggcggtggcgctgaaccaagaaaactgtccaggacaccaaagtgcgccaggtgtcggaatcatggggtggtgtcctgcttgaaaggacataagcgtttctgccggtggcgagactgtcagtgcgccaactgcctgctggttgtggaacgccagagagtgatggcggctcaggtggctttacggagacagcaggctaccgaagacaagaagggtctctctggaaaacagaataattttgagcgcaaagccgtataccaaaggcaggtcagggcaccctcccttctcgccaagtccattctggaagtccttttgggactcttctattcctactatgtctacatcatgaaccatctgtag

SEQ ID NO: 221240 - DNA, 681 bp, synthetic construct
  misc_feature 1..681: note = Description of Artificial Sequence: Synthetic coding sequence
  source 1..681: mol_type = other DNA
atggcggaccctcaggctggcagcgcagctggcgactgggaaattgatgtcgaatctttggagttagaggaagacgtgtgtggagcccctcgctctacgcctccgggaccttctcctccaccagctgatggggattgtgaggacgatgaggatgacgacggtgtggatgaagacgctgaggaggagggcgatggcgaggaagccggagcctcccctggaatgcctggacagccggaacagcggggaggcccacagccgcgacctcctctcgcacctcaggcatctccagcaggcaccggcccaagggaaaggtgtacaccggcaggcggaggagccgagccgagaaaactctctcgcacacccaagtgcgcgcgatgccggaaccacggagtggtgtcttgcctgaaagggcataaacggttctgtaggtggcgggattgccaatgtgctaactgcctcctcgtcgtcgagcgtcagagggtgatggcagcacaggtcgccttacgacggcaacaggctacggaagacaagaagggattaagcggaaagcaaaacaactttgaacgaaaagcagtctatcagcgccaagtcagagccccatccttattagccaagtccattctggaggtgctcctcgggttgttctattcctactacgtatacatcatgaaccacctgtag

SEQ ID NO: 221241 - DNA, 6038 bp, synthetic construct
  misc_feature 1..6038: note = Description of Artificial Sequence: Synthetic coding sequence
  source 1..6038: mol_type = other DNA
atgtggatcctggctctctccctgttccagagcttcgcaaacgtgttttccgaagatctccacagctcactgtactttgtcaacgctagcttgcaggaggtggtttttgcctccaccactggaacccttgtcccttgtccggctgctgggattcctcccgtaaccctgcgctggtacctggcaaccggcgaagaaatttatgacgtgccgggtatcaggcatgtgcaccctaacgggaccctgcagatttttcccttcccaccttcaagcttcagcacactgatccatgataatacgtactactgcactgcagaaaaccccagtggtaaaatacggtcacaggatgtgcacatcaaggccgtcctgcgtgagccatacactgtacgcgttgaagaccagaaaactatgagaggcaatgtggccgtttttaaatgcatcatcccgtcaagcgtcgaagcatacataaccgtggtctcctgggaaaaagatactgtgtctctggtgagtggaagccgctttctgatcacctccacaggagctctctatatcaaagacgtgcagaacgaagacggactctataattatcggtgtatcactcgtcatcgatacactggtgagacacgccagtccaacagcgccagactattcgtctccgatcctgcgaactccgctccaagcatccttgatggcttcgatcacaggaaggcaatggcaggacaacgggtggagctgccgtgcaaggctctcggccacccggaacccgactaccgctggctcaaagacaatatgccccttgagctctcgggaagatttcagaagacagtgacaggcctcttaatcgagaacatccggccttctgacagcgggagttacgtttgcgaggtgtccaaccgctacggtaccgccaaagtgatagggagactctatgttaagcaaccgctgaaagccaccatctccccacgaaaagtgaagagctctgtgggatcccaggtgtcccttagctgtagcgtgacgggcacggaagatcaggaattgagctggtacaggaacggagagattctcaatcccggtaaaaacgtgagaataacaggcattaatcatgagaacttaatcatggaccacatggtgaaatctgacggcggtgcatatcaatgcttcgttagaaaggacaaattatccgcacaggattatgtgcaggtggttttagaagacgggacccccaaaatcatctcggctttttccgagaaggtagtcagcccagctgaaccggtctctctcatgtgcaacgtcaagggcacaccccttcctaccatcacatggacattggatgatgatccaatactgaaaggcggatcacacaggatatcccagatgattactagcgagggaaatgtggtgtcctatttgaatatcagctcatcccaggtgagagacggaggggtgtataggtgcaccgcaaataattccgccggtgtcgtactgtaccaggccagaatcaatgtacggggacctgccagtatcagacccatgaaaaacattacagcaatagctggtagggatacatacatccattgtcgcgtgatcgggtacccgtattactccatcaagtggtacaaaaactcgaaccttctccccttcaatcacaggcaggtggcttttgaaaataacggcactttgaagctttctgatgtgcaaaaagaggtagatgagggggagtacacatgtaacgttctggtgcagcctcaattgagcacttcacaatctgtgcacgttactgtaaaagtcccacctttcatccagccattcgagtttcctaggttctcaatcgggcagcgcgtgtttattccatgcgtggtggtctcgggcgacctgcccatcaccattacgtggcagaaggatggcaggccaatccccggaagcctgggggtgacaatcgataacattgatttcacttcaagtttgaggataagtaacctatcactgatgcataacggcaactacacctgcatagctcgtaacgaggccgctgccgtcgaacatcagtcccagcttattgtgagggtgcctcctaagttcgtagtgcagccccgagaccaagatgggatttacggtaaggcagttattcttaattgttccgctgagggatatccagtgcctactatcgtctggaaattttccaagggagcaggtgtcccccagtttcaaccaatcgcactcaatggcaggattcaggtactgtccaacggctctctacttattaagcacgtggttgaagaggattctggatattatttgtgcaaagtgagcaacgatgttggagctgatgtcagtaagtcgatgtatttgacagtgaaaatccctgcgatgattacaagctatccaaacactactcttgccacccagggccagaagaaagagatgtcttgtacggctcatggcgaaaaacccatcatagtccgctgggagaaagaggatcgtattatcaacccggaaatggcaagatatttggtgtcaactaaggaggttggggaggaagtaatatccactctacagatactgcccaccgtaagggaagattccggcttttttagctgccacgccatcaactcctacggcgaagacaggggtatcatacaacttactgttcaggaaccacccgatccgcctgagatcgaaataaaggacgtaaaggccagaactataacgctccgctggaccatggggtttgatgggaatagtccaattaccggctatgatatcgaatgcaagaataagtctgacagctgggattcagcccagcgaaccaaggatgtgtccccacagctcaactccgcaacaataatcgatatccacccctcaagtacctactccatcaggatgtatgccaagaaccgaattgggaagtctgaaccatctaacgaactgaccatcaccgccgacgaggctgcacctgacggacctcctcaggaagtccatctagagccgataagctcacaatcaattagggtaacctggaaagcccctaaaaagcacttgcaaaatgggatcattagaggttaccagatcgggtatagggaatattccactggaggaaactttcaatttaacattatctccgtagatacatcgggcgattccgaggtttatacgcttgataatctcaacaagtttacccaatatggtttagttgtgcaggcttgcaatagagcgggtactggcccatcatcacaggagatcattaccaccacgttagaggatgtgccttcttaccctccggagaacgtgcaagcaatagcaaccagtcccgaaagcatcagcatttcctggtccacgctgagtaaggaggctctgaatgggatcttacagggctttagagtaatttattgggccaatcttatggatggcgagctgggtgagatcaagaatattactacaacacagccttccctcgagcttgacggcctggagaagtacactaactacagtattcaagttctcgcgtttacgagggctggagacggagtcagaagcgagcagatttttacaagaacaaaggaagatgtgccgggaccgcctgccggagtgaaagcagccgcagctagtgcctccatggtgtttgtcagctggctgcccccattgaaactgaacggcatcattaggaagtatacagtcttctgttcccacccctatcccacagtcatcagcgagtttgaggcttcccctgactcgtttagttatagaatccccaatctcagtcggaaccggcagtattctgtctgggtggtggcagtcacttctgccggaaggggtaacagctccgaaatcatcacagttgaacctctggcgaaggcaccggctcgtattttaacatttagtgggactgtgacaaccccctggatgaaagacatcgtcttgccatgtaaagcagttggcgacccgtcccccgctgtgaagtggatgaaggacagtaacggtaccccatctcttgtgaccatagacgggaggcgcagcatctttagcaacggaagctttatcatccggacggtcaaagctgaggactctggttactattcatgtattgccaataataattggggttcagacgagattatcctaaacctgcaggtgcaggttccgccagaccagcccaggctgacagtttctaaaaccacctctagcagcatcaccctctcttggctgccgggagataatgggggaagctctatcagaggttacatccttcagtattccgaagacaatagtgagcagtggggctcgtttcccatctctccctcagagaggtcctatcgattagaaaatctgaaatgtgggacatggtacaagtttacccttaccgcccagaacggagtgggccctggcagaatatccgagatcatcgaggcgaaaacgctcggcaaggagccccagttttccaaagaacaagagttgttcgcctccattaatactacgcgggtgagacttaatttgataggctggaatgatgggggatgtcccattacaagcttcaccctagaatatagacctttcggaacaaccgtgtggacaactgcacagcgaacaagtctaagcaagtcatatatcctgtatgacctgcaagaagccacctggtatgaactgcagatgagggtgtgcaatagcgctgggtgtgccgagaagcaagcaaactttgccaccctcaactacgacggttctaccattccccctttaataaagagcgtcgtccaaaacgaggagggattgacaaccaatgagggattgaagatgctggtcactattagttgcatattagtcggggtacttttgctgttcgtgctgttgctagtggtccgacggaggcgtcgagagcagcggctcaagagactccgtgacgcaaaaagcctggcagagatgctgatgtcaaaaaatacaagaacatctgacaccttgtcaaaacagcagcagactctcagaatgcatattgacattcccagagcccagctgctgatagaagagagagataccatggagacaatcgatgatagaagcacagtgcttcttactgatgctgattttggggaagccgctaaacagaaaagcttgaccgttacgcacactgtgcactatcagtccgtgagccaagctacaggaccactggtcgatgtgtccgatgctagacccggtacaaaccccactacccgcaggaatgcaaaggcgggaccgactgcccgaaatagatacgcttcgcaatggacactgaataggccgcatccgactatttccgctcataccttaaccactgactggcgacttcccacaccgcgtgccgctggaagtgtggacaaggagtcagacagttactccgtgagtccttctcaagacacagatagagctcgtagcagcatggtgagcaccgagtccgctagttcaacgtacgaggagctggcacgcgcttacgaacacgccaagatggaggaacaactgagacacgcaaagttcaccattaccgagtgttttatctctgacacgagctccgaacagctgactgccggaaccaatgaatatactgatagccttaccagctcaaccccctcggagagcggcatttgtcgctttacagccagcccacccaagccccaggatgggggtagagtcatgaacatggccgtcccaaaggcacatcgacccggagatctaatccacctgccaccttacctcagaatggatttcctgttgaacagggggggacccggaacaagcagggacctgtctctgggccaagcttgcctggaacctcagaaatcccgtactctgaagcggcctacagtgctggagccaattcctatggaggctgcaagctccgcttcaagcactagagaaggtcagtcctggcaacccggagctgttgcgactctcccgcagcgggagggcgcagagctgggccaagctgcaaagatgagctcttcacaggagagtctgctggatagtcgcggacacctcaaaggtaataatccctacgcaaagagctacacgttagtgta

SEQ ID NO: 221242 - DNA, 6341 bp, synthetic construct
  misc_feature 1..6341: note = Description of Artificial Sequence: Synthetic coding sequence
  source 1..6341: mol_type = other DNA
atgaccggagcaggtgagcccaggagggaggagcctccccctcaacctagcgccggactgagaagccgcgagtctggtgcccctagcgccggtgggtgggaaagggcggagcgtggcagaggggctgcagcacgcccagcaaccggaccacctcccagacggattgggcctctgtatggtatgtggttggttactttcctactgctgctggactccctgcacaaagccaggcccgaggatgtggggacctccctctatttcgtgaacgacagcttgcaacaggtcacattctcaagctcagtgggggtcgtagtgccgtgcccggcagcagggagtccctcagctgcattgcgctggtatttagccactggcgacgatatctatgatgtcccacatatccgccacgttcacgccaacggcaccctgcagttatacccttttagtccctcggccttcaacagcttcatacatgacaatgattacttttgtaccgccgaaaacgctgcaggtaagatccgtagccctaacattagagtgaaagctgtgttcagggagccttatacagtgcgcgtggaagaccagagatccatgcggggaaatgtcgccgtctttaagtgtctgattcccagctcagtgcaggagtacgtatccgttgtttcctgggagaaagataccgtctcaatcattccagaacatagattctttataacataccatgggggtttatatataagtgatgtacaaaaggaagatgccctaagcacctatcgctgtatcaccaagcacaagtattcaggggagacccgccagtctaacggagctaggttatcagtcaccgacccggctgaatccattcccaccattctcgacgggtttcacagtcaagaggtgtgggccggacataccgtcgagctcccctgtacagcctccggttatccaatcccagctatcagatggctgaaggatgggagacccttaccagccgactcaaggtggactaagcggatcacggggcttacgatttctgacctaagaaccgaggatagtggcacttacatatgcgaggtgaccaacacctttggcagcgcagaggctactggaattctaatggtcatcgatccactccacgtgaccctgactcccaagaagctgaaaactggaatcgggagtacggtgatcctgtcctgtgctctaacaggctcacctgagtttacaataaggtggtaccgcaacacggaattggtgctcccagatgaagccattagcattcgcggtctcagcaatgagacgctcctgattacgtcagctcagaaatcacatagtggtgcttaccagtgtttcgcgacacgcaaggcccagactgctcaggattttgcaatcatcgcactggaagacggcactcccaggatcgtgagcagtttttccgaaaaggtcgtcaaccctggagaacagttttcacttatgtgcgcagcgaaaggcgctccccctcccacggttacatgggctctagatgacgagcctattgtaagggatggatcccacagaactaatcagtataccatgagcgatggcaccacgatctcacacatgaatgtcacaggccctcagattagggacgggggagtgtaccggtgcactgccaggaacttagttgggagcgccgaataccaggccagaatcaacgtgcggggaccgcctagcatccgggcaatgaggaacatcaccgccgtggctggtagagatactcttattaactgtagggtgatcggctacccgtattattccataaagtggtacaaagatgctctgctgctgccggataatcataggcaagtggtgtttgaaaatgggaccttgaagctgaccgacgtccagaaaggaatggacgagggggaatatctgtgttcagtactaatccagccacagctgtccattagccagtcagttcatgttgcagttaaggttcctcccttaatacaaccatttgagtttccgccagcttccattggccaactcctgtacattccctgcgtggtgtcctccggcgacatgccaatacgtattacttggcgtaaagacggtcaggttattattagtggttcgggcgtgacaattgagagcaaggagttcatgagcagcctgcagattagcagtgtatctctcaaacataatggaaactacacctgcatagcctcaaacgccgctgcaaccgtctctcgcgagagacagctcatcgtgagagttccacccaggttcgttgttcagcccaacaatcaagatggtatctacggtaaagcaggagtcctgaattgttccgttgacggataccctccccctaaagtcatgtggaagcatgctaagggctcaggaaatcctcagcagtaccacccagtgccactgacggggagaatccagattctccccaactcctctctactgatccgccacgttctcgaagaggatatcgggtattacctgtgccaggcttccaacggggtgggaacggatattagtaagagtatgtttttaactgtgaaaatacccgctatgattacaagtcatcccaatactacaatcgccattaaagggcacgcaaaggaactgaactgcaccgccaggggagagcggcctatcatcatccgatgggaaaagggcgacacagtgatcgatcccgatagggtgatgcggtacgccatcgcaacaaaggacaacggggatgaggtcgtcagcacactgaagctcaagccagcagaccggggtgatagcgtgttcttttcttgccacgcaattaacagttatggtgaagatagaggcctgatccagctgacagttcaggagccacccgaccctcctgaactcgaaatccgggaggtcaaagcacgttccatgaatctgaggtggacccagagatttgacggcaatagcatcatcacagggttcgacattgaatataaaaacaagtccgatagttgggattttaagcaaagcacacggaatatctcacctactatcaaccaggccaatattgtggacctgcatcccgcttccgtgtattccattagaatgtattcctttaataaaattggcaggagcgagccatccaaagaattaaccatttctaccgaggaggcggctcctgatggcccaccgatggacgtcactctgcagcccgtaacctctcagagcattcaggtgacatggaaggcacctaaaaaggagctgcagaacggggtaatcagaggctaccagattgggtacagagagaatagcccaggatctaacggccagtactcaattgtcgagatgaaggcaacaggggactctgaggtgtacacactggataaccttaagaaattcgcacagtatggagtggtggtccaagctttcaaccgcgctggaaccgggccatcatcgtcagagattaatgcaactactctggaagatgtaccgagccagccacccgagaacgtgcgggctctctccataaccagtgatgttgctgtgatttcctggtccgaacctccacggtcaaccctcaatggtgtgctcaagggctatcgagttattttttggagcctgtatgtggatggtgaatggggagagatgcaaaacatcacaacaacacgtgaacgcgtggaactacggggaatggagaaatttaccaattattcggtccaagtgctggcatatacccaggccggagacggagtgcggagctccgtcctttatatccagacaaaggaagacgtgcccggtccccctgcaggaattaaagcagttccgtcaagtgctagctctgttgttgtcagttggctgccacctaccaaacccaatggtgtaatacgaaagtataccatcttctgtagctcaccgggaagcggtcaacctgcacccagcgagtatgagacgagtccggagcaactgttctaccgaatagcccaccttaataggggccagcagtacttgctctgggtagcggctgtaacatccgcaggaagaggcaattctagcgagaaggtgaccatcgagccagcgggaaaagcacctgcgaagatcatttccttcggaggcacggtgaccacaccctggatgaaggacgtgaggctaccttgtaactcagtgggcgaccctgctcctgctgtgaagtggaccaaagactcagaggacagtgctatccccgtgtctatggacgggcaccgtctgattcacaccaacgggaccctcctgctcagggctgtaaaggcagaggacagcgggtactatacgtgtactgccaccaacacaggcggattcgataccattatcgtcaacctgctggttcaggttcccccagaccaaccacggctcacagtgtccaaaaccagtgcatcaagtatcacattgacgtggatccctggggacaatggtgggtcgagcatcagaggcttcgtgctccagtatagtgtggataattcagaagagtggaaagatgtgtttataagttcctctgaacggagcttcaagctcgattctctgaagtgcggcacctggtacaaagtgaaacttgctgctaagaattcagtgggatcaggaagaataagcgagatcattgaagctaagacgcatggcagagagccgagcttttctaaggaccagcacctcttcactcatattaactccacccatgcaagactgaatttacaaggctggaacaatggcggatgccccatcacagctatagtcctggagtaccgccctaaaggaacctgggcctggcagggactgcgcgcaaatagtagcggcgaagtgttcctaactgagctccgggaagcaacctggtatgagttgcggatgcgcgcatgtaacagcgcgggatgtggtaatgaaaccgcccagttcgccacattggattatgatggaagcacaataccccctatcaagtccgctcagggagaaggcgatgatgtcaaaaagctgtttactattggctgcccagtcatcctggccaccctaggagtggctctgctcttcattgtgagaaagaaaagaaaggagaagagattgaaacgcctccgagacgctaaatccctggcagagatgcttatatcgaaaaataacaggtcttttgatactccagtaaagggccctccccaggggcctaggctacacattgacatccctagagtccaactgctgattgaggataaagaggggataaagcagctgggcgacgacaaggctacaatccccgtgactgatgccgagttcagccaggcagtgaatccacaatcgttttgcactggggtttctctccatcaccctaccctgatccagagtaccggacccctgatagacatgtccgatatccgacctgggacaaatcctgtgagtcgaaaaaacgttaagagcgctcactccacaagaaatcggtactctagccaatggaccctgaccaaatgtcaggccagcacaccagctagaacactgacgtccgactggagaacggttgggagtcagcacggggtaactgtcacggagtcagatagttattccgcttctctctcccaggatacggataagggtagaaacagtatggtctctaccgagagtgcctcctccacttatgaggagctggctcgggcttatgaacatgccaaactcgaagagcagctccagcacgccaaatttgaaataactgagtgtttcatcagcgattctagctcagaccaaatgaccactggcactaacgagaatgccgacagtatgacaagcatgagcacccccagtgaaccgggtatctgccgttttactgctagccccccaaagcctcaggatgccgatcgagggaaaaatgtcgcagtgccgataccacaccgggcaaataagtcagattactgcaaccttcccctgtatgcaaaaagcgaggccttttttagaaaggctgatggcagggaaccatgccccgtggttccgcctcgagaggcatcaatcaggaatctggcgcgtacctaccatacccaggcacgccacttaactctggacccagcctccaagtccctgggtcttcctcatcctggagctccagccgctgcaagcacagcaactctaccgcagaggacactggcgatgccagctccgccagctgggaccgcccctccagctccaggaccaactccagctgagccgcctactgcgccttccgccgcacccccagctcccagcactgagcccccaagagcaggaggccctcacacgaagatgggaggctctagggactctctacttgaaatgtcaacatcgggagtcggcagaagtcagaagcaaggtgccggtgcttacagtaagtcttatactctggtcta

SEQ ID NO: 221243 - DNA, 5462 bp, synthetic construct
  misc_feature 1..5462: note = Description of Artificial Sequence: Synthetic coding sequence
  source 1..5462: mol_type = other DNA
atgttaccatactgggccggtcacacagtggagttgccatgcactgcatctggctaccccatccccgctatacgttggttgaaggatggcaggcctttgcctgccgattctaggtggacgaagcggatcacaggcttgacgatcagcgacttgagaaccgaggattcagggacatatatttgtgaggtgacaaacacctttggctccgccgaggcaacagggatcctaatggttatagatccactgcatgttaccctcacccccaaaaagctgaagaccggcattggttctacagtgatactgagttgcgccctgaccggctcccccgagttcactattaggtggtatagaaacaccgaactggtcttacctgacgaggcaatttccatccgcggtctgagcaatgagaccttactgatcacatccgcccagaagtcgcattccggcgcttatcagtgctttgcaaccagaaaggcccagacagcccaggatttcgctatcatcgcactggaggacggtaccccccgtattgttagttccttcagcgagaaggtcgtgaatcctggcgagcagttttcactgatgtgcgccgctaaaggtgctcctccccctactgttacctgggcgctagatgacgagccaatcgtccgtgatggatcccaccgaactaatcagtacactatgagcgacggaactaccattagtcatatgaatgtaactgggccacaaattcgggacggaggtgtctaccggtgtaccgcaaggaatctagtcggcagcgcggaatatcaggcacggatcaatgtccgaggcccaccatccattcgcgctatgagaaatataacagctgtggctgggcgagacaccctgattaactgccgggtaattggttatccctattattccatcaaatggtacaaagacgctttactgctgcccgataatcatagacaagtggtttttgagaacggaaccctcaaactgactgatgtgcagaaaggcatggacgaaggcgaatacctgtgctcagtgctaatccagccgcagttatccatctcccagtctgtgcacgtcgcggtaaaggtgccaccattgatccaacctttcgagttccccccagcttccattggtcagctgttgtatatcccctgtgttgtgagtagcggcgatatgcccattcgcataacctggaggaaggatggtcaagttatcatcagcgggtctggggtaactatagagtccaaagagtttatgtcatcgctccaaatatcctctgtgtctctcaaacataacggcaactatacatgtattgcttccaatgctgccgctaccgtcagtcgagagagacagctgatcgttcgggtcccaccacgctttgtcgtgcaacccaataaccaggacggtatctacgggaaagcaggagtgctgaactgtagcgtggatggttatcctccccctaaagtcatgtggaaacatgccaaagggagtgggaacccccagcagtaccatccagtcccattgaccggtcgcattcagatactcccaaattcttccctgctgattagacacgtgctggaggaggacatcggctattacctatgccaggcttccaacggtgtcggtacagatatctcaaagtctatgttcttgaccgtgaagatcccggcaatgatcacaagccaccctaacacgaccattgcaatcaaaggtcacgctaaagagttgaactgtacagcacgtggggagaggccaatcattatacgctgggaaaagggggatactgtcattgaccctgatcgggtcatgaggtacgccatcgctacaaaagataacggcgacgaagtcgtttctaccctaaaattgaaaccggctgacaggggcgattccgtatttttcagttgccacgctatcaacagctacggagaagatcgcggtctgatccagctcacagttcaggagccgcctgatccaccggagctagaaattagggaggttaaggctcgctccatgaatctgcgctggacccaaagattcgatggcaactctattattacaggcttcgacattgaatacaagaacaagagcgacagttgggattttaaacagagcactcggaacattagcccgaccataaatcaagccaacattgtggatctgcatcctgcatctgtgtactccatacgtatgtacagcttcaataaaataggaagatccgagccttctaaggaactgactataagcaccgaagaggcagcccctgatggaccccctatggacgtcaccctgcagcccgtaacctctcagagtatacaggtgacctggaaggcacccaaaaaagaattgcaaaacggcgtgatacgcggataccagattggatatcgagagaactctccaggctcaaacggacagtatagcatcgtagagatgaaagctaccggcgacagcgaagtctacaccctggataatttaaaaaagtttgctcagtacggagtggtcgtgcaggcctttaatcgggcaggcacaggccctagctctagcgagatcaatgcaactactcttgaagacgttccgagccaaccaccagagaatgttagggctctgtccatcacgtctgatgttgcagtgatcagttggtcagagccccctcgatccaccttgaacggagtccttaagggatatagagtgatattctggagcctgtatgttgacggcgagtggggcgaaatgcaaaacattactaccactcgggagcgggtcgaactgcggggaatggagaagttcacaaattattccgtccaggtgcttgcctacactcaggcaggggacggagtgagatcttccgtgctctacatccagacaaaagaagatgtgcctgggccaccagccggaatcaaagccgtgccatctagcgcctcttctgtcgttgttagctggctgccccctacaaaaccgaacggtgttatccgaaagtacacaatcttctgttctagccctggaagtggacagcccgctccgagcgaatatgaaacgagtcccgaacaactgttctatcgcattgctcaccttaaccggggacagcagtatcttctgtgggtggccgctgttacgtcggccggtaggggaaattcatcggagaaagttaccattgagcccgctgggaaggcaccggcaaagattataagttttggcggtaccgtgaccaccccctggatgaaggacgtgaggttgccatgcaattcagtaggcgacccagcacccgctgtgaagtggactaaagacagcgaggacagtgccattccggtcagcatggacgggcaccgtctcattcacacaaacgggactttgctgctgagggcggtgaaagccgaggatagcggatactatacttgtaccgccacaaacaccggcggttttgataccatcatcgtgaatctcctcgtccaggtaccccctgatcaaccaaggttgactgtctcaaagacctcggcttcctcaatcactctcacctggatacctggagacaacggcggaagtagcatacgtggcttcgtgttgcagtactccgtagacaactcggaggagtggaaagatgtattcatttcctcttccgagcggtccttcaagttggattcccttaagtgcgggacgtggtataaagtcaaacttgcggctaagaactccgttggaagcggccgtatcagcgaaattatcgaggccaaaacgcacgggagagaaccttcttttagtaaggatcagcatttgtttacccacatcaacagcacacacgctagactgaaccttcagggatggaacaatggcggatgccctattacagctatcgtcttagaatatagaccaaaggggacttgggcctggcaaggactgagggcaaacagctctggagaagtcttcctgaccgagttgagggaagccacatggtatgaactgcggatgagagcatgcaatagtgccggatgtggcaacgagactgctcagtttgccacccttgactatgatggctccactatccctcctataaaatcagcacaaggggagggagatgacgttaagaagctgtttacaatcggctgcccggtaatcttggcaactctgggcgtggcgctcctttttatcgtgcgaaagaagaggaaagagaaaagactcaagcgactgagagacgcaaagtcactggctgagatgttgatcagcaagaacaataggtcctttgatacacccgtaaaaggcccacctcaaggcccaaggctgcacattgacatccctcgcgtgcagttgctcatcgaagataaggaaggcattaagcagttgggcgacgataaggctacaattccggtgaccgacgcggaattttctcaagccgttaacccgcagtcattctgcacaggagtgagcctccaccatcctactctgatccagagtactggccctctgatcgacatgagcgacattaggcccggtacaaaccccgtttctagaaaaaacgtgaagtcggcccactcaacgaggaatcgatattcaagccaatggaccttgaccaaatgccaagcttcaacgcctgccagaactctgacctctgattggagaacagtcgggagccagcatggggtgacagttaccgaatctgacagctatagcgccagtctgtcccaggatacagataagggcagaaattcaatggtgtcaacggaatctgcctcaagtacgtacgaggagctagccagagcctacgaacatgcaaaacttgaagaacagcttcagcatgccaagttcgagattaccgaatgctttattagtgactcttccagcgaccaaatgaccacaggaacaaatgaaaacgcagatagcatgacttccatgtcaactccctccgagcccggtatctgtaggtttaccgcctccccccctaaaccacaggacgcggatagaggaaaaaatgtcgccgtcccgatcccccatagggccaacaagagtgattactgcaacctgcctctatacgcaaagtcagaggcattctttagaaaggccgacgggagagaaccttgtcctgtcgtcccgccaagggaggcctcgattaggaacctggcgcgaacctatcatacacaggcgagacatctaaccctggaccctgcctccaaatcactgggcctccctcatcccggagcaccggctgccgctagtaccgcaactctgccacagaggactctagctatgcctgcaccccctgccggaacagctccgccagcaccaggacctacccctgccgaaccccctaccgccccttctgcagcacccccagcgcctagtacagagccaccccgtgctggaggaccccataccaagatgggcggatcccgagattcactgctggagatgtcaactagtggggttggcagaagccaaaagcagggtgcaggcgcatattccaagtcctacacacttgtcta

SEQ ID NO: 221244 - DNA, 762 bp, synthetic construct
  misc_feature 1..762: note = Description of Artificial Sequence: Synthetic coding sequence
  source 1..762: mol_type = other DNA
atggagggaaccgtgaacctgcagctctccgctaaaagcgtcggtgttttcgaagcgttttacaacagtgtgaagccaatacaaattatcaactctacaatcgagatggtcaagcccggaaaattcccatccggtaaaactgaaatcccttttgagtttcctcttcacctaaagggcaacaaggtgctgtatgagacatatcatggagtttttgttaacatccagtacacactgaggtgcgacatgaagcgctcgcttttggccaaggacttgacaaagacctgcgagttcatcgtgcattccgcaccgcagaaaggcaaatttacaccctctcccgtcgactttaccatcacccccgagacgcttcagaacgtgaaggagcgagctctcttacctaagttcctgctgcggaccagccaactgaataagttatgccaccatgccgctaccaacggcagggctggcggtggggaactgggctctaggcaccagaagcgtggggcagcggctggagcaaggggagatgtgagggtgtgccgttatgccagagacgcaactgagattcagaacatacagattgccgatggggatgtttgtcgaggcctctctgtgcctatctacatggtgtttcctcggctgtttacctgccccactctggagaccaccaacttcaaggtggagttcgaagttaacatagtggtgttgctccacccggatcacctcataactgaaaacttccccttgaagctctgccgcatttag

SEQ ID NO: 221245 - DNA, 894 bp, synthetic construct
  misc_feature 1..894: note = Description of Artificial Sequence: Synthetic coding sequence
  source 1..894: mol_type = other DNA
atgggaacagccctcgatataaaaataaaaagggctaacaaggtgtaccatgcaggcgaggtcttgagtggggtggtcgtgattagctccaaggacagcgttcagcaccagggggtttccctcaccatggaaggaacagtcaatctacagctctcggccaaaagtgtgggcgtgtttgaagctttttataacagcgtcaaaccaatccagatcatcaacagcaccatcgaaatggtaaagcccggaaagttccctagcggtaagaccgagattccttttgaatttccactgcacttgaagggcaataaagtcctttacgagacttatcatggcgtgtttgtcaatatccagtacacgctgagatgtgacatgaagcggtcgcttctagccaaggatctaactaagacctgtgagtttattgttcattccgctccccagaaaggcaaatttaccccgtcgcctgtggattttactataacccccgaaactcttcagaacgttaaggagcgggcattgctgcctaaatttcttcttagggggcacctaaatagtacaaattgtgtcattacccagcctctaacgggcgagctcgtggtggaatcttctgaagctgcaatccggtccgtagaactacaactagtgagagttgaaacatgtggctgcgctgaggggtacgccagagatgccacggagatacagaacatccagatcgctgacggcgatgtatgccggggtcttagtgtgcccatctatatggtgtttcctcgtctgtttacttgtccaactctcgaaacaacgaatttcaaagtcgaattcgaagtgaatattgtggtgctcctacatcccgatcacttaattacagagaacttccctctcaagctttgcaggatctag

SEQ ID NO: 221246 - DNA, 519 bp, synthetic construct
  misc_feature 1..519: note = Description of Artificial Sequence: Synthetic coding sequence
  source 1..519: mol_type = other DNA
atggggacagcgctcgatatcaaaattaaacgagcaaacaaggtttaccatgctggaccccagaagggaaagttcaccccctcccccgtggatttcaccattacccccgagacactgcagaatgtgaaagaacgggcattactgccgaaattccttctcagggggcacctgaactcaactaattgcgttatcacacagccgctgaccggagagttagtcgtggagagctccgaagccgctatacgttctgtcgaactgcaattggtccgggtcgagacatgcggctgtgccgaaggctatgcgcgagacgccactgagatccagaatattcagattgccgatggcgacgtgtgtcgcggtctgagtgtgcccatttatatggttttccccaggctgttcacctgcccaaccctggaaaccactaatttcaaggtggagttcgaggtgaacatcgtcgtgctgctgcatcctgatcaccttattacagagaacttcccacttaagctgtgccgtatttag

SEQ ID NO: 221247 - DNA, 813 bp, synthetic construct
  misc_feature 1..813: note = Description of Artificial Sequence: Synthetic coding sequence
  source 1..813: mol_type = other DNA
atgggtacagccctggacatcaaaatcaagcgggcaaataaggtgtaccacgcaggcgaagtactgagcggcgtggttgtaataagttcaaaagacagtgtccaacaccagggcgtttcccttactatggagggaactgtcaacctgcagttgagtgccaagtcagtgggcgtgttcgaggctttctataacagtgtgaagcccatacagatcataaatagcacgattgaaatggttaagcccggaaaattcccaagtggtaaaacggaaattccatttgagttcccccttcaccttaaggggaataaagtgctctatgagacataccacggggtgttcgtcaatatccagccccagaagggaaagttcacccctagtcctgtggactttaccattacacccgagacattacagaatgtgaaggaaagggctcttctgcccaaattcctgttgaggggacatcttaatagcacaaactgtgtgatcacgcagccactcaccggggaattagtcgttgagagctcggaggctgctattcggagcgtggagttgcagctggtgcgagtggaaacctgcggctgtgcagagggctacgctcgggatgctactgagattcaaaacatccagatcgcagatggcgacgtctgtcgtggccttagcgtgcctatttacatggttttccccaggctctttacatgtcccacactggaaaccaccaacttcaaggtcgagttcgaggttaatattgtggtgttactgcatccggatcatctgattaccgaaaactttccactgaaattatgccgtatctag

SEQ ID NO: 221248 - DNA, 663 bp, synthetic construct
  misc_feature 1..663: note = Description of Artificial Sequence: Synthetic coding sequence
  source 1..663: mol_type = other DNA
atgggaacagccctggatatcaagatcaagagggcaaataaggtgtatcacgccggtgaggtgctgagtggggtggtggtgataagttccaaagactcagtgcaacaccagggggtcagcctgactatggaaggtaccgtgaacctgcagctgtcggctaagtctgttggagtttttgaagccttttataacagcgtgaagccccagaaagggaagttcacccctagtcccgtcgattttaccattactccagaaacactgcagaacgtgaaggaacgggctctgctccccaagtttctcctcagaggacacttgaactccactaattgtgtgattacacagcccctaacaggtgagctcgtggtagaatcatccgaggctgcaatccgatctgtggagcttcagttggtgcgggtggaaacatgtggctgtgcggaaggctatgctagagatgctaccgaaattcagaatatccaaattgccgatggcgacgtgtgtcgagggctgagtgtacctatctatatggtatttccgagactgttcacgtgccccacattggagaccacaaattttaaggtcgagttcgaggtcaacattgtggtcttgctccacccagatcatctcatcactgagaattttcccctgaaattgtgtaggatctag

SEQ ID NO: 221249 - DNA, 357 bp, synthetic construct
  misc_feature 1..357: note = Description of Artificial Sequence: Synthetic coding sequence
  source 1..357: mol_type = other DNA
atgtcgctaattattctaacgcgtgatgacgaaccgcgaatttttacccccgattccgatgcagctagccccgcactacactccacctcccctctgccagatcccgcttcagctagccctctgcaccgcgaggagaagatcctccctaaagtgtgcaacattgtttcatgcctcagtttttctcttcccgcatctccgacagatagcggactggctagtcccactattattactcgggaaggccagcagttctgggccaaatgtctgatctggaagtaccaattatacctgcacggacttcataagaagtctgatggccgtagagacaagcagatcagcgcttccccttccacgtag

SEQ ID NO: 221250 - DNA, 573 bp, synthetic construct
  misc_feature 1..573: note = Description of Artificial Sequence: Synthetic coding sequence
  source 1..573: mol_type = other DNA
atggagcccgaggctgcagctggtgctcggaaggctcgaggacgcggatgccactgtccaggcgatgccccatggagacctccgcctcctcgtgggccagagtccccagccccttggcggccttggatccagacccccggagatgctgagctgactcggaccggtaggccattagaacctagggccgatcagcacacattcggctccaagggcgctttcggatttcagcaccccgtccgggtgtatctccctatgagcaagaggcaggagtatctacgctctagcggagagcaggttctggcctctttcccagtgcaagccaccatcgatttttacgatgatgaatctacagagtctgcatcagaagccgaggagcctgaagaaggcccacccccactacacctcttaccacaggaggtcgggggacgacaggagaatgggcctggaggtaaaggacgtgaccagggcatcaaccaggggcaaagatcaagcgggggaggggaccactggggcgaaggccctctcccccagggagtgtcttccagaggaggaaaatgcagtagcagtaaatag

SEQ ID NO: 221251 - DNA, 294 bp, synthetic construct
  misc_feature 1..294: note = Description of Artificial Sequence: Synthetic coding sequence
  source 1..294: mol_type = other DNA
atgaaggaacctggaccaaacttcgttactgtgagaaaaggcctgcactcattcaagatggctttcgtgaagcatctgcttctgtttctgtctccccgtctggagtgctcaggttccattactgatcattgttccctacatctgcctgtgcaggaaattttaatgtctcagcctcccgagcagctgggcctgcagaccaacctaggcaaccaggaatccagcgggatgatgaaactctttatgcccaggcctaaagtactggcgcagtacgaatcaattcaatttatgccctag

SEQ ID NO: 221252 - DNA, 276 bp, synthetic construct
  misc_feature 1..276: note = Description of Artificial Sequence: Synthetic coding sequence
  source 1..276: mol_type = other DNA
atgaaagagccgggtccaaattttgtaacggtgagaaagggcttacactcattcaagatggcgttcgttaagcatcttctgctggagtgctcggggtctatcaccgatcactgctcactgcacctccctgttcaggaaattctcatgtcccagcctcccgagcaactgggcttgcagactaatctcggcaatcaagagtcttccgggatgatgaagttgtttatgccccgtcctaaagtgctcgcacagtacgagagcatccaatttatgccctag

SEQ ID NO: 221253 - DNA, 531 bp, synthetic construct
  misc_feature 1..531: note = Description of Artificial Sequence: Synthetic coding sequence
  source 1..531: mol_type = other DNA
atggcctcatctagcgggaatgatgatgatttgaccattccacgggcagcaatcaacaaaatgattaaggagacacttccaaacgttcgtgtagcaaacgacgctcgggaactcgttgtcaactgttgtacagagttcattcacttgatctcaagcgaggcaaacgagatctgtaacaaatctgagaagaaaacaataagcccagagcatgtgatccaggctctcgaaagcttggggttcggctcatacatttccgaagtgaaggaggtgctgcaggaatgcaagacggtggcgctgaagcggagaaaagccagcagtaggctggagaacctaggaattccagaagaggaactactccgacagcaacaggagcttttcgctaaggccaggcaacaacaggccgagctcgcccagcaggaatggctccagatgcagcaggccgcacagcaggcacagctggcagcggcatccgcaagtgcttccaaccaggctggaagttcacaggatgaagaggacgacgacgacatttag

SEQ ID NO: 221254 - DNA, 531 bp, synthetic construct
  misc_feature 1..531: note = Description of Artificial Sequence: Synthetic coding sequence
  source 1..531: mol_type = other DNA
atggcatctagttctgggaatgacgatgatttaaccatccctcgcgcagccataaacaaaatgataaaagaaacgctcccgaacgtcagagtggcaaatgatgccagagagctggtggttaattgttgtacagaattcattcacctcatttccagcgaggctaatgagatctgcaacaaaagtgagaaaaaaaccataagccctgagcatgtgatccaggcgctggaatctttaggtttcgggtcttacatctcggaagtgaaggaagttctccaagaatgcaagacagtggcgttaaaaagaaggaaagcatcgtcgaggcttgagaaccttggtattccagaagaagagctgcttcgccaacaacaagaactgttcgccaaggcccgtcagcaacaggctgagctcgcgcagcaggagtggctacagatgcagcaggccgctcagcaggcgcagctggctgccgcaagcgctagcgcgtctaatcaagccggtagctctcaggatgaagaagatgacgacgacatatag

SEQ ID NO: 221255 - DNA, 1470 bp, synthetic construct
  misc_feature 1..1470: note = Description of Artificial Sequence: Synthetic coding sequence
  source 1..1470: mol_type = other DNA
atggaaagcatgttcagctcccctgccgaggcagctctccaaagggaaactggggtacctggactgttgacaccactgcctgacctggatggggtgtacgagctagagcgcgtggcaggattcgtgagagacttaggctgtgagagggtggccctccagttccccgaccagctgctcggagatgccgtggctgtggccgctcgtttggaggaaactacaggttcaaagatgtttattcttggcgatactgcttacggctcctgctgcgtggacgttctaggagccgagcaggctggggcacaggctctgatccatttcggccctgcctgcctgagccctcctgcacgcccactcccagttgcctttgtactgcgccaaaggagtgtggcgttggagctgtgcgttaaggcctttgaggcacagaacccagatccgaaagcccctgtggtgctcctcagtgagcccgcttgtgcgcacgctcttgaagccttggccaccctgttgcgccctaggtacttagacctcctcgtttccagtcccgcttttccccagcctgtcggcagtctctcccccgagcccatgcccctggaaagattcggtagaagatttccccttgccccaggtcgcaggttagaggaatatggagccttttatgtgggagggtccaaggccagcccagatcccgatctcgatcctgatttgagcagattgttgctgggctgggcgcctggccagcctttttcaagctgttgcccagataccggcaaaactcaggatgagggtgccagggctgggcgactgcgggctcgacggagatacctggtcgaacgggctagggacgctagggtggttggcttgctggctggaacgctaggcgtggcgcagcatcgcgaggctctagcccacctgcgtaacctcactcaggccgcagggaagcgcagctacgtgctcgccctcgggaggcccacccccgctaaactagctaattttcctgaagtggatgtgttcgttttgttggcctgccctctgggagctctcgcaccccagctgtctgggtctttctttcagcccattttggctccgtgtgagcttgaagcggcttgtaatcctgcatggccacctcctggtctggctcctcatctgacacactatgccgacctcctcccgggatcacccttccacgtggcccttccgccacccgaatctgagctctgggaaaccccagatgtgtcactgatcacgggcgacctgcgtccccctcccgcatggaagagttctaatgaccatgggtccctggcgctgactccccgaccacagctggagctagctgagtcctcccctgctgcttctttcctgtctagtcgatcttggcagggactagaaccgaggcttggtcagacacccgtgactgaggcagtatccggaagaagaggaatagcaattgcctacgaagacgaggggagtggctag

SEQ ID NO: 221256 - DNA, 786 bp, synthetic construct
  misc_feature 1..786: note = Description of Artificial Sequence: Synthetic coding sequence
  source 1..786: mol_type = other DNA
atggagtccatgttctctagtcccgctgaggccgcattacagagagagactggagtcccagggcttttaactcctttgcccgatctggacggcgtctacgagctggagagggtagcagggtttgtgagggatctcgggtgtgaaagggtcgccctgcaatttccagaccagctgctgggagacgccgtggccgtggctgcccgactcgaagagaccaccggtagcaagatgttcatcctaggcgatacggcatatggctcttgttgcgtggacgtattgggggctgaacaagccggagcacaagccttgatccattttggccctgcttgcttgagccctcccgcacggccactgcccgttgcattcgtcctgcggcagaggtcggtcgcacttgagctctgcgttaaggcgtttgaggctcaaaatcccgacccaaaagcacctgtggtcctgctgagcgagcccgcttgcgctcacgccttaggcagtcccttccacgtagctctgcctcccccagaatcggaattgtgggagacccccgatgtatcccttattaccggcgacctaagacccccaccggcttggaagtctagtaacgaccatggctcgctggcattgactcctagaccccagcttgagctggctgagagctctcctgctgcctcttttctctcttctagaagttggcagggcctcgagccacgcctcggccagactccagttactgaggccgtatctgggcgtaggggcattgccattgcctacgaggacgaggggtctggctag

SEQ ID NO: 221257 - DNA, 1065 bp, synthetic construct
  misc_feature 1..1065: note = Description of Artificial Sequence: Synthetic coding sequence
  source 1..1065: mol_type = other DNA
atgctgtggctgtggctccatgattggcggagacgccaaggtcaacgttgctccttctgggtaactcaacctactgccgaagccctagccacactactgaggccgaggtatctggaccttctggtttcgtccccggctttcccccagccggtgggctcgttgtctccagagccgatgcccctggagcggttcgggagacgatttcctctagccccagggaggagactggaggagtacggggcattctatgtgggcggatctaaagcctctccagaccccgacctggaccctgatctctcccggctgttgttgggctgggcccctggccagccgttcagctcatgctgtccggataccgggaagacacaggacgaaggcgctagagcagggagacttcgtgcaagaaggaggtatctcgtcgagcgcgctcgggatgcacgggtggtggggctgctggcaggaacactgggagtcgcccaacaccgggaagcactagcacacctccgcaacttgactcaagctgctggaaagcgctcttacgttctggccctgggaaggccaacacctgccaagcttgcaaatttccctgaggtcgacgttttcgttctgctggcttgccccttaggcgcactcgcgcctcaattgtctggcagctttttccagcccattttagcaccatgcgagctcgaggcggcatgtaatcccgcatggccccctccaggtctggccccacatctaacccattacgcagatctgcttcccggttcccccttccacgttgccttgcctccaccagagagtgaactatgggagacacctgacgttagtcttatcaccggcgacttgagacctcctcccgcatggaaatccagcaatgatcatggctctctagcacttacaccacgcccacagttagagctggccgaatcaagccccgctgccagttttctgtcatcaagatcctggcagggattggaaccacgcctcggccagacacccgtgacagaagctgtgagtggcagaaggggcattgccatagcctatgaagacgagggcagcggctag

SEQ ID NO: 221258 - DNA, 174 bp, synthetic construct
  misc_feature 1..174: note = Description of Artificial Sequence: Synthetic coding sequence
  source 1..174: mol_type = other DNA
atggctgtcttccatgatgaggtggagatagaggacttccagtacgatgaagactccgaaacgtatttttatccatgcccgtgcggcgacaacttttccattacgaaggatcagtttgtctgcggtgagacagtcccagccccttctgcaaacaaggagttggtgaagtgttag

SEQ ID NO: 221259 - DNA, 249 bp, synthetic construct
  misc_feature 1..249: note = Description of Artificial Sequence: Synthetic coding sequence
  source 1..249: mol_type = other DNA
atggccgtgttccacgacgaggtcgagatcgaagattttcaatacgatgaagacagcgagacatacttctatccatgcccttgcggcgacaatttcagtatcactaaagaggatctcgagaacggcgaggacgtagctacttgcccatcgtgttccctgattatcaaggttatctacgataaagaccaattcgtgtgcggcgaaacagttcctgcacccagcgctaataaggagctcgtgaagtgctag

SEQ ID NO: 221260 - DNA, 855 bp, synthetic construct
  misc_feature 1..855: note = Description of Artificial Sequence: Synthetic coding sequence
  source 1..855: mol_type = other DNA
atgttgtatttgatcggactaggtctgggcgacgcaaaggacataaccgtgaagggtctggaagttgtgcgcagatgttctagggtctatctggaagcatatacttccgtgctgactgtggggaaggaagctctcgaggagttctacggtaggaaacttgtggtcgccgacagagaggaagttgagcaggaggctgacaatatcttaaaggatgctgacatctcggatgtggcttttttggtcgtgggagacccctttggagccactacccacagcgacttagtgctaagagctacaaaactgggcattccttaccgagtgatacacaatgcttccatcatgaacgcagtcggctgttgtggtctgcagctctacaaattcggcgagaccgtctccattgtgttttggaccgacacctggcgtcctgagtctttcttcgataaggtcaaaaaaaaccggcagaacggcatgcacacattgtgtttactggacatcaaggtcaaggaacagtccctggaaaacctcatcaaaggccgaaagatatatgaaccgcctcgatacatgtctgtgaaccaggccgctcagcagctcctcgagattgtgcagaaccagcgcattcgcggagaagaaccagtgacagaggagacactgtgtgttgggcttgcacgtgtgggcgctgacgaccagaaaatcgccgctgggacacttcggcaaatgtgcactgtcgatttaggcgagcctttacacagtctcataatcaccggaggttcaattcacccaatggagatggagatgctctccctcttttcgataccagagaattcttcagagtctcaatctattaatggactttag

SEQ ID NO: 221261 - DNA, 858 bp, synthetic construct
  misc_feature 1..858: note = Description of Artificial Sequence: Synthetic coding sequence
  source 1..858: mol_type = other DNA
atgctgtatctgattggccttggattgggcgatgcaaaggatattactgtcaagggcctcgaggtagtaaggagatgcagtcgggtgtatttggaggcatacacctccgtccttaccgtcgggaaagaggctctggaggaattctatggaagaaagttagttgtcgcagatcgggaagaggtggagcaagaagccgacaacattcttaaggacgctgacataagtgacgtcgcttttttggtcgtcggcgacccatttggggctacaacccactccgacctggtattaagggccaccaagttgggcataccatatcgtgtaatccacaatgctagcatcatgaatgctgtgggctgttgtggactgcagctttacaaattcggcgagactgtgtccattgtgttctggaccgatacttggcgccctgagtccttttttgataaggtgaaaaagaaccggcagaacgggatgcatactctgtgcctcctcgacattaaggtgaaggaacaatctctggaaaacttaataaagggcaggaaaatttacgaacccccaaggtatatgagcgtgaatcaggccgctcaacaattgctagaaattgtacaaaatcagaggatcagaggcgaagaacctgccgtgacagaggaaaccctttgcgtgggcctcgccagggttggcgctgatgatcaaaaaatcgcagctggtactctgagacagatgtgcaccgtggatctcggcgagccactgcactcgttgatcattaccggtgggagcattcatcctatggagatggagatgttgtctcttttttccatacccgagaattcatccgaatcacagtctattaacggcctttag

SEQ ID NO: 221262 - DNA, 705 bp, synthetic construct
  misc_feature 1..705: note = Description of Artificial Sequence: Synthetic coding sequence
  source 1..705: mol_type = other DNA
atgctgtatctcatcggtctaggactcggcgatgccaaggacattactgtaaagggtctggaagttgttcgccgttgctctagggtgtaccttgaagcctacacctcggtactgacagtcggtaaggaggctttggaggagttctatggcagaaaactcgtcgtggccgatagggaggaggtcgagcaggaggcagacaatatcctgaaagatgccgacatctctgacgtcgctttcctggtcgtgggcgaccccactgatacctggaggcccgagtccttcttcgataaagtgaaaaagaaccgccagaacggcatgcacacgttgtgtcttctggacattaaagtcaaggagcaaagtttggaaaatctgatcaaaggaagaaagatatacgaacctccaaggtatatgtccgtgaaccaagccgcacaacagctgttggagatcgtgcagaaccaacgaatcaggggagaggagcccgcagtgacagaggagaccctctgcgtgggactggccagggtcggagccgatgatcaaaagatagctgccggtaccctgcgacagatgtgtacagtggatttgggcgagcctttacacagcctgattatcacagggggttctatacaccctatggagatggagatgctctcattgttcagcattcctgagaattcctcagagagccaaagcataaatggactgtag

SEQ ID NO: 221263 - DNA, 141 bp, synthetic construct
  misc_feature 1..141: note = Description of Artificial Sequence: Synthetic coding sequence
  source 1..141: mol_type = other DNA
atgtgcacagttgacttgggcgaaccgctccatagcctgatcatcacagggggaagtatacatcccatggagatggaaatgctctcattgttctccatcccagagaattcctccgaatcacagtccatcaacggactgtag

SEQ ID NO: 221264 - DNA, 855 bp, synthetic construct
  misc_feature 1..855: note = Description of Artificial Sequence: Synthetic coding sequence
  source 1..855: mol_type = other DNA
atgctgtaccttattggattgggacttggcgacgctaaagatattacagtgaagggcctagaagtcgtccgccgttgtagccgagtctacctggaagcttacacaagcgtgctgacagtaggaaaagaagcactggaggagttctacggtagaaaactcgttgtggcggaccgagaagaagtagagcaagaggctgacaatattctcaaggatgccgatatatcagacgtcgcttttctggtggtgggcgaccctttcggagctactacccattcggaccttgtgttgcgtgcaaccaagctgggaattccttatagagtgatacataatgccagcattatgaacgcagtgggatgttgcggtcttcagtacatctctctggagagacaatttctgttgttttttggtcagacacttggccctgagagttttttcgataaggttaagaagaatagacaaaatggcatgcacaccctgtgtctgctcgacattaaagtgaaagaacagagcttggaaaaccttataaaaggacggaaaatttatgaaccccctagatacatgtccgtgaaccaggcggcacaacagctgctggagattgttcaaaaccaacgcatacgaggcgaggagcccgcagtcacggaggagaccctgtgtgtcgggctggcacgcgtcggcgcagacgaccagaagattgccgctggaacgctcaggcagatgtgtacggttgacctcggcgagccactgcacagcctgatcatcactggagggagcattcatcctatggaaatggagatgttgagtctgttctctattcctgagaactccagcgaatcccagtctattaacggactgtag

SEQ ID NO: 221265 - DNA, 858 bp, synthetic construct
  misc_feature 1..858: note = Description of Artificial Sequence: Synthetic coding sequence
  source 1..858: mol_type = other DNA
atgctgtatctgatcgggcttggccttggagacgccaaagatattacagtcaaaggcctagaggttgtgagacgttgctcccgcgtgtatttagaagcttacaccagtgtactcaccgtcgggaaagaggccttggaagaattctatgggaggaaactcgtagttgccgatagggaagaagtggagcaggaggccgacaatatacttaaggatgcggatatctctgatgttgcctttctggtggtcggggatccatttggcgcaaccacacatagtgacctggtgctgagggctactaagctgggtattccatatcgggttatccataacgccagcatcatgaacgctgtagggtgctgtggccttcagctttataagtttggcgaaaccgtgagcattgtgttttggacagacacgtggcgtccggaaagcttttttgataaggtcaaaaaaaatcgccagaatgggatgcacacgctctgtctgttggatattaaggtgaaagagcagagtctggaaaacctaattaagggtagaaagatatatgagcctcctcggtatatgtccgttaatcaagcggctcagcagctactggagattgtgcagaaccagagaatcaggggggaggagccggctgtgaccgaagaaactctgtgcgtgggactggcccgagttggcgctgacgaccaaaaaattgctgcagggaccctgcgccagatgtgtacggtcgacctaggggagcctctccacagtctcatcatcacaggcggatccatccatcccatggagatggagatgctttcactgttttctattccggagaactcttctgagagtcagagcatcaatggtctgtag

SEQ ID NO: 221266 - DNA, 2028 bp, synthetic construct
  misc_feature 1..2028: note = Description of Artificial Sequence: Synthetic coding sequence
  source 1..2028: mol_type = other DNA
atggagggacggccaccaccggaggggagaccccctcctagaccacgcactggcagagctcctcgcggtcgcagaagggctgtattcgccgctgtgcttcattggagccacattacccacttattcgaaaacgatagacacttctcccacctgtcgacactggaacgtgagatggctttccgaacagagatgggcctgtactacagctacttcaagacgatcgtggaggcaccatctttcttgaatggggtgtggatgatcatgaacgataagctgacggaataccctcttgtgatcaataccctcaaacgctttaacctgtatcccgaggtgatactagcctcctggtataggatctacaccaagattatggacttgattgggattcagactaagatatgctggaccgtgactcgtggtgagggcttgtcgcccatcgagtcgtgtgaggggctcggagaccctgcatgtttctatgtagcggtcatctttatacttaacgggcttatgatggcactgttcttcatctatggaacctatttaagcggatctcgtctgggaggacttgtcacagtcttatgcttttttttcaatcatggcgaatgtactcgggtgatgtggacccctccactcagagagtctttttcttaccccttcctggtgcttcagatgctgttggttacacacatccttcgcgcaactaagctgtataggggctccctgatcgccctgtgtatcagcaatgtcttcttcatgctgccctggcagtttgcacagtttgtgctgctcacacaaatagcaagtctgttcgccgtgtacgtggtgggctatatcgatatttgcaagcttcgcaagatcatctacatacatatgatcagcctggcactctgcttcgtcctgatgtttggtaactctatgctattgacctcctattacgcatcgtccctggtgataatttgggggatactggctatgaaaccccacttcctgaaaatcaacgtaagcgagctatccctgtgggtgattcagggttgtttctggttgttcggcacagttatactgaaatacctgacatctaagatatttggcattgcagatgacgcccatattggtaacctgctaactagtaagttctttagttacaaggatttcgacacccttctatatacatgtgcagccgaattcgactttatggagaaggagaccccgctacggtatacaaagaccctgctgctgcctgttgtgctggtcgttttcgtcgcgattgtgaggaagattattagcgacatgtggggggttctggctaagcagcagacgcacgtcaggaagcaccagttcgatcatggggagttagtttaccacgcgctgcagctgcttgcatacactgctttgggtatcttaatcatgaggttaaagctgttcttaacccctcatatgtgtgtgatggccagcctgatttgcagcagacaactttttggctggctcttttgtaaggtgcaccctggggctatcgtttttgcaattctcgctgccatgtctatccaggggtctgctaacctccaaacccaatggaatatcgtgggtgagttttccaacctaccacaggaagagttgatcgagtggataaagtacagcactaagcctgatgcagttttcgctggcgctatgcctaccatggcgtccgtgaaactgtccgctcttaggccaattgtgaaccatccgcactacgaggatgccggtctgcgggcacggacaaagattgtatatagtatgtactcaagaaaagccgcagaggaggtgaaaagggaactcataaagctcaaggtcaattattacattctggaagaaagctggtgcgtacgcagaagcaagcccggatgtagcatgccagagatctgggatgtggaggatcccgctaatgccggaaaaacaccgctgtgtaacctcctcgtaaaggacagcaaaccccactttacaaccgtattccagaactcagtttacaaggtgctggaagtcgtaaaggagtag

SEQ ID NO: 221267 - DNA, 258 bp, synthetic construct
  misc_feature 1..258: note = Description of Artificial Sequence: Synthetic coding sequence
  source 1..258: mol_type = other DNA
atgtactcgcggaaagcagccgaggaggtgaaacgcgaactgatcaaactgaaggttaattattacatccttgaagaatcatggtgtgtgagacgaagtaaaccaggatgctctatgcccgagatatgggatgtggaggaccctgctaatgcaggtaaaacacccctctgcaacttactggttaaggattctaagccccactttaccacggtgtttcagaattctgtgtacaaggtccttgaagtagtgaaggaatag

SEQ ID NO: 221268 - DNA, 2277 bp, synthetic construct
  misc_feature 1..2277: note = Description of Artificial Sequence: Synthetic coding sequence
  source 1..2277: mol_type = other DNA
atgaggaagcaaggcgtctccagcaaacgtctccagtcatctggacgcagtcaatctaagggaagaaggggtgcctcactagccagggagcccgaggtggaggaagaaatggaaaaaagtgccttgggcggtggaaaactgcccagaggctcttggagaagttctcccggtcgcatccagtctctaaaagagagaaagggtcttgaactggaggtggtggctaagacattccttctgggaccatttcagtttgtgcgtaactccttggcacagttacgggagaaagtccaggagcttcaggcaagaagattctcatctaggacaacattggggatcgccgtttttgtcgcaattctccactggctgcacctggtcactctgttcgagaacgaccggcatttttcacaccttagcagcctggagcgagagatgacattcagaactgagatgggactttactacagttacttcaagacaattatcgaagccccatcctttcttgaaggactgtggatgataatgaatgatcgattgacagagtacccactgatcattaatgcgatcaagagattccatctgtaccctgaggtgattattgcttcgtggtattgcaccttcatgggtatcatgaatcttttcgggctggagacgaagacctgctggaacgtgacaagaatagagcccctgaatgaggtgcagagttgtgaaggactgggggacccggcatgcttttacgtgggtgtcatattcatcttgaacggcttaatgatgggtctgttttttatgtacggtgcatatctgagtgggacgcaactgggagggctaatcacggtcctgtgcttcttctttaatcacggcgaagctactagagtgatgtggacacctccgctgcgtgagtctttctcctatccttttctcgttctgcagatgtgcattctgacattaattctgagaacctcgtcaaacgaccggaggcctttcatcgctctgtgcttgtctaacgtggccttcatgctgccgtggcagttcgcgcaattcattttgttcacccagatagcctccctgtttcctatgtacgtggttggttatatagagccctctaagttccagaaaattatctacatgaacatgatctcagtgaccctgtcattcatactgatgttcggtaactctatgtacctgagtagctattactccagcagcttactcatgacgtgggctatcatactcaagcgtaacgaaatccaaaaactgggtgtttccaaactaaatttttggctgatccaggggtctgcctggtggtgtggcactatcatcctcaaattcttgaccagcaagatattaggggtgtctgatcacatccgtctgtcagaccttatagccgctagaatcctgcgttacaccgactttgacactctgatctatacctgcgctccggaatttgatttcatggaaaaggctacccccttacgctacacgaaaaccctgctcctccccgtagtgatggtgattacttgttttatcttcaaaaagacggtacgagatattagctatgtactggccaccaacatttacctgaggaagcagttgcttgagcactccgaactggcttttcatacattgcagctgctggttttcacagctttagccatcctgatcatgagactgaagatgtttctgaccccccacatgtgtgttatggcttccctcatctgttctaggcagctgtttggatggttgttccgcagagtgcgctttgaaaaggtaatcttcgggattctgacggtgatgagtatccagggttatgctaacctgcgtaaccagtggtctattattggcgaattcaacaatttaccccaggaagagctgctacagtggatcaagtactctactacatccgacgctgtctttgcgggagcgatgccaaccatggcctctataaaactgagcacactccatcctatagtgaaccatccccactacgaggatgcagatcttagagccaggacaaagatcgtttattctacctactctaggaagagcgccaaggaggtgcgggacaagctcttggagcttcatgtgaactactacgtccttgaggaggcctggtgtgtagtgaggaccaagccaggctgcagcatgttggaaatctgggatgtggaggatccatctaacgctgctaaccccccactgtgttcggtgctactcgaggacgcccgtccctacttcacaaccgtgttccaaaatagcgtgtatcgcgtattaaaggtcaactag

SEQ ID NO: 221269 - DNA, 618 bp, synthetic construct
  misc_feature 1..618: note = Description of Artificial Sequence: Synthetic coding sequence
  source 1..618: mol_type = other DNA
atgagactcaagatgttcctgactccccacatgtgcgtgatggcatcactgatttgttcacggcagctcttcggatggctgttccgtagagttaggttcgaaaaggttatctttggcatattgacagtaatgtccatccagggctacgcaaatctgcgcaatcaatggtcgataatcggcgaattcaataatttaccccaggaggagctgctacaatggataaaatactccaccacttcagacgcagtcttcgcaggtgcaatgccaacgatggccagtatcaagctgtccactctgcatcctattgtcaaccatccacactacgaggatgctgacctgcgcgcacgcactaaaattgtgtacagtacctactcacggaagtcagctaaggaagtgcgagataagctgctcgaactgcatgtgaactattacgtcctggaggaggcatggtgtgtagtgagaaccaagcccggatgttccatgctggaaatttgggacgtggaggatccttctaatgcagcaaacccccctctctgttcagtcttattggaagacgctcgcccttacttcacaactgtttttcagaattctgtgtatcgagttctcaaagtgaactag

SEQ ID NO: 221270 - DNA, 273 bp, synthetic construct
  misc_feature 1..273: note = Description of Artificial Sequence: Synthetic coding sequence
  source 1..273: mol_type = other DNA
atgcgcaagcagggggtgtccagcaagagattgcagtctagtgggcgttctcagtcgaaagggaggagaggtgcttcattggccagagagcccgaggtggaagaagagatggaaaagagcgccctgggtggcggaaagctgccgagggggagttggcggtcttcacccggacggatccagagccttaaagaaaggaagggcctggagctagaggtagtagccaaaacttttcttctgggaccgtttcagttcgttagaaacagtttagcatag

SEQ ID NO: 221271 - DNA, 1629 bp, synthetic construct
  misc_feature 1..1629: note = Description of Artificial Sequence: Synthetic coding sequence
  source 1..1629: mol_type = other DNA
atgatgtccatccgccagcgaagagaaattcgagccactgaggtgtctgaagattttccagcgcaggaagaaaatgtgaaattggaaaacaaactacctagcggatgcacgtccaggcgcctctggaagatactctcgctgaccattggcggtacaattgctttgtgtatcggacttctgacctcagtgtatctggccacgcttcacgaaaacgacctttggttcagcaacattaaagaagtggagagagaaatttcttttcggactgaatgtggcttgtattacagttattataagcaaatgttgcaagctcctactttggtccaggggtttcatggcttgatttacgacaacaaaacagagtccatgaaaactatcaacctgcttcagcgcatgaatatataccaggaagtgtttttaagcatattgtatcgggttctgccaattcagaagtatctggagccggtgtatttctacatatacaccttatttggactacaagccatttatgtgactgccttatatataactagttggctattgtcgggtacttggctgagtggactgctggcagctttttggtacgtgaccaaccgaatcgacacgactcgagtggaattcactatacccctacgcgagaattgggctcttccattcttcgccatccagatcgccgctataacttattttcttcggccaaacctccagcccctgtcagaaaggctcactctcctggctatttttattagcacctttctgttttccttaacttggcaatttaatcaatttatgatgctcatgcaagccctcgttctatttaccctggacagcctggatatgttgccggcagtgaaagcaacatggctgtacggcatccagattactagcctgctactggtctgcattctccaattctttaacagcatgattttaggatccctcctgataagctttaatctgtccgtgtttatagcacgcaagctgcagaaaaacctgaagacggggagtttcctcaatcgattgggtaagcttttgcttcaccttttcatggttctttgtcttaccctattcctgaacaacattattaagaagatcctgaacctgaaatccgacgagcacatatttaaatttctgaaggctaagttcggcttgggcgctacccgcgacttcgacgccaacttgtatctgtgcgaggaggcttttgggttgttaccattcaatacattcggtagactctccgacacactgctgttctacgcctacattttcgtcctctcgatcacggtcatagtggcctttgtagtagcctttcataatctcagtgattccacgaatcagcagagcgtgggcaagatggagaagggcaccgtcgatctgaaacctgagactgcctacaacctcatacataccattttgttcggtttccttgccctgtccacgatgcgcatgaagtatctgtggacatcacatatgtgcgtctttgcgagcttcggcctgtgtagtccggagatctgggagctgctgctgaagtccgtgcacctttacaaccctaagcggatctgcattatgagatatagtgtgccaatcttaattctactgtacctttgttataaaaatcagaaatcctag

SEQ ID NO: 221272 - DNA, 2151 bp, synthetic construct
  misc_feature 1..2151: note = Description of Artificial Sequence: Synthetic coding sequence
  source 1..2151: mol_type = other DNA
atgatgtctattaggcagcgtcgcgagattagagctacggaggtgtctgaagacttccccgctcaagaggagaatgtgaagcttgagaacaaacttccgtctggatgtacttcacgtcgcctgtggaaaattctgtccctcacgatcggcggtacgatcgctctgtgcatcggcctcctgacctccgtatacttagccaccctgcacgagaatgacctgtggttcagtaacatcaaagaggtcgagagagaaatcagtttccggactgagtgcggtttgtattactcgtactataaacagatgctgcaggctccaaccctggtgcaggggttccacggcttgatctatgataacaagaccgagagcatgaagactataaaccttttacaaagaatgaacatttaccaggaggtgttcctgtcaattctctaccgtgttctgcctatccagaaatatctcgagcccgtttatttctatatctacaccctcttcggcctgcaagcaatttacgttacagctctgtacattactagttggttactgtccgggacttggttgagtggactcctggccgctttttggtatgttaccaacaggatcgacactacgcgtgtggaattcacaattccactacgagaaaattgggctctgcctttcttcgctatccaaatcgctgcgatcacctactttcttaggccaaacttgcagcctctctcggaacgactgaccctcttggcaatcttcatcagcacttttctgttcagccttacctggcagttcaaccaattcatgatgctcatgcaggctctggtgctcttcactctcgacagtctggacatgctccctgctgtaaaggcgacctggctgtatggcatccagatcacaagcctgctgctagtgtgtatcctgcagttctttaattccatgatcctgggttcacttctgattagtttcaacctatcggtgtttattgcacggaaactccagaaaaatttgaagactggttcttttctcaaccggctcgggaagctactgctccatttattcatggtcctctgcctgaccctgtttctcaataatattatcaagaagattttaaatttgaagtccgatgagcacatctttaagtttttgaaggcaaaatttggcctgggtgccaccagagatttcgatgccaacctttatctgtgcgaagaggctttcggcctcctgcccttcaataccttcggcagactgtcagacactctgctcttttatgcatacatttttgtcttgtctatcacagtgatcgtggcgttcgtggtcgcattccacaacctgagcgattccaccaaccagcagtcagtgggcaagatggagaagggaacagtggatctcaagcccgaaaccgcttacaatttaatacataccattctgtttggctttctggctctatcaaccatgcggatgaaatacctttggactagccatatgtgtgttttcgcctctttcgggctttgctctccggaaatttgggaactcctgttgaaatcagtccatctttacaatcccaaaaggatttgcattatgaggtatagcgtgcccatactgatcctgttgtatctctgttacaaattttggcccggtatgatggacgagttaagcgagcttagggagttctacgaccccgacactgttgaactgatgaactggatcaattctaacacacccagaaaggcggttttcgccggtagtatgcaactgctagctggtgtcaagctgtgcactggaaggacgctgaccaaccatccacattatgaagactctagcttgagggaacgcacgcgcgcagtgtatcaaatctacgctaaacgcgcaccagaggaggtccacgcactgctgagatcgtttgggacagactacgtaatactggaggattccatttgctacgagcgcagacaccgcagagggtgccgccttagggatcttcttgatatcgccaacggacacatgatggatggcccaggtgagaatgacccagacctgaagcccgcagatcatcccaggttctgcgaagagatcaaaagaaacctcccaccttacgttgcctacttcaccagagtatttcagaataagacgtttcacgtctataaattaagtagaaacaaatag

SEQ ID NO: 221273 - DNA, 342 bp, synthetic construct
  misc_feature 1..342: note = Description of Artificial Sequence: Synthetic coding sequence
  source 1..342: mol_type = other DNA
atgatgtcgattcgacagcgcagagaaattcgcgctaccgaggtctctgaggattttccggctcaagaggagaacgtaaagctcgagaacaaactgccctccggatgcactagccgaaggctctggaagatcctgagcctgaccataggagggaccctgccttttgccctggattttctacacctatctactctcccaagatacatgaagatgatctacggcttcctgattttaaggaagtggtctgagaagagccatagcgagcagtcagtggcatgtatcactcccaccacctccagatgttgtcggctgcagcctagttgcaaagtgttcatggcttag

SEQ ID NO: 221274 - DNA, 2151 bp, synthetic construct
  misc_feature 1..2151: note = Description of Artificial Sequence: Synthetic coding sequence
  source 1..2151: mol_type = other DNA
atgatgtccatcaggcagcgcagagagatcagagccacagaagtgtctgaggatttcccagcccaggaggagaacgtcaagctggagaacaaattacccagcggctgcacttcacggcgactttggaaaatcctatctcttactatcgggggtacaattgccctgtgtatcggtctgctgacgagcgtgtaccttgctacactccacgaaaatgatctgtggttcagtaacattaaagaggtggaaagagagatcagttttaggacagagtgcggactgtactactcctattataagcagatgttacaggcaccaacccttgttcagggttttcacggactcatatatgataataaaacagagagcatgaagaccataaacttgttacagcggatgaacatataccaagaggtgttcttaagcatcctttacagagtgctccctatacagaagtatctagaaccagtttacttttatatctatactctgttcggccttcaagctatttacgtaacagcactttacatcacctcctggctcctctcgggcacctggctttcggggctgctagccgctttctggtatgtgaccaaccgcatcgacactacccgggttgaatttactatcccactgagagagaactgggccctgccattctttgccatacagattgccgctattacctattttttgcgcccaaatttacagccgctgagtgagcggttaacactgctggcaatattcatatctacttttttgttcagccttacgtggcagtttaaccagtttatgatgttaatgcaagccctagtgctattcactctggactctctggacatgctcccggctgttaaggcaacatggctgtacggaattcagatcacaagcctccttctcgtgtgtattctgcaattttttaactctatgatcctaggtagcctgctcatctcattcaatttgtcggtctttatagctagaaagctgcaaaaaaacttgaagacgggcagttttttaaatcggcttggaaaactcctgctccacctgtttatggttctgtgcctcactctgttcctcaataatatcataaagaagatcttgaatcttaaatcagacgagcatatattcaaatttctaaaggccaagttcggactgggagcaacccgggattttgacgcgaacctgtatctctgtgaagaagcttttggtttgcttccctttaataccttcggccgactgtccgacacactcctcttctatgcctacattttcgtcctttctattactgtgattgtggctttcgtggtggccttccacaatttgtcagacagtacaaaccagcaaagcgtggggaagatggaaaagggcaccgtcgatttgaaacccgagaccgcctacaaccttatccacacgattctgtttggcttcctggctttgtcaactatgaggatgaagtacttatggacaagccatatgtgcgtgttcgcctcttttggcctgtgctcgcccgagatctgggagctgctgttgaagagtgtgcatttgtataaccccaaaagaatatgtattatgagatattctgttcccatcttgattctgctttatctgtgctacaagttctggccgggtatgatggacgaactgagtgagctgagggaattttacgatcccgacacggtggaattaatgaattggatcaattcaaatacaccacgcaaagccgtgttcgcaggttccatgcaacttctggcgggtgtgaaactctgcacaggacgcaccctgacaaaccatccccactacgaagacagttcgctgagagaaagaacaagagccgtctatcagatctatgctaaaagggcacccgaggaggtgcacgccctgctgcgcagttttggcacagactacgtaatcttggaagacagtatatgttacgagcggaggcacagaagaggctgtcgtttgcgcgatctcttggacattgcaaacgggcacatgatggatggaccaggtgaaaatgacccagatcttaagcctgcagatcatccacgcttctgcgaagagataaaacgcaatctgcctccctatgtggcctatttcacaagagtgttccagaacaagacattccacgtctacaagttatctcgaaataagtag

SEQ ID NO: 221275 - DNA, 2172 bp, synthetic construct
  misc_feature 1..2172: note = Description of Artificial Sequence: Synthetic coding sequence
  source 1..2172: mol_type = other DNA
atggctgaagaggaggggcctcccgtagaattgaggcagaggaaaaagcccaagtcctctgagaacaaggaaagtgcaaaggaagagaagattagcgacattcctattccagaacgcgctccaaaacatgtactgttccagcggtttgccaaaatatttattggttgcctggccgctgtgacatcgggaatgatgtacgccttgtacttgagcgcttaccatgagcggaaattctggttcagtaataggcaggagctcgagcgcgagatcactttccagggggattctgctatctactatagttactataaggacatgttaaaagccccatcatttgagcgcggagtgtacgagcttacacataataataaaacagtgtctctgaaaaccatcaatgctgtgcagcagatgtcgctgtatcccgaactgatcgcttccattctgtatcaagccaccggtagtaatgagattatcgagcccgtatacttctatattggaatagtcttcggccttcaaggaatttatgttaccgccctttttgtaacctcttggcttatgtctggcacatggctggctggaatgctgacggtggcttggtttgttattaatcgcgttgatacaacccgcatcgaatacagcatcccattacgagagaactgggcgttgccatattttgcgtgtcaaatcgcagccttgaccggatacctgaaaagtaacttgaacacttacggggaacgcttctgctacttgctaatgtcggcttcaacatatacctttatgatgatgtgggaatactcgcattacctcctgttccttcaggccataagtctctttctgctggacacattttcggttgagcagagtgataaggtgtacgaagtgtacaagatctatatcttttccctgtttttaggatatttgctccaatttgagaatcccgcactgctagtgtcgcctctcctgtctctcgtggccgctcttatgctggcgaagtgtctacaactaaacgtgaagaaggggtccttcgtcgccaagattatcaaggttataaatttctaccttgtgtgtactttgacaattactctcaatatcattatgaagatgttcgtgccccacaaagagaatggtcatatgctgaaattcctggaagtgaaatttggccttaacatgaccaagaactttacaatgaattggctcctgtgtcaagagtctcttcaggccccttctcaggatttcttcctcagactgacacagagcagtctgcttcccttctacatcctggtgttgattatctgtttcctcagcatgctccaagtgatattcaggagaatcaacggtaagagcctcaaagaaacagtgactctggaggatgggcgtatcggcgagagaccagagattatctaccacgtgattcacactattctgttgggctctctggcgatggtgatagaaggactgaagtacatttggatcccatatgtctgcatgctcgccgctttcggtgtgtgcagtcctgagctgtggatgaccttgttcaagtggctgcgcctgcgcaccgtgcatcccatcttgctcgccctgatcctgagtatggcagtcccgacaatcatcggcctgtccctgtggaaagaattcttccctcgtctgatgaccgaattgatggagctacaggaattttatgaccccgacactgtggagctgatgacttggatcaaacgtcaagcacctgtggccgcagttttcgccggttctccgcagctaatgggagccatcaagctctgcacggggtggatggtgacaagcctgccactgtacaatgacgatgaccttctaaagagaaacgagaatatttaccagatttacagtaaacgatccgcagaggacatctacaagattttgacaagttacaaggctaactacctcatagtggaggatgctatctgcaacgaggtgggtccaatgcgaggatgcagagtaaaggacctgctggacattgcgaatggccacatggtgtgtgaggagggcgataagctcacatactcaaagtacggcagattttgtcatgaggtgaaaatcaactatagcccttacgtgaattatttcactcgagtatattggaatcgatcctatttcgtttacaagatcaacacggtcatcagtttccaatcttag

SEQ ID NO: 221276 - DNA, 300 bp, synthetic construct
  misc_feature 1..300: note = Description of Artificial Sequence: Synthetic coding sequence
  source 1..300: mol_type = other DNA
atggaaccggagcagatgctcgaaggccagacccaggtcgccgagaatcctcatagtgagtatggattgactgacaatgtggaaagaatagtcgaaaacgagaagataaatgctgaaaagagttctaaacagaaagtggacttgcagtctctgccaaccagggcctacctcgaccaaaccgtggtacccattctccttcaaggcctcgctgtacttgccaaagagaggcctccaaatccaatagagtttctagcttcatatctgctcaaaaataaagcccagtttgaggacagaaactag

SEQ ID NO: 221277 - DNA, 300 bp, synthetic construct
  misc_feature 1..300: note = Description of Artificial Sequence: Synthetic coding sequence
  source 1..300: mol_type = other DNA
atggagccagaacagatgttggaaggtcaaactcaagtggcagagaatccgcattctgagtatgggcttacagacaatgtggagagaatagtggaaaacgagaagattaatgcagagaagtcatccaagcagaaggtggacctgcaatctttgccaacacgagcctacttggaccagactgtggtccctattctgttgcaaggtctggcagtactggcgaaagaaagacccccaaaccccatagaatttctggctagctacctcctgaagaacaaggcgcagtttgaggatagaaactag

SEQ ID NO: 221278 - DNA, 1956 bp, synthetic construct
  misc_feature 1..1956: note = Description of Artificial Sequence: Synthetic coding sequence
  source 1..1956: mol_type = other DNA
atggctggacacccctggcacggtaccgcagccctcgcttctagtcaggcctggagagatggcagagagaggcaggctcttgtttcttgtcgggcactgtatacctacgaggacggatctgacgacttgaaactagcagcctcgggcgagggaggtctccaagaattgtcaggccacttcgaaaaccagaaggtgatgtacggcttttgttccgtgaaggactcacaggcagctcttcccaaatacgttctgattaattgggtgggggaagacgtcccggacgcacgaaagtgcgcgtgcgcatctcatgtcgccaaggtggcagaattcttccagggggtggacgtcatcgttaatgccagctcagtggaggacatagacgctggtgctattgggcaacgcctctctaatggcctggcccgactgtcatcacctgtgttgcaccgtttacggctgagggaggatgagaatgccgagccagtggggaccacttaccaaaagacggatgctgcagtggaaatgaaaaggatcaacagggagcagttttgggaacaggctaagaaggaagaagagttgagaaaagaggaagagaggaagaaggccttggacgagagactgcggttcgaacaagagaggatggagcaggagcgacaagagcaggaggaacgtgagcgcaggtatcgagagcgtgaacagcagatagaagaacatagacgcaaacagcagactctcgaagctgaggaggccaagagacgcttgaaagaacagtctatctttggcgaccatagggatgaagaagaggaaactcacatgaagaagtctgaatctgaagtggaggaggccgctgctattatcgcccaacggcctgataatcctagagaattcttcaaacagcaagagcgcgtggcaagcgcctcggcgggatcatgcgacgtccccagcccctttaaccaccgcccaggatcacatctcgactctcataggcggatggccccaacaccgattcccactaggtccccctcagatagttccacagcctctaccccagtagccgagcagatagaacgagctctggacgaagtgactagctcccagcccccacccctcccgcctccacccccacccgctcaggagacccaggaaccttccccaattctcgactccgaagaaaccagagcagctgccccacaggcttgggccggtcctatggaagagccaccacaggcccaggcgccaccgcgtggccctgggagtccggctgaagatttgatgtttatggaatcagctgaacaagccgtcctggcagcccctgtagaacctgctaccgcagatgcaaccgagatacacgacgctgccgacacgatcgagacagacactgcgacagcagataccactgtggctaataatgtgccaccagccgctacgtccctcatcgatctgtggcctgggaatggcgagggcgctagtaccctccagggtgagcctagggctccaaccccgccatccggaacggaagtaactctggccgaagttccgcttcttgatgaggttgcgccagagccgctactccctgccggagagggttgtgcgactcttctaaactttgacgagctgcccgaacctcccgcaacattctgcgacccggaagaagtggagggcgagtcactcgctgcaccccaaacaccaaccctgccctcggcgctcgaggagcttgagcaggagcaggagcccgagcctcatcttctcaccaacggagaaacaacgcagaaggaaggcacacaagcttccgaagggtactttagccagagtcaggaggaggagttcgcccagagcgaggagttgtgcgcaaaggctccccctcccgttttctacaacaaaccccctgaaattgatattacatgctgggacgccgatccagtgcctgaggaggaagaagggttcgagggcggagactag

SEQ ID NO: 221279 - DNA, 1950 bp, synthetic construct
  misc_feature 1..1950: note = Description of Artificial Sequence: Synthetic coding sequence
  source 1..1950: mol_type = other DNA
atggcaggcgtatccttttcaggtcacaggctggagttgctcgctgcgtacgaagaagtcatccgggaagagagtgccgcagactgggctttgtacacctacgaggacggatctgacgatcttaagctcgcagccagtggtgaagggggtctgcaggagctgagtggacatttcgaaaaccaaaaggtcatgtacggcttctgctcagtgaaagactctcaagcggcactcccaaaatacgtgctgattaactgggttggggaggacgtgccagatgcacgcaagtgtgcgtgcgccagccacgtagcgaaggtggccgaatttttccaaggtgttgacgtgattgtgaatgcaagtagcgttgaagatattgatgcaggggcaatcggtcagcgactgtctaatgggctggcaaggctttccagtccagtgcttcaccgcctgaggctaagagaggacgagaacgcagaacccgtggggacgacttaccagaagaccgacgctgctgtggagatgaagcggatcaaccgggagcagttctgggagcaggctaaaaaagaggaagaactacgcaaggaggaggaacgtaaaaaggctcttgatgaacgcctcaggtttgagcaggagaggatggagcaagaacgacaagagcaggaggaacgggaaagacgctaccgggagcgagagcaacagattgaggagcatcggcgtaagcagcagacgctggaagcggaagaagctaagcgcagattgaaggaacagtctatttttggtgaccacagggatgaggaggaggagacgcatatgaagaaaagcgaaagtgaagtggaggaggctgccgctataattgctcagcgcccagacaatccgcgtgaatttttcaagcagcaagagagggttgctagcgcctccgccggatcctgcgatgtgccttctcctttcaaccacaggcctgggagtcacctggattctcatcggaggatggcacccaccccgatccccacacggagcccaagcgactcgtcaacagcatcaactcccgtcgctgagcagatcgaaagagccctcgatgaagtgacttcttcacagccccctccgcttccccctccgccaccccctgctcaagaaacacaagagccatcaccaatactggacagtgaggagacgcgagccgctgctcctcaggcttgggccggtcccatggaggagccccctcaggcacaggctcccccaagagggccagggagccctgccgaggacctgatgtttatggagagtgcagaacaggccgtgcttgcagcaccagtggagcctgccacagctgacgcaactgagatccacgacgctgctgacactatcgaaacggatacagccacggcagacacaaccgtggctaacaacgtcccaccagccgctacgtccctaatagatctctggcctggcaatggagagggtgccagcactctccagggtgaacctcgggctcctaccccgccaagcggcaccgaagtgacactggccgaggtaccactgctggacgaggtggctcctgaaccactccttccagctggcgaagggtgcgccactctgcttaacttcgacgagctaccagaaccgcctgccaccttctgcgatccggaagaggtagagggggagtcgctggcggctcctcagacccctaccttgccctctgcacttgaggagctggaacaggagcaggagccagagccccacctgctgaccaacggagaaactacccagaaagaggggacacaggcttccgagggttacttttcacagtctcaggaggaagagtttgcccagtcggaagagctgtgcgccaaggctcctcctcccgtcttttataataagccaccagaaatcgacattacatgctgggatgccgacccagtcccagaagaggaagaaggattcgaaggaggagactag

SEQ ID NO: 221280 - DNA, 1146 bp, synthetic construct
  misc_feature 1..1146: note = Description of Artificial Sequence: Synthetic coding sequence
  source 1..1146: mol_type = other DNA
atgaaaaagagcgaaagtgaggtcgaggaagctgccgctatcattgcacagcgaccagacaaccccagagaattctttaaacagcaggagcgcgtcgcgtcagccagtgccggttcctgcgatgtgcctagtcctttcaaccatagaccaggaagtcacttagattcacataggcgtatggctccaacccccatcccgactcggtcgccctctgacagtagcacggcaagtacacccgttgctgaacagatcgaacgtgccctggacgaagtgacttcttctcagccaccgccactgccgcctcccccaccccctgcccaggagactcaagaaccaagcccaatcctggattcagaggaaaccagggccgctgctccccaggcttgggccggacctatggaggaaccccctcaggcccaagccccaccgcgtggcccaggcagccctgccgaggacctgatgttcatggagagcgcagagcaggctgtactcgccgctcccgtggaacccgcaaccgccgacgccacagaaattcacgatgccgcagacacgattgagacagacacagccaccgcagataccacagtcgccaacaacgtccctcccgctgcgacttctctaatagatctgtggcccggaaatggcgaaggggcaagtaccttgcagggagagccccgtgctccaacaccccctagcggcacagaagtgacgctcgctgaagtcccactgcttgacgaggtcgctcccgagcctctgcttcccgctggcgaggggtgcgccactctcctcaacttcgacgagctcccggagccccctgcgactttttgtgatcctgaagaggttgaaggcgaatcgctggctgcccctcagaccccaactttacccagcgctctagaggagttggagcaggagcaagaacctgagccacatcttctcacgaatggggagactacacaaaaggagggcacgcaggccagcgaggggtatttttctcagtctcaagaggaggaattcgcccagtccgaggaactctgcgccaaagcccctccaccagtgttctataataaacctccggagatcgacattacgtgctgggatgcagaccccgtgccggaggaggaggaaggctttgaaggcggagactag

SEQ ID NO: 221281 - DNA, 954 bp, synthetic construct
  misc_feature 1..954: note = Description of Artificial Sequence: Synthetic coding sequence
  source 1..954: mol_type = other DNA
atggccggagtgtccttctcgggacacagactcgagttactggccgcatacgaggaggtcatcagggaagaatctgccgctgattgggcactctacacctatgaggatggctcagacgatctcaaactcgccgctagtggcggaggactgcaagaactgtcaggacactttgagaaccagaaagtgatgtatggtttttgctccgtcaaagacagtcaggccgctctccccaaatacgtgcttataaattgggtcggcgaagacgtccctgacgcacgcaaatgcgcttgcgcctctcacgtagctaaagtggcggaattctttcaaggagtggatgttattgtgaatgcgtcctcagtcgaggacatcgacgccggagctataggccagagactttccaatgggctggctcgcctgtcttcaccagtcctgcataggctgagactcagggaagacgagaacgccgagcctgtggggacaacctaccagaaaacggatgctgcggttgaaatgaaaagaatcaaccgggagcagttttgggagcaagccaaaaaggaagaggagctacggaaggaagaggaacgcaaaaaggccctcgacgagaggctgcgattcgaacaagaaagaatggagcaggagagacaggagcaagaggaacgtgaacggaggtaccgtgagagagagcagcagatcgaagagcaccgacggaaacagcaaaccctggaggccgaggaggcaaaaaggcgcctcaaggaacaaagtatttttggcgaccacagagatgaggaggaggaaacacatatgaagaagagcgaaagtgaagttgaggaagccgctgcgatcatagcccagaggccagataaccccagggaattcttcaaacaacaggagcgcgtggcaagcgcttccgccggttcatgcgacgttccaagcccctttaatcaccgcccatag

SEQ ID NO: 221282 - DNA, 375 bp, synthetic construct
  misc_feature 1..375: note = Description of Artificial Sequence: Synthetic coding sequence
  source 1..375: mol_type = other DNA
atggccggagtgtccttctctggccacagactcgagctgttggccgcttacgaggaagttatccgggaggaatccgctgcagattgggctctttacacatacgaggacgggtccgatgacctgaagctggcggcttcgggagaaggcggtttgcaggagctatccggacacttcgagaatcaaaaagtgatgtatgggttctgcagcgtgaaagattcccaagccgctctgcccaagtacgtcctgattaactgggtaggcgaggacgtgccagacgccaggaaatgtgcttgcgccagccatgtggccaaggtggcagaattcttccagggcgttgatgtgatcgtgaacgctagctcggtcgaagatatatag

SEQ ID NO: 221283 - DNA, 3900 bp, synthetic construct
  misc_feature 1..3900: note = Description of Artificial Sequence: Synthetic coding sequence
  source 1..3900: mol_type = other DNA
catagaatgagcttccatcctgggcgtggctgcccacgcggaaggggcggacatggagccagacctagcgccccatcgttccgccctcagaatctgcggttactccacccacagcagcctcctgtccagtatcagtacgaacccccaagtgcccctagcactaccttttccaatagccccgctcctaacttcctcccaccgagacccgattttgttcccttcccccctccaatgccgccaagcgcacagggaccactccccccttgtccaattagacccccttttccaaaccatcagatgagacacccttttcccgtaccaccgtgcttcccaccgatgcctcccccaatgccttgtcctaacaatcctcccgttcccggagctcctcccggacagggaacgtttccctttatgatgcctccaccctcaatgccccacccaccccctccacctgtcatgccacagcaggtaaactaccagtatccaccgggttatagccatcacaactttcctcccccttccttcaatagctttcaaaacaacccaagctctttcctgccttccgccaataattccagctcccctcatttcagacacctgcccccatacccgctgcctaaggcaccctcagagcggagatcgcccgaacgactcaaacactacgacgatcacagacacagggaccattcgcacgggaggggtgagagacacaggtctttggatcggcgagaaaggggccgttctcccgacagaaggagacaggactcccgttacagaagcgactatgataggggccgtaccccgtcgcgccaccggtcctacgagcgtagctccagatctccctctcgagagaagaagagagctcgctgggaagaagaaaaagaccgctggtccgacaaccaatccagcggaaaggacaagaattacacaagcattaaagagaaggaacctgaagaaaccatgcctgataagaatgaggaggaggaagaggagctgcttaaacctgtttggataaggtgcacacactccgagaattattactccagtgacccaatggatcaggtcggggattcgacagtcgtcggcacttccaggctgcgcgatctgtacgacaaattcgaggaggagctaggtagtaggcaagaaaaagcaaaggccgcaaggccgccttgggaacctcctaaaacaaaactggacgaagatctggagtccagtagcgagtccgaatgtgagagcgacgaagacagtacatgcagttcttcctcagattctgaggtgtttgacgtcatcgcagaaatcaaacgaaagaaggctcacccggataggcttcacgacgagctctggtacaacgaccccggtcagatgaatgatggtccgttgtgtaaatgctccgccaaggcccgtaggacaggtattcggcactccatctatccaggggaagaggcaattaagccttgtcgacctatgaccaacaatgcgggacgtctttttcactataggatcacagtctctccacccaccaattttctgaccgatcggcctacagtaattgagtacgatgaccacgagtatatcttcgaggggttctccatgtttgcacatgcaccattaaccaacattcccttatgcaaggtgatcaggttcaacatagactataccattcactttatagaggagatgatgcctgagaacttttgtgtaaaaggcctggaactcttctctctcttcttgttcagggacatcctcgagctatacgactggaacctgaagggacctcttttcgaagattctcctccttgctgtcccagattccactttatgccgcgttttgtcagattcctaccagacggcggaaaggaagtgctcagcatgcatcaaatccttttgtaccttcttaggtgcagtaaggccctggtgcctgaggaggaaatagctaatatgctgcaatgggaggagctggagtggcaaaagtatgcagaggaatgtaaggggatgattgtgacaaatccaggaacaaaaccttctagtgtgcggatcgaccagcttgaccgggagcagtttaatcccgatgtgatcactttccccatcattgtccacttcggcatacggcctgcacagctgtcttatgccggtgacccccagtatcaaaagttgtggaagagttatgtgaaactgcgccacttgttggctaacagtcccaaagtgaagcaaacagataagcagaagctggcccagcgggaagaggcacttcagaaaattcggcagaagaataccatgcggcgtgaggttaccgttgaactgtccagccagggattttggaagactggcatacgaagcgacgtttgtcagcatgcaatgatgctccccgtgctaactcatcacatccgatatcaccaatgtcttatgcatcttgacaagctcatcggctatacctttcaggaccgctgcctgctgcaactagctatgacacacccatcccatcacttgaatttcggcatgaaccccgaccatgcccgtaacagcttgtctaattgtggcatcagacagcccaaatacggcgatcgaaaggtgcatcacatgcacatgagaaaaaagggcattaacacactcatcaatatcatgtctcgactgggccaagacgatcccactccgtcccggatcaatcataacgagagactggagttccttggcgatgctgtggtcgaattcctgacctccgtccacctgtactatttatttcctagccttgaagaagggggtctagctacctaccgcacagcgattgttcaaaatcagcacctcgccatgcttgccaaaaagttggagctggatcgatttatgctttatgcacatggcccagacctgtgtcgagagagtgatctacgccatgcaatggccaactgctttgaggctttgattggtgctgtttacctggaagggagcctcgaggaagcgaaacaattgtttggccgtttactctttaatgatccggatctccgtgaggtgtggctgaactaccctttgcacccgctgcagctgcaggagccgaacactgacagacagttgattgagacatctcctgttttgcagaaattgaccgagtttgaggaagctattggagtaatctttactcacgttagactactggccagggcattcacacttagaacggtgggatttaaccatctaacactcggccataaccagaggatggagtttctaggagacagcattatgcagctagtcgctaccgagtacctgtttatccatttccccgaccatcatgaggggcatctgacactcttgaggtcatccctggttaacaataggacacaagcaaaggtcgccgaagaattagggatgcaagaatatgccatcacaaatgacaaaactaagcgccctgtcgccttaagaactaagactcttgctgacctcctagagagcttcatcgcagccctatacatcgataaggaccttgagtacgtgcataccttcatgaatgtatgcttcttccccagactgaaagagtttattttaaaccaggactggaacgaccctaagtcacagctacagcagtgctgcctgactctgaggaccgaaggcaaggagccagatatccccctttacaagactttgcagacagttggtccatctcacgcaaggacctacacagttgctgtctacttcaagggcgaacgaatagggtgcggtaaaggaccttccattcagcaggctgaaatgggagccgctatggatgctctggagaagtataatttcccccagatggctcaccagaaacggttcattgaacgtaaatacaggcaggaacttaaagagatgaggtgggagcgggaacatcaggagagggaacctgacgagaccgaggatatcaaaaaatag

SEQ ID NO: 221284 - DNA, 4125 bp, synthetic construct
  misc_feature 1..4125: note = Description of Artificial Sequence: Synthetic coding sequence
  source 1..4125: mol_type = other DNA
atgatgcaagggaatacctgccaccgcatgtctttccatccaggacgaggctgccctagaggccgaggaggacatggagcgaggccatctgctcccagctttcgtcctcagaacttacgcctcttgcatccccagcaacctcccgtgcagtatcagtatgaacctccatcagccccttctactacattctccaacagccctgctccaaatttcttgccaccccgtccagactttgtgcccttccctccccctatgccacccagcgctcagggacccttgcccccttgccccattaggccaccattcccaaaccatcaaatgcgccacccctttcccgtccctccatgtttccctcccatgccccctcccatgccttgcccaaacaacccccctgttcctggggcacccccagggcaaggcacctttcctttcatgatgcctcctccctccatgccacacccgccaccccctcccgtgatgccacagcaagtaaactaccaatatccccctggatactcacaccataactttccacccccaagcttcaactcctttcaaaacaacccaagttcgtttctgccgagtgccaataattcctcctctccgcattttcggcacctacctccgtacccactgcctaaagcaccttctgagcgcagatcgcccgagcgcctgaaacattacgatgatcaccgtcatcgggaccacagccacggtcgaggagagaggcatcggtcattggatcgcagagaacgcggtagatcgcccgatcgaagaaggcaagacagccggtaccgctctgactatgatcgaggcagaacccctagtcgccaccgatcctatgagagatctagagagcgcgagagggagcgccaccgtcatcgcgacaacagacgctccccatcactggagaggagctacaagaaagagtacaaaaggtctggaagaagctacggactgagcgtggtcccagaaccagccggatgtaccccggagctccccggagagattattaaaaatacagactcttgggcacccccacttgaaatcgtaaaccatcgctctccctcgcgcgagaaaaagcgggctaggtgggaggaggagaaagacaggtggtccgataatcagagctctgggaaagacaagaactatactagcataaaagaaaaggaaccagaagagaccatgccagacaaaaacgaggaagaagaagaagaattgctcaaacctgtctggatccgatgcacccactccgaaaactattacagtagcgatccaatggatcaagtaggcgacagcactgttgtggggacatcacgacttagagacctctacgacaagtttgaggaagagctgggatcacgccaagaaaaggccaaagccgctaggccaccatgggagccccctaagaccaagttggacgaggatctggaaagcagtagtgaaagcgagtgtgaaagtgacgaagactcaacgtgttcaagcagctcagacagcgaggtgtttgacgtgatcgccgaaatcaaacgtaaaaaggcccaccctgaccgcctgcacgatgagctgtggtataatgatccagggcaaatgaacgatggacctctgtgcaagtgctctgccaaggcaagaagaactgggattaggcactccatttaccccggtgaggaggccattaagccttgtcggccaatgaccaataacgccggaagactgttccattaccgcataactgtaagcccacccactaactttcttactgacaggcctacagtgatcgaatacgacgaccacgagtacatcttcgagggattctccatgtttgcacatgctcctctcactaacatacccttatgcaaagtaattcggtttaacatcgactatactatccacttcatcgaagaaatgatgcccgagaatttttgtgtgaagggattggagctgttcagtttatttctgtttcgggacatcctcgagctgtacgactggaacctcaagggccctttgttcgaggactcccccccatgttgtcctagatttcacttcatgccgagattcgtgcgcttcctacccgacgggggaaaggaagtactctctatgcatcagatccttctttatttattaagatgctccaaggcgctggtgccggaggaagaaatcgcaaatatgttgcagtgggaggaattggagtggcaaaagtatgcggaggaatgtaagggtatgattgttacaaatccaggcaccaaaccctcttcagtgcggatagaccagttggaccgcgagcagttcaatcccgatgtgatcacgttccccataattgtccactttgggatccggcctgctcaactctcttacgccggtgaccctcagtaccagaaactgtggaagtcatacgtcaagctcagacacttgctcgccaactctcctaaggttaagcaaacagacaaacagaaactggcccagagggaggaggccctacagaagattcgccagaaaaacacaatgaggcgagaagtaacagttgagcttagctcccagggtttctggaagactggtattcggtcagatgtgtgccaacacgctatgatgctgccagtgctgacacatcatattcggtaccaccagtgtctgatgcatttagataagctgatcggttacacatttcaagatcgatgcctgctacagctggccatgactcaccccagccaccacttgaacttcggcatgaatcctgatcatgcacgtaacagtctaagtaattgcggcataaggcagcctaagtacggagacaggaaggttcaccacatgcacatgaggaaaaagggcatcaataccctgatcaacattatgtctcgacttgggcaagatgaccccactccctcccgaatcaatcacaacgagagattagaattccttggggacgcagtagtagaatttctaaccagtgtgcacctttactacctttttccctctctggaggagggaggcctcgcaacatatcgcacagctattgttcagaaccaacatctagcaatgctcgcaaaaaagttggagttagacagatttatgctttacgcccacgggcctgacctgtgcagagagtctgacttacgccatgccatggcaaattgctttgaggcgctgataggagccgtgtacctggaagggagcctggaggaggcaaagcagcttttcgggaggctgttgtttaatgaccccgacctgagagaggtgtggttaaactatccgcttcaccctcttcagttgcaggagccgaatactgaccgacagctcattgaaacatctcccgtgctgcagaaattgaccgagttcgaggaggccataggggtgatttttacacacgtcaggctgctagcacgtgcctttactttgaggaccgtcggttttaaccatctgacacttggacataaccagcggatggaattcctgggagatagcatcatgcaactggtggccactgagtatctcttcatacatttccctgatcaccatgaaggccacctcacactgctgcgtagcagtctggtgaacaataggacccaagccaaggtggccgaagaattaggaatgcaagagtatgcgatcacgaatgacaaaaccaagcgccctgtcgccctcaggacaaagactttggccgacctgctcgaaagcttcatcgctgccttgtatattgataaggacctggagtatgtacacaccttcatgaacgtgtgttttttccccagactcaaggaatttattcttaatcaggattggaacgatccaaagtcacagctccagcagtgttgcctgaccttgcggaccgaaggcaaggagccagacataccactctacaagaccttgcaaactgttggcccatcccatgcccgaacctacacagttgccgtctattttaagggggaaagaatcggctgtggtaaaggtccaagcatccagcaagctgagatgggggcagctatggacgctctggagaagtacaattttccacagatggctcaccaaaaaagattcatcgagcgcaagtaccgacaggaactgaaagagatgcgctgggagagggaacatcaggagcgcgagccggatgagacagaggacatcaaaaagtag

SEQ ID NO: 221285 - DNA, 3558 bp, synthetic construct
  misc_feature 1..3558: note = Description of Artificial Sequence: Synthetic coding sequence
  source 1..3558: mol_type = other DNA
cacagaatgagcttccacccagggagggggtgcccacggggacgaggcggacatggagctcggccttcggccccttctttcaggccccagaacctccggctcttgcatccccaacaaccgcctgtccagtaccagtacgagcctccgtccgcaccttctaccacattttccaattcacctgccccaaacttcctcccccctagacccgattttgttcccttcccccctcctatgcctccctccgcccaaggaccattgcccccatgtcctattagacctccgtttcctaaccaccaaatgcgccatccattccctgtcccaccttgtttccctcccatgccacccccaatgccttgcccaaacaatccaccagtgcctggggctcctccgggacaaggtaccttcccgttcatgatgccgccacctagcatgccccaccctccacccccaccagtgatgccccagcaggtaaactaccagtatccacccggatattctcatcataacttccccccaccaagtttcaactccttccagaataatccttcgagtttcctgccttccgccaacaattctagttcccctcatttccgacacctccctccatatcctttgcctaaggcaccttccgaacgcaggtcccccgaacgcctgaaacattacgatgaccaccgtcaccgggatcacagtcacggcaggggtgagaggcatagatctttggaccggcgagaaaggggcagaagtcccgaccgacggaggcaggattcccgctaccgctctgactatgacagagggagaaccccgtctaggcaccgatcctacgagcgctcacgtgagcgcgaaagggagcgacaccgccaccgagacaacagacgaagcccaagcctcgagagatcctacaagaaggaatacaagaggtctggtagtcgatctccatcaagggagaaaaaaagagctcgctgggaggaagaaaaggacaggtggagcgataatcagagcagcggaaaagacaagaattacacctctattaaggaaaaagagcccgaagagacaatgccggataagaacgaggaagaggaagaagaactgctgaagcctgtgtggattcggtgcactcacagcgaaaactactatagttcagaccctatggatcaggtcggcgattcaaccgtagttggcacatcccgacttcgagatctgtatgacaagttcgaagaggagctgggatctcgccaagaaaaggccaaggccgcacgcccaccatgggaaccccctaaaaccaagctagacgaggatctggaaagttcctctgaatccgaatgcgagtccgacgaggactcaacctgctcctccagtagtgactcggaggtcttcgacgtcattgcagaaataaagcgcaagaaagcgcatccggaccggttgcatgatgaactctggtataatgaccccggacagatgaatgacgggccactgtgcaaatgcagcgcaaaagcacgcagaaccggcataagacattcaatttatcctggtgaagaggctatcaagccatgtcggcctatgactaataatgcgggacgcctgtttcactatcgcatcacagtttccccacccaccaatttcctcacagataggcctactgttatcgagtacgatgatcacgagtatatattcgagggatttagcatgtttgcgcatgcacccctgactaatattccattgtgtaaggtcattagattcaatattgattacaccatccactttatagaagagatgatgcctgaaaacttctgtgttaagggattagagctgttctccttatttttgtttagggacatcctggagctgtacgattggaacctcaagggccctctgtttgaggactcccccccttgttgcccccgatttcactttatgccacgttttgtgagattcctgcccgacggtgggaaggaggttctgagtatgcaccaaattttgctttacttattacgctgctccaaggccctggtccctgaggaggaaattgcaaatatgcttcagtgggaggaactcgagtggcagaagtacgcggaggagtgcaaaggcatgatagtgacaaacccaggaacaaaaccttccagcgtcaggatagaccagctggatcgggaacaattcaatcccgatgtgatcacttttccaatcatagtgcactttggaatcagacccgcacagctgagctacgctggggatccccagtaccagaagctctggaaaagctatgtcaaactccgccatctgctggccaattctcctaaagtcaagcagaccgataagcagaaactggcgcaacgtgaagaagccctgcagaaaatccgtcagaagaacacaatgcgccgagaagtgactgtggagctctcatcccaaggcttctggaagacaggaattcgtagcgacgtctgtcaacacgccatgatgttacccgtcctcacacaccacatcaggtatcatcaatgcctgatgcatctggacaaactgatcggctacacatttcaggaccggtgtttgctacagttagctatgacacacccctcacaccacctgaacttcggaatgaatccggaccacgcgagaaatagcttgagtaactgtgggatccgacagccaaagtacggcgatagaaaggtgcaccatatgcacatgaggaagaaaggtatcaatacgctgattaatatcatgtcaaggctcggacaggatgaccctactcctagtcgtattaaccataacgagcgactcgaatttttgggagacgcggtggtggagtttttaactagcgtgcatctgtattacctgttcccatctttagaggagggcggactcgccacatataggaccgctattgtccaaaaccaacacctggcgatgcttgccaagaaattggaactcgatcgttttatgttatatgcccacggccctgacctgtgtagagaaagtgacctccggcacgccatggccaactgctttgaggcactcatcggggctgtgtacctggagggctccctggaagaagctaagcaactctttggcagactcttatttaatgacccagatcttagggaggtatggcttaattacccgctgcatccactgcaattgcaggaacctaacactgacaggcagctgatcgagacctcacctgtcctgcagaaactgactgagttcgaggaagctattggtgttatcttcacgcatgtaagactcctcgcgagagccttcaccctgaggactgtgggcttcaaccatttgaccctgggccataaccagaggatggaatttttgggggattcaattatgcagctggtggctaccgagtatctatttatccatttccccgaccatcacgagggacacctgacactcttgagaagcagcctcgtcaacaacaggacacaagccaaggtggccgaagaattgggcatgcaggaatggtcaatctatctcttgtcaaattgtgattgctgccttctgaggccctcacttgtttttctgcaaactatgaatgaggtatgctcgctgaagtag

SEQ ID NO: 221286 - DNA, 4014 bp, synthetic construct
  misc_feature 1..4014: note = Description of Artificial Sequence: Synthetic coding sequence
  source 1..4014: mol_type = other DNA
atgatgcagggaaatacatgccatagaatgtctttccacccaggccgtgggtgtcccagaggtagaggaggtcacggtgctagaccgtccgcgccaagcttccgcccacaaaacttacggctgctgcatcctcagcagcctcctgtccagtaccaatatgagcctcctagtgctccatcgaccacctttagcaatagtcctgctcctaatttccttcccccaaggcccgatttcgtcccttttcccccacccatgcctccttccgctcagggacccttaccaccctgcccgattaggccaccatttcccaatcaccagatgcgccaccctttccccgtccctccttgttttcccccaatgccaccccctatgccttgccctaacaatcctccggttccgggagccccaccaggtcagggcacattcccttttatgatgccccctccatccatgccgcaccctcccccaccacctgtcatgcctcaacaggtcaattaccagtatcccccaggctattctcatcataatttccccccacccagcttcaattcttttcagaataatcctagttcatttctgcccagtgctaacaattccagctctccacattttagacatctgccgccatatccgcttccaaaggctccctccgagcgcagaagtcccgagagactgaaacattatgatgaccatcgccacagggaccattcccacgggaggggggaacgacatcgttctctggaccgtcgggagagaggtaggtcgcctgatcgaaggaggcaggattcgcgttatagatctgattacgacagaggccgtaccccgagtcgacacaggtcatatgaacgcagtagagagcgcgaaagagaaaggcaccgacacagagacaacaggaggtcccccagtctagagaggagttataaaaaagaatataaacgatcaggttcaagaagtccttcacgcgaaaagaagcgagcaaggtgggaagaggaaaaagaccgttggagtgataaccagtccagcggtaaagacaagaattacacctcaataaaggagaaggagccagaggagactatgccagataaaaatgaagaggaggaggaggagcttttgaagccagtgtggattagatgcacccattccgaaaactattactcttccgaccccatggaccaggtaggcgactccaccgtagtgggaacaagccgcctgcgcgatttgtatgacaagtttgaagaagaactgggcagcagacaagaaaaggcaaaggccgcacgcccaccctgggagcccccaaagacaaagctggatgaggaccttgaatcatcaagcgaatccgaatgtgaatctgacgaagattctacatgctcatcatcatccgactccgaagtgtttgacgtgatcgccgagatcaaacgcaaaaaggctcatcctgatagattacatgatgagctctggtataacgatcctggccaaatgaatgatggcccactgtgcaagtgctccgccaaggcacgcaggacagggattagacacagcatttaccccggtgaggaagcaataaaaccctgccgccctatgactaataacgcgggacggctgtttcactataggattaccgtctccccacccacaaactttctgactgacaggcctaccgtgatcgaatatgacgaccatgagtatatctttgagggctttagcatgttcgcccatgcaccactcaccaacattcctctgtgcaaggtaatccgatttaatatcgactatactattcattttatcgaggaaatgatgcccgaaaacttctgcgtgaagggcctggagctgttctccctgtttctctttcgcgacattctggaactatacgactggaatctgaagggcccactgttcgaggacagtcccccatgttgcccacgctttcactttatgcccaggtttgtgcggtttctcccagatggaggtaaggaggtacttagcatgcatcagattctactgtatctgctcaggtgtagcaaagccctggtccccgaggaggagattgctaacatgctgcaatgggaagaactcgagtggcaaaagtacgctgaggagtgcaagggcatgattgtgaccaaccccggaacaaaaccatccagcgtccggattgaccagctggatcgggaacagtttaaccctgacgtgatcacctttcctataatcgtgcactttggcattagacccgcacagctgagttacgcgggtgatcctcaataccagaagctatggaaaagttacgtgaagctgcgacatcttctggcaaacagccccaaggtgaaacaaacggacaagcaaaaattggcccaaagagaggaggccctgcagaagattcgtcagaaaaacactatgcggagagaggtcaccgttgaactcagctctcagggattctggaaaaccggcattcgaagcgacgtttgccaacacgccatgatgctgcctgtattaactcatcacatcaggtaccatcagtgtctcatgcatctagataagctcatcggctacaccttccaggataggtgtcttcttcagttggcgatgacccacccctctcaccacctgaacttcggcatgaatccagatcatgcacgcaattcattgagcaactgcggtattagacagccaaagtacggagacaggaaggttcaccacatgcatatgcggaagaaaggaattaataccctcatcaacatcatgagccgtctgggtcaggatgaccctacgccatctaggatcaaccacaacgagcgacttgaattcctgggagatgctgtagtggaatttctgacctcagtgcatctgtattacctcttcccgtcgctggaagaggggggtctggccacgtaccgcactgctatagtgcagaatcagcatctcgccatgttagctaaaaagcttgagcttgaccgtttcatgctttatgctcatggtcctgacctgtgcagagaatctgatctgcgccacgccatggccaattgctttgaagcccttatcggagccgtctaccttgaaggttctctggaggaagccaagcagctgtttgggaggctgctttttaatgaccccgacttgagagaggtctggctcaattatccgcttcatccgctgcaacttcaggaacccaacacagaccggcaactgattgagacatccccagttctgcagaaacttaccgagttcgaggaggctattggagtcatttttacacatgtaagactattggcaagggcatttacattacgcaccgtgggttttaatcacctgacattaggtcacaaccagcgtatggagtttctgggcgattccataatgcagctcgtggcgacagagtacctgttcatccacttccctgatcaccatgagggacatctgacattgcttagatcctcactggtgaacaaccggacccaggccaaggtcgccgaggagctcggcatgcaggaatatgccatcacaaacgataagacgaaaagacccgttgcactaagaactaaaacactagccgacctgctggaatctttcatcgcagccctctacatcgacaaggacttggagtacgtccatacctttatgaatgtgtgtttctttccacggctgaaagaatttatactgaaccaggactggaacgaccctaaatcacaattgcaacaatgttgtcttacactcagaacagagggaaaagagccagacatacccttgtacaaaacactacagaccgtgggtccatcacacgctaggacttatacagtggccgtgtattttaagggcgagcgcataggctgtgggaagggcccatctatccagcaggccgagatgggagcagctatggatgctctcgagaagtataacttcccccagatggcacaccagaaaaggttcatagagcgcaaataccggcaagagctgaaagaaatgagatgggagcgagaacatcaagaacgcgagcccgatgagacagaggacattaaaaaatag

SEQ ID NO: 221287 - DNA, 606 bp, synthetic construct
  misc_feature 1..606: note = Description of Artificial Sequence: Synthetic coding sequence
  source 1..606: mol_type = other DNA
atgatgcaaggcaatacctgtcaccggatgtcgttccaccctggccgaggatgccccagaggcagaggcggacatggagctagaccaagcgctccatcctttcgccctcagaatctccgtctgttgcaccctcagcagccccctgtgcaataccagtacgaacctcccagcgctccatcaaccacttttagcaactcgccggctcctaattttttgccaccacgccctgactttgtccctttcccccctcctatgccccctagcgcccagggtccacttcccccatgcccaatcagaccacccttccccaatcaccaaatgcgacatccttttcctgttccaccatgcttcccgcctatgcctcctcccatgccttgccctaacaaccctcccgttcccggtgccccaccaggccaggggacattccctttcatgatgccacccccatccatgccgcatcccccaccacctcccgtcatgccgcagcaagtgaattaccagtaccctccgggatactcccaccacaactttccgccaccgtcctttaatagtttccagaacaatccttcttctttcctgcctagcgcgaacaactctagtagctag

SEQ ID NO: 221288 - DNA, 4125 bp, synthetic construct
  misc_feature 1..4125: note = Description of Artificial Sequence: Synthetic coding sequence
  source 1..4125: mol_type = other DNA
atgatgcagggcaatacttgtcatcgtatgagcttccacccaggacgcggatgccctcgcggacgtggcggtcacggcgcacggccttccgctccaagcttccgcccacagaacctgaggctacttcacccacagcagccaccagtccaatatcagtatgagcccccatctgctccttccacaactttcagcaactcacccgcacccaactttctgcctcctcggcctgatttcgtgccgttcccaccccctatgccacccagcgcccagggccctcttccaccgtgtcccattcgtcccccttttcctaaccaccagatgaggcatcccttccctgtgcctccgtgtttccctcccatgcctccgccaatgccctgtcctaacaatccgccagtcccaggcgcacccccaggccagggcaccttcccgttcatgatgcctcctccttcaatgccccacccaccgccacctcctgtgatgccacagcaggtgaattatcagtatccaccaggctactcacaccacaatttcccccctccttcgttcaacagtttccagaataatcctagcagcttcctccctagtgccaacaattccagctctccccacttccgccacctgccgccatacccactgcctaaggccccatccgagaggagatcacctgagaggctcaagcattacgacgaccatcgccaccgcgatcattcccacggccgaggggaacgtcatagaagtcttgatagacgagaaaggggtagaagccctgataggcgcagacaggatagcagatacagaagcgactacgaccgtggcaggacaccaagcaggcatcgaagttacgaaaggtcgcgcgaacgtgagcgtgaacgacaccgccatagagacaacagacggagcccctctttagagcggagctacaaaaaggaatacaagcggtccggtcgttcttacgggctgagtgtggtgcctgaacctgccggatgtactccggagctgccaggagagatcatcaagaacactgacagctgggctccaccattggagatcgtgaatcacagatctcccagcagggagaaaaaaagggctcggtgggaagaagaaaaggacaggtggtctgataatcaaagctcagggaaagacaaaaattacacaagcatcaaagaaaaggagcccgaagagaccatgcctgacaaaaacgaggaggaggaagaagagctcctcaagcccgtgtggataaggtgcacccacagcgaaaactactatagtagtgatccaatggaccaagtcggagacagtactgtcgtcggaacaagtcgcctcagggatttatacgacaagttcgaggaagaattaggctcaaggcaggaaaaggctaaggcagccaggcctccatgggagcccccaaagaccaaattggacgaggacctggagtcaagcagtgagtctgagtgtgaaagtgatgaagacagtacttgcagttcctcatcagattcggaggtgtttgacgtcatcgcggaaatcaagcggaaaaaggctcatcccgaccgtctgcatgatgaattgtggtataatgaccccggacagatgaacgatggcccactttgtaagtgctcagccaaagcccgacgcaccggaatccgccattccatttatcccggtgaggaggcaattaaaccatgtaggccaatgactaacaacgcgggaagattattccactatcggataacagtatcccccccaacaaatttcctaaccgacaggcccaccgtgattgagtacgatgatcacgaatacatcttcgaggggttttcaatgtttgcccacgcccctttgacaaacattcccctgtgcaaggtcatccggttcaatattgactacaccatacattttatcgaggagatgatgcccgagaatttttgtgtcaaaggtctcgaactcttcagccttttcctgtttcgcgatatcctggaactgtacgattggaatctcaagggacccctcttcgaagacagtcctccttgctgcccacgtttccattttatgccgcgatttgtgagattcctccccgacggcggtaaagaggtcctgagcatgcatcaaatactgctctacctgctgcggtgtagcaaggctctggtgcccgaggaagagatcgctaacatgctacaatgggaagaactcgagtggcaaaagtacgcagaagagtgtaaaggaatgatcgtaacaaaccccggaactaagccttcctccgtgcgcatcgatcagctggaccgggagcagtttaaccccgatgtcatcacgtttcccataatagttcatttcggaatcaggccggcacagttgagctacgcaggcgatccacagtaccaaaagctttggaaaagttatgtaaaactgcggcatctgctggccaattcaccgaaagtcaagcagaccgataaacaaaagctggctcagcgggaggaggccttgcagaaaatccggcagaaaaatacaatgcgcagagaggtgacggttgagctgtctagccagggcttttggaagactggtatccgaagtgacgtttgtcaacatgccatgatgctgcccgttctgacgcatcacatacgctatcatcagtgtcttatgcatctggataagcttattggctacacctttcaagaccgctgtctcctccagctggccatgactcatccatcccaccaccttaacttcggaatgaatcccgaccatgccagaaattcactgagcaactgcgggattcgtcaaccaaagtacggcgatcgcaaagtgcaccacatgcacatgcgcaaaaagggtatcaacaccctgataaacatcatgagcaggttggggcaggacgaccctacaccttctcgcattaatcacaacgaaagacttgaatttttaggggatgctgtcgtcgagtttcttacttccgtccatttgtattacctgttcccaagcctagaagaggggggactggccacataccggacagccatagtacagaatcagcacctggccatgcttgccaagaaactggaactagatcgatttatgctctacgcccatggcccagacctctgccgcgagtccgatctccggcacgccatggccaactgtttcgaagcccttattggcgcagtctacctcgagggctccctggaggaagccaagcagctcttcggtaggttactgtttaatgaccccgatcttagagaggtgtggctgaactaccccctccacccactgcagctgcaggaacctaatacagaccgtcagctgatcgaaacaagtcccgtcctccagaagctaaccgagttcgaggaggcaatcggggtcatattcactcacgttaggctgctggctagggcctttaccttgcggactgtgggttttaatcacttaacactgggccataatcaacgcatggagtttctcggcgactcaattatgcagctggtggctaccgagtacctgttcattcattttcccgatcaccacgaaggtcacttgactcttctgaggtccagcctcgtcaataatagaacacaggcaaaggtcgccgaggagctgggaatgcaggaatacgcaataacaaacgataaaactaaaagacccgtggcactgcggaccaagaccctagccgatctgctcgagtccttcatagccgcactgtacatagataaggacctcgagtacgtgcacactttcatgaatgtctgttttttcccacggcttaaagagtttatactgaaccaggattggaatgatcctaagtcacagctgcagcaatgctgcttaactctaaggacagaaggcaaggagcccgatattccactctacaagactcttcagaccgtaggtcctagtcacgctagaacttataccgtagccgtctatttcaagggtgagaggatcggttgcggaaaaggacccagcattcagcaagccgagatgggcgcagcgatggacgctttggagaagtacaatttccctcaaatggcccaccagaagcgatttatagaaagaaagtaccggcaggagttgaaagagatgcggtgggaacgagaacaccaggaaagagaacccgatgagacagaggacattaagaaatag

SEQ ID NO: 221289 - DNA, 630 bp, synthetic construct
  misc_feature 1..630: note = Description of Artificial Sequence: Synthetic coding sequence
  source 1..630: mol_type = other DNA
atgaaggcagtggtgcaacgggtgacccgggcttcagtaacagtgggtggagaacagatctctgccattggtcggggtatctgcgttctcctcggaattagccttgaagatacacagaaggagctggagcacatggtgcggaagatcctgaacctgcgggtgttcgaagatgaatcagggaagcactggtctaaatccgtgatggataagcagtatgaaattctgtgtgtgagtcagttcaccctgcagtgcgtcctgaagggcaacaagccggacttccacctagcaatgcctactgagcaggccgaaggtttttacaatagctttctggagcagctccgaaaaacctaccgccctgaactgatcaaggacggaaaatttggtgcctacatgcaggtccacatccaaaatgatgggcctgtgacaatagagcttgaatcaccagcgcctggcaccgctacctccgaccctaaacagcttagtaaacttgaaaagcagcaacagaggaaagagaaaactcgtgccaaaggtccatcggagtcatcaaaagagcgaaacacaccaaggaaagaggatcgcagcgcctcatcaggtgcagaaggggatgttagcagtgagcgagagccctag

SEQ ID NO: 221290 - DNA, 843 bp, synthetic construct
  misc_feature 1..843: note = Description of Artificial Sequence: Synthetic coding sequence
  source 1..843: mol_type = other DNA
atgggacgcgctgagctcctggaggggaaaatgtctactcaggatcctagcgatctctggtcccggagtgatggagaggccgaactgcttcaggatcttggctggtaccacgggaatctgactcgccacgccgcagaagcgctgctgctttctaacggctgtgatggcagctatctcctgcgcgactcaaatgagaccactggtctgtatagcctatcggtccgagcaaaggactcagtaaaacatttccacgtggaatataccggatattcttttaaattcggtttcaacgagttttcctccctgaaggattttgtcaaacattttgcaaatcaaccactcattggaagcgagactgggactcttatggttctaaaacatccctatcctcgaaaggtggaggaacccagtatctatgagtctgtgcgtgtgcacacagccatgcaaacagggagaacagaggatgatttagttccaacagccccatcactaggtacaaaggaaggatatctgacaaagcagggaggtctggtgaagacatggaagacgagatggttcacccttcatcgcaatgagctgaaatacttcaaggaccagatgagccctgaacccatccggatcctcgatctcaccgagtgctctgcggttcagttcgattactctcaagagcgggtcaactgcttttgcctggtctttcccttccggacattctacctgtgtgccaagacaggagttgaggcagacgagtggataaaaatcctgagatggaagctcagtcagattcggaaacagcttaatcagggcgaaggtaccattagaagtcgctcgtttatctttaagtag

SEQ ID NO: 221291 - DNA, 4656 bp, synthetic construct
  misc_feature 1..4656: note = Description of Artificial Sequence: Synthetic coding sequence
  source 1..4656: mol_type = other DNA
atggggttctgcctggctctggcctggaccttgctcgtgggagcatggacacccctcggggctcagaatcccatatcctgggaggtccagagattcgatggatggtataataaccttatggaacacagatggggcagtaagggttcacgactgcagcggctagtgcctgcctcctacgccgatggcgtttatcagcctttgggggaaccacatttgccaaatccccgtgacctttccaacacaataagcagaggacccgcagggcttgcatccctgagaaatagaactgtgttaggggtcttcttcggatatcacgtcctctcggatctggttagcgtcgagacaccgggttgtcctgccgaattcttaaacatcagaattcccccaggcgaccccatgtttgacccagatcaacgaggcgatgtcgtcctgcccttccagcgcagtcggtgggaccccgaaacgggtagaagtccatcaaatccaagagaccctgccaaccaggtgaccggctggttggatggaagtgctatctatggaagcagccactcctggagcgacgccctgagatccttttctcgtggtcagctcgcgtctggcccagaccccgcattcccgagagactcacagaatcccctgctgatgtgggccgcaccagatcctgccactggccagaatggaccccgtggtctatatgctttcggtgccgaacgcggtaaccgagaaccatttttgcaggccctgggactgctgtggttccgataccacaacctctgggctcaacgactcgccaggcagcatccagactgggaagacgaggagctgtttcagcatgccaggaaacgggtgatcgccacctaccagaacatagccgtctatgagtggttgccctcgtttctgcaaaagactcttcccgaatatactggatataggccatttttggatccgtccattagttccgagttcgttgcggcatctgaacaatttctgtcaaccatggtgccacccggagtctacatgcgaaacgccagttgtcacttccaaggcgtgataaacaggaactcttcggtaagcagagccctgagggtgtgcaattcctattggagccgtgagcatcctagtctacagagcgccgaggatgtcgacgccctgctactgggtatggcgtctcagatagcagaacgagaagatcacgtgctggtcgaggacgttcgcgacttttggccaggtccactgaagttctctcggacagatcatttggcaagttgtttgcaacgtgggagggatctgggtctcccctcctataccaaggccagagccgcacttggcttatcccctatcacacgatggcaggatattaatccagcactaagccgaagcaacgacacagtgttggaggctaccgccgctctctataaccaggatctcagttggctggaactgctgccagggggactgctcgaaagccaccgagacccagggcctctcttctctacgattgtgttggagcagttcgtaaggctgagagatggtgacagatactggtttgagaacactcggaatggcctgtttagcaagaaagagatcgaagagattagaaatactactctgcaagatgtgctggtggccgtcatcaacatcgaccccagcgccttgcaaccaaatgtcttcgtttggcataaaggcgacccttgcccccagcctcggcagctgtcgacagagggccttcccgcttgcgctccttccgtcgtgagagactatttcgagggctccggcttcggctttggagtgaccataggaaccctgtgctgtttccccctagtttccttgctatctgcctggatcgttgcccgtctaagaatgagaaattttaagaggcttcagggacaggacaggcagagcatcgtttcagaaaagctcgtgggtggaatggaggctttagaatggcagggtcataaggagccctgcagaccagtgctggtgtacctgcaacccggacagatccgcgttgtcgacggccgtctgaccgttctgcgcaccattcaactccagcctccccaaaaagtgaactttgttctgagtagcaaccggggaaggaggacgctattgctaaagatacccaaggagtacgatctggtgcttctgttcaatctcgaggaggagagacaggcactggtggagaatcttaggggggctctgaaagaatccggtcttagcatccaagagtgggagttacgtgagcaggagctaatgagggctgcagtcacacgcgaacagagaagacacctcctcgagacattcttcaggcacctattcagtcaagttcttgacattaatcaggcggatgcaggcacattacccctggactcctcacaaaaggttagagaggcccttacttgcgagctgtctcgtgccgagtttgcagaaagcttgggattgaagccgcaggacatgttcgtcgagagtatgttctctcttgctgataaagacggcaacggctacctctcgttccgagaattcctggacatactggtcgtttttatgaaaggcagccccgaagagaagtccaggctgatgttcagaatgtatgactttgatgggaacggactgatttccaaggatgagtttatacgaatgctgcgatctttcatcgagatatctaataactgtctctcaaaggcccagctggccgaggtggtggagagtatgttcagggagtctggattccaggacaaagaggaactgacctgggaggatttccacttcatgctgcgcgatcataatagcgagcttcgattcacacagctgtgtgtgaaaggcgtcgaggtccctgaggtcatcaaggatctgtgtcggagggctagttatatatcccaggatatgatttgtccatcccccagggtttctgcaagatgcagccgatccgatatagaaactgagttgacccctcagcggctgcagtgccctatggacaccgaccccccacaagagataaggaggcgattcgggaagaaagtgacttcttttcagcctttgctgttcaccgaggcccatagagagaagttccaaagaagttgtctgcaccaaactgtgcagcagttcaagaggttcatagaaaattaccggcgacatatcgggtgcgtcgctgtcttctacgctatcgctggcggtttgttcctggaacgcgcttactattatgcttttgcggctcaccacaccggcataaccgacacaacacgggttggtataatcctgtccaggggtaccgccgcaagtatatcctttatgttctcctacatccttcttaccatgtgccgcaatctcatcacatttctgcgggagacatttctgaaccgctacgtgccatttgatgccgctgtggactttcaccggctgatcgcctcaacagcaatcgtactgacggttctgcactccgttggacatgtggtcaatgtttatctgttttctatctcgcctctttccgtgctatcatgcttgtttcctggtctgttccatgatgacggcagcgagctgccccagaagtactactggtggttcttccagacggtgccaggtttgactggcgtcgttttgcttctgatccttgctatcatgtacgtattcgcatcccaccacttcagacgccgttcattccggggattctggctcacacaccacttgtacatattactctatgtgctgctgatcatacatggctcttttgccctgatacagctgccaagatttcatatcttcttcttggttcccgctataatttatggaggtgataaactggttagtctgagtaggaaaaaggttgaaatttcggttgtgaaagcagagctactcccctccggcgtgacccacctgcgcttccagagacctcagggcttcgagtataagagcggccagtgggtcagaatcgcttgtctggccctgggcaccactgagtaccaccccttcactctgacctctgcccctcacgaggacacgctttctctccacatccgggctgctggcccttggacgaccagacttagggaaatatattcagctcccaccggtgatcgatgtgcaaggtacccaaagttgtacttggatggaccatttggcgagggccatcaggaatggcacaagtttgaggtttcagtgctggtggggggaggcatcggcgtaacaccatttgcatcaatccttaaagacctcgttttcaagtcctccgtgagttgccaggtgttctgcaagaagatctactttatatgggtgacaaggactcagaggcagtttgagtggctggctgacataattagggaggtggaagagaacgaccaccaggacttggtgagtgtgcatatttatattacccagcttgccgagaagttcgacctccggactactatgctttacatctgcgaacgtcacttccagaaggttctgaatcggtccttgtttacaggactaaggagcattacacattttggaagacctccattcgagcccttctttaattcactccaggaggtccacccccaggtgcggaagatcggcgtgttctcttgcggaccccctggaatgactaaaaatgtggaaaaagcttgtcagttaatcaaccgtcaggatcggacccacttttctcaccactacgagaatttttag
